United States Patent Application Publication US 2021/0260178 A1 - sequence listing, part 8

SEQ ID NO: 13165 - RNA, 595 nt, Artificial Sequence
  mRNA product Design a-2 comprising derived and/or modified sequence from LASV(LASV003-NIG-2008;Clade II)__AIT17578__Z (opt6)
gggagaguccgcucagccagguugcagaagcggcuuagcguguguccuaaucuucucucugcguguagguaggccugugccgcaaacaagcuuaccaugggaaacagacaagcaaaaucaacaaaaguagacgaacaccaaagagcacaccuaguaccagacgcaucacaccuaggaccacaauucugcaaaucaugcugguucgaaaacaaaggacuaguagaaugcaacaaccacuaccuaugccuaaacugccuaucacuacuacuaucaguaucaucaagaugcccaauaugcaaaaugccacuaccaacaaaacuaagagcagcagcacaaccaucagcaccaucaacagaaucagcacaaaacacagcaccaccaccauacgcaccauaaggacuagucccuguucccagagcccacuuuuuuuucuuuuuuugaaauaaaauagccugucuuucagaucuaaaaaaaaaaaaaaaaaaaaaaaaaaaaaaaaaaaaaaaaaaaaaaaaaaaaaaaaaaaaaaaaugcaucccccccccccccccccccccccccccccccaaaggcucuuuucagagccaccagaauu

SEQ ID NO: 13166 - RNA, 595 nt, Artificial Sequence
  mRNA product Design a-2 comprising derived and/or modified sequence from LASV(LASV035-NIG-2009;Clade II)__AIT17586__Z (opt6)
gggagaguccgcucagccagguugcagaagcggcuuagcguguguccuaaucuucucucugcguguagguaggccugugccgcaaacaagcuuaccaugggaaacaaacaagcaaaaucaacaaaaguagacgaacaccaaagagcacaccuaguaccagacgcaucacaccuaggaccacaauucugcaaaucaugcugguucgaaaacagaggacuaguagaaugcaacaaccacuaccuaugccuaaacugccuaucacuacuacuaucaguaucaucaagaugcccaauaugcaaaaugccacuaccaacaagacuaaaagcagcagcacaaccaucagcaccaucaacagaaguaacacaaaacacaacaccaccaccauacacaccauaaggacuagucccuguucccagagcccacuuuuuuuucuuuuuuugaaauaaaauagccugucuuucagaucuaaaaaaaaaaaaaaaaaaaaaaaaaaaaaaaaaaaaaaaaaaaaaaaaaaaaaaaaaaaaaaaaugcaucccccccccccccccccccccccccccccccaaaggcucuuuucagagccaccagaauu

SEQ ID NO: 13167 - RNA, 595 nt, Artificial Sequence
  mRNA product Design a-2 comprising derived and/or modified sequence from LASV(LASV1000-NIG-2009;Clade II)__AIT17780__Z (opt6)
gggagaguccgcucagccagguugcagaagcggcuuagcguguguccuaaucuucucucugcguguagguaggccugugccgcaaacaagcuuaccaugggaaacagacaaacaaaaucaacaaaaguagacgaacaccaaagagcauaccuaguaccagacgcaucacuacuaggaccacaauucugcaaaucaugcugguucgaaaacaaaggacuaguagaaugcaacaaccacuaccuaugccuaaacugccuaucacuacuacuaucaguaucaucaagaugcccaauaugcaaaaugccacuaccaacaagacuaaaagcagcagcacaaccaucagcaccaccaacagaagcaauacaaaacacaacaccaccaccauacacaccauaaggacuagucccuguucccagagcccacuuuuuuuucuuuuuuugaaauaaaauagccugucuuucagaucuaaaaaaaaaaaaaaaaaaaaaaaaaaaaaaaaaaaaaaaaaaaaaaaaaaaaaaaaaaaaaaaaugcaucccccccccccccccccccccccccccccccaaaggcucuuuucagagccaccagaauu

SEQ ID NO: 13168 - RNA, 595 nt, Artificial Sequence
  mRNA product Design a-2 comprising derived and/or modified sequence from LASV(LASV221-NIG-2010;Clade II)__AIT17622__Z (opt6)
gggagaguccgcucagccagguugcagaagcggcuuagcguguguccuaaucuucucucugcguguagguaggccugugccgcaaacaagcuuaccaugggaaacagacaagccaaaucaacaaaaguagacgaacaccaaagagcacaccuaguaccagacgcaucacaccuaggaccacaauucugcaaaucaugcugguucgaaaacagaggauuaguagaaugcaacaaccacuaccuaugccuaaacugccuaucacuacuacuaucaguaucaucaagaugcccaauaugcaaaaugccacuaccaacaaaacuaaaagcagcaacacaaccaucagcaccaucaacagaaguaacacaaaacacaauaccaccaccauacucaccauaaggacuagucccuguucccagagcccacuuuuuuuucuuuuuuugaaauaaaauagccugucuuucagaucuaaaaaaaaaaaaaaaaaaaaaaaaaaaaaaaaaaaaaaaaaaaaaaaaaaaaaaaaaaaaaaaaugcaucccccccccccccccccccccccccccccccaaaggcucuuuucagagccaccagaauu

SEQ ID NO: 13169 - RNA, 595 nt, Artificial Sequence
  mRNA product Design a-2 comprising derived and/or modified sequence from LASV(LASV237-NIG-2010;Clade II)__AIT17636__Z (opt6)
gggagaguccgcucagccagguugcagaagcggcuuagcguguguccuaaucuucucucugcguguagguaggccugugccgcaaacaagcuuaccaugggaaacagacaagcaaaaucaacaaaaguagacgaacaccaaagagcacaccuaguaccagacgcaucacaccuaggaccacaauucugcaaaucaugcugguucgaaaacagaggacucguagaaugcaacaaccacuaccuaugccuaaacugccuaucacuacuacuaucaguaucaucaagaugcccaauaugcaaaaugccacuaccaacaaaacuaaaagcagcagcacaaccaucagcaccaucaauagaaacaauacaaaacacaacaccaccaccauacacaccauaaggacuagucccuguucccagagcccacuuuuuuuucuuuuuuugaaauaaaauagccugucuuucagaucuaaaaaaaaaaaaaaaaaaaaaaaaaaaaaaaaaaaaaaaaaaaaaaaaaaaaaaaaaaaaaaaaugcaucccccccccccccccccccccccccccccccaaaggcucuuuucagagccaccagaauu

SEQ ID NO: 13170 - RNA, 595 nt, Artificial Sequence
  mRNA product Design a-2 comprising derived and/or modified sequence from LASV(LASV253-NIG-2011;Clade II)__AIT17668__Z (opt6)
gggagaguccgcucagccagguugcagaagcggcuuagcguguguccuaaucuucucucugcguguagguaggccugugccgcaaacaagcuuaccaugggaaacagacaagcaaaaucaacaaaaguagacgaacaccaaagagcacaccuaguaccagacgcaucacaccuaggaccacaauucugcaaaucaugcugguucgaaaacaaaggacuaguagaaugcaacaaccacuaccuaugccuaaacugccuaucacuacuacuaucaguaucaucaagaugcccaauaugcaaaaugccauuaccaacaaaacuaaaaacaacagcacaaccaucagcaccaccaacagaagcagcaaaaaacacagcaccaccaccauacgcaccauaaggacuagucccuguucccagagcccacuuuuuuuucuuuuuuugaaauaaaauagccugucuuucagaucuaaaaaaaaaaaaaaaaaaaaaaaaaaaaaaaaaaaaaaaaaaaaaaaaaaaaaaaaaaaaaaaaugcaucccccccccccccccccccccccccccccccaaaggcucuuuucagagccaccagaauu

SEQ ID NO: 13171 - RNA, 595 nt, Artificial Sequence
  mRNA product Design a-2 comprising derived and/or modified sequence from LASV(G1180-SLE-2010;Clade IV)__AIT17166__Z (opt6)
gggagaguccgcucagccagguugcagaagcggcuuagcguguguccuaaucuucucucugcguguagguaggccugugccgcaaacaagcuuaccaugggaaacaaacaagcaaaagcaccagaagcaaaagacucaccaagagcaucacuaauaccagacgcaacacaccuaggaccacaauucugcaaaucaugcugguucgaaacaaaaggacuaguagaaugcaacaaccacuaccuaugccuaaacugccuaacacuacuacuaucaguaucaaacagaugcccaauaugcaaaaugccacuaccaacaaaacuaagaccaucagcaacaccaacagcaccaccaacagaagcagcagacucaauaggaccaccaccauacucaccauaaggacuagucccuguucccagagcccacuuuuuuuucuuuuuuugaaauaaaauagccugucuuucagaucuaaaaaaaaaaaaaaaaaaaaaaaaaaaaaaaaaaaaaaaaaaaaaaaaaaaaaaaaaaaaaaaaugcaucccccccccccccccccccccccccccccccaaaggcucuuuucagagccaccagaauu

SEQ ID NO: 13172 - RNA, 595 nt, Artificial Sequence
  mRNA product Design a-2 comprising derived and/or modified sequence from LASV(G1442-SLE-2011;Clade IV)__AIT17178__Z (opt6)
gggagaguccgcucagccagguugcagaagcggcuuagcguguguccuaaucuucucucugcguguagguaggccugugccgcaaacaagcuuaccaugggaaacaaacaagcaaaagcaucagaagcaaaagacucaccaagagcaucacuaauaccagacgcaacacaccuaggaccacaauucugcaaaucaugcugguucgaaaacaaaggauuaguagaaugcaacaaccacuaccuaugccuaaacugccuaucacuacuacuaucaguaucaucaagaugcccaauaugcaaaaugccacuaccaacaagacuaagaccaucaacagcaccaacagcaccaccagcaagagcaggagacaacauaaaaccaccaccauacucaccauaaggacuagucccuguucccagagcccacuuuuuuuucuuuuuuugaaauaaaauagccugucuuucagaucuaaaaaaaaaaaaaaaaaaaaaaaaaaaaaaaaaaaaaaaaaaaaaaaaaaaaaaaaaaaaaaaaugcaucccccccccccccccccccccccccccccccaaaggcucuuuucagagccaccagaauu

SEQ ID NO: 13173 - RNA, 595 nt, Artificial Sequence
  mRNA product Design a-2 comprising derived and/or modified sequence from LASV(G502-SLE-2009;Clade IV)__AIT17124__Z (opt6)
gggagaguccgcucagccagguugcagaagcggcuuagcguguguccuaaucuucucucugcguguagguaggccugugccgcaaacaagcuuaccaugggaaacaaacaaguaaaaacaccagaagcaaaagacucaccaagagcaucacuaauaccagacgcaacacaccuaggaccacaauucugcaaaucaugcugguucgaaaacaaaggacuaguagaaugcaacaaccacuaccuaugccuaaacugccuaacacuacuacuaucaguaggaaacagaugcccaauaugcaaaaugccacuaccaacaaaacuaagaccaucagucacaccaacagcaccaccaacaagagcagcagacucaauaggaccaccaccauacucaccauaaggacuagucccuguucccagagcccacuuuuuuuucuuuuuuugaaauaaaauagccugucuuucagaucuaaaaaaaaaaaaaaaaaaaaaaaaaaaaaaaaaaaaaaaaaaaaaaaaaaaaaaaaaaaaaaaaugcaucccccccccccccccccccccccccccccccaaaggcucuuuucagagccaccagaauu

SEQ ID NO: 13174 - RNA, 595 nt, Artificial Sequence
  mRNA product Design a-2 comprising derived and/or modified sequence from LASV(G733-SLE-2010;Clade IV)__AIT17152__Z (opt6)
gggagaguccgcucagccagguugcagaagcggcuuagcguguguccuaaucuucucucugcguguagguaggccugugccgcaaacaagcuuaccaugggaaacaaacaagcaaaaacaccagaaacaaaagacucaccaagagcaucauuaauaccagacgcaacacaccuaggaccacaauucugcaaaucaugcugguucgaaaacaaaggauuaguagaaugcaacaaccacuaccuaugccuaaacugccuaacacuacuacuaucaguaucaaacagaugcccaauaugcaaaaugccacuaccaacaaaacuaagaccaucaacagcaccaacagcaccaccagcaggagcagcagacaacacaagaccaccaccauacucaccauaaggacuagucccuguucccagagcccacuuuuuuuucuuuuuuugaaauaaaauagccugucuuucagaucuaaaaaaaaaaaaaaaaaaaaaaaaaaaaaaaaaaaaaaaaaaaaaaaaaaaaaaaaaaaaaaaaugcaucccccccccccccccccccccccccccccccaaaggcucuuuucagagccaccagaauu

SEQ ID NO: 13175 - RNA, 607 nt, Artificial Sequence
  mRNA product Design a-2 comprising derived and/or modified sequence from MOPV/LASV reassortant(IGS-1;Clade IV)__AFY05533__Z (opt6)
gggagaguccgcucagccagguugcagaagcggcuuagcguguguccuaaucuucucucugcguguagguaggccugugccgcaaacaagcuuaccaugggaaaaacacaaucaaaaggacaaccauccacaaaccuacuaaaagaaacagaaccaagacacccaguaauaccagacgcaagaggaacaggaccagaauucugcaaaucaugcugguucgaaagaagaggacuaguaagaugcaacgaccacuaccuaugccuaaacugccuaacacuacuacacacaguaucagacagaugcccaauaugcaaacacaaacuaccauucagacuagaacuacaaacacaaccaacagcaccaccagaaauaccaccaucacaaaacccaccaccauacucaccauaaggacuagucccuguucccagagcccacuuuuuuuucuuuuuuugaaauaaaauagccugucuuucagaucuaaaaaaaaaaaaaaaaaaaaaaaaaaaaaaaaaaaaaaaaaaaaaaaaaaaaaaaaaaaaaaaaugcaucccccccccccccccccccccccccccccccaaaggcucuuuucagagccaccagaauu

SEQ ID NO: 13176 - RNA, 595 nt, Artificial Sequence
  mRNA product Design a-2 comprising derived and/or modified sequence from LASV(LM776-SLE-2012;Clade IV)__AIT17824__Z (opt6)
gggagaguccgcucagccagguugcagaagcggcuuagcguguguccuaaucuucucucugcguguagguaggccugugccgcaaacaagcuuaccaugggaaacaaacaagcaaaagcaucagaagaaaaaaacucaccaagagcaucacuaauaccagacgcaacacaccuaggaccacaauucugcaaaucaugcugguucgaaaacaaaggacuaguagaaugcaacaaucacuaccuaugccuaaacugccuaacacuacuacuaucaguaucaaacagaugcccaauaugcaaaaugccacuaccaacaaaacuaagaccaucaacaacaccaacagcaccaccaacaggagcagcagacucaauaagaccaccaccauacucaccauaaggacuagucccuguucccagagcccacuuuuuuuucuuuuuuugaaauaaaauagccugucuuucagaucuaaaaaaaaaaaaaaaaaaaaaaaaaaaaaaaaaaaaaaaaaaaaaaaaaaaaaaaaaaaaaaaaugcaucccccccccccccccccccccccccccccccaaaggcucuuuucagagccaccagaauu

SEQ ID NO: 13177 - RNA, 595 nt, Artificial Sequence
  mRNA product Design a-2 comprising derived and/or modified sequence from LASV(Mad39;Clade IV)__ANH09743__Z (opt6)
gggagaguccgcucagccagguugcagaagcggcuuagcguguguccuaaucuucucucugcguguagguaggccugugccgcaaacaagcuuaccaugggaaacaaacaagcaaaagcaucagaaguagaagacggaccaagagcaucacuaauaccagacgcaacacaccuaggaccacaauucugcaaaucaugcugguucgaaaacaaaucacuaguagaaugcaacaaccacuaccuaugccuaaacugccuaacacuacuacuaucaguaucaaacagaugcccaauaugcaaaaugccacuaccaacaagacuaaaaccaucaguaguaccaacagcaccaccaacacgagcaggagacggaacaagaccaccaccauacucaccauaaggacuagucccuguucccagagcccacuuuuuuuucuuuuuuugaaauaaaauagccugucuuucagaucuaaaaaaaaaaaaaaaaaaaaaaaaaaaaaaaaaaaaaaaaaaaaaaaaaaaaaaaaaaaaaaaaugcaucccccccccccccccccccccccccccccccaaaggcucuuuucagagccaccagaauu

SEQ ID NO: 13178 - RNA, 595 nt, Artificial Sequence
  mRNA product Design a-2 comprising derived and/or modified sequence from LASV(Z0947-SLE-2011;Clade IV)__AIT17838__Z (opt6)
gggagaguccgcucagccagguugcagaagcggcuuagcguguguccuaaucuucucucugcguguagguaggccugugccgcaaacaagcuuaccaugggaaacaaacaagcaaaaguaccagaaucaaaagacucaccaagagcaucacuaauaccagacgcaacacaccuaggaccacaauucugcaaaucaugcugguucgaaaacaaaggacuaguagaaugcaacaaccacuaccuaugccuaaacugccuaacacuacuacuaucaguaucaaacagaugcccaauaugcaaaaugccacuaccaacaaaacuaaaaccaucagcagcaccaacagcaccaccaacaggagcagcagacucaauaagaccaccaccauacucaccauaaggacuagucccuguucccagagcccacuuuuuuuucuuuuuuugaaauaaaauagccugucuuucagaucuaaaaaaaaaaaaaaaaaaaaaaaaaaaaaaaaaaaaaaaaaaaaaaaaaaaaaaaaaaaaaaaaugcaucccccccccccccccccccccccccccccccaaaggcucuuuucagagccaccagaauu

SEQ ID NO: 13179 - RNA, 595 nt, Artificial Sequence
  mRNA product Design a-2 comprising derived and/or modified sequence from LASV(Josiah;Clade IV)__ADY11072/NP_694871__Z (opt11)
gggagaguccgcucagccagguugcagaagcggcuuagcguguguccuaaucuucucucugcguguagguaggccugugccgcaaacaagcuuaccaugggcaacaaacaagccaaagcccccgaauccaaagacuccccccgcgccucccucauccccgacgccacccaccucggcccccaauucugcaaauccugcugguucgaaaacaaaggccucgucgaaugcaacaaccacuaccucugccucaacugccucacccuacuccucuccgucuccaaccgcugccccaucugcaaaaugccccuccccaccaaacuccgccccuccgccgcccccaccgccccccccaccggcgccgccgacuccauccgccccccccccuacucccccuaaggacuagucccuguucccagagcccacuuuuuuuucuuuuuuugaaauaaaauagccugucuuucagaucuaaaaaaaaaaaaaaaaaaaaaaaaaaaaaaaaaaaaaaaaaaaaaaaaaaaaaaaaaaaaaaaaugcaucccccccccccccccccccccccccccccccaaaggcucuuuucagagccaccagaauu

SEQ ID NO: 13180 - RNA, 598 nt, Artificial Sequence
  mRNA product Design a-2 comprising derived and/or modified sequence from LASV(Pinneo-NIG-1969;Clade I)__AIT17834__Z (opt11)
gggagaguccgcucagccagguugcagaagcggcuuagcguguguccuaaucuucucucugcguguagguaggccugugccgcaaacaagcuuaccaugggcaacaaacaaacccgcuccccccccaaacccgaacacccccgccccacccuccucccagacgccucccaccucggcccccaauucugcaaauccugcugguucgaaaacaaaggccuagucgaaugcaacaaccacuaccucugccucaacugccucacccuccuccucuccgucuccgaccgcugccccaucugcaaaaugccccuccccaccaaacuugccguccgcacccaacccuccgcccccccccucaaccaaggcaacacccaauccucccccccccccuacucccccuaaggacuagucccuguucccagagcccacuuuuuuuucuuuuuuugaaauaaaauagccugucuuucagaucuaaaaaaaaaaaaaaaaaaaaaaaaaaaaaaaaaaaaaaaaaaaaaaaaaaaaaaaaaaaaaaaaugcaucccccccccccccccccccccccccccccccaaaggcucuuuucagagccaccagaauu

SEQ ID NO: 13181 - RNA, 595 nt, Artificial Sequence
  mRNA product Design a-2 comprising derived and/or modified sequence from LASV(Nig08-04;Clade II)__ADU56612__Z (opt11)
gggagaguccgcucagccagguugcagaagcggcuuagcguguguccuaaucuucucucugcguguagguaggccugugccgcaaacaagcuuaccaugggcaaccgccaaacccgccccaccgaagcaaccgaacaaucccgcgcccaccucguccccgacgccucccaccucggcccccaauucugcaaauccugcugguucgaaaaccgcggccucgucgaaugcaacaaccacuaccucugccucaacugccucucccuccuccucuccgucuccucccgcugccccaucugcaaaaugccccuccccacccgccucaaagccuccgcccaacccuccgccccccccaccgaagccccccaaaacaccacccccccccccuacacccccuaaggacuagucccuguucccagagcccacuuuuuuuucuuuuuuugaaauaaaauagccugucuuucagaucuaaaaaaaaaaaaaaaaaaaaaaaaaaaaaaaaaaaaaaaaaaaaaaaaaaaaaaaaaaaaaaaaugcaucccccccccccccccccccccccccccccccaaaggcucuuuucagagccaccagaauu

SEQ ID NO: 13182 - RNA, 595 nt, Artificial Sequence
  mRNA product Design a-2 comprising derived and/or modified sequence from LASV(Nig08-A19;Clade III)__ADU56620__Z (opt11)
gggagaguccgcucagccagguugcagaagcggcuuagcguguguccuaaucuucucucugcguguagguaggccugugccgcaaacaagcuuaccaugggcggcaaacacaccaaaccccaacgcgaauccaacuccccccgcgccucccucauccccgacgccacccaccucggcccccaauucugcaaauccugcugguucgaaaacaaaggccucgucgaaugcaacaaccacuaccucugccucaacugccucacccuccuccucuccgucuccaaccgcugccccaucugcaaaaugccccuccccacccgccuccgcgccuccaccaaccccaccgccccccaagucgaacaagucggccccaccaaccccccccccuacucccccuaaggacuagucccuguucccagagcccacuuuuuuuucuuuuuuugaaauaaaauagccugucuuucagaucuaaaaaaaaaaaaaaaaaaaaaaaaaaaaaaaaaaaaaaaaaaaaaaaaaaaaaaaaaaaaaaaaugcaucccccccccccccccccccccccccccccccaaaggcucuuuucagagccaccagaauu

SEQ ID NO: 13183 - RNA, 595 nt, Artificial Sequence
  mRNA product Design a-2 comprising derived and/or modified sequence from LASV(AV;Clade V)__CCA30312__Z (opt11)
gggagaguccgcucagccagguugcagaagcggcuuagcguguguccuaaucuucucucugcguguagguaggccugugccgcaaacaagcuuaccaugggcaaccgccaagccaaaaaccccgaagucgaaaacuccccccgcgccucccucauccccgacgccacccaccucggcccccaauucugcaaauccugcugguucgaaaacaaaggccucgucgaaugcaacaaccacuaccucugccucaacugccucucccuccuccucuccgucuccaaccgcugccccaucugcaaaaugccccuccccacccgccuccgccccaccaccacccccaccgccccccaaaucaucaaagaaaacaccaccaaccccccccccuacacccccuaaggacuagucccuguucccagagcccacuuuuuuuucuuuuuuugaaauaaaauagccugucuuucagaucuaaaaaaaaaaaaaaaaaaaaaaaaaaaaaaaaaaaaaaaaaaaaaaaaaaaaaaaaaaaaaaaaugcaucccccccccccccccccccccccccccccccaaaggcucuuuucagagccaccagaauu

SEQ ID NO: 13184 - RNA, 595 nt, Artificial Sequence
  mRNA product Design a-2 comprising derived and/or modified sequence from LASV(Togo/2016/7082;Clade VI)__AMR44579__Z (opt11)
gggagaguccgcucagccagguugcagaagcggcuuagcguguguccuaaucuucucucugcguguagguaggccugugccgcaaacaagcuuaccaugggcgcccgccaaaccaaacaaccccaaaucgaaggcuccccccgcgccucccucguccccgacgccucccaccucggcccccaauucugcaaauccugcugguucgaaaacaaaggccucgucgaaugcaacaaccacuaccucugccucaacugccucucccuccuccuauccgucucaaaccgcugccccaucugcaaaaugccccuccccaccaaacuccgcgucuccuccgcccccuccgccccccccgccgccaccgcccaacccggcacccccccccccuacucccccuaaggacuagucccuguucccagagcccacuuuuuuuucuuuuuuugaaauaaaauagccugucuuucagaucuaaaaaaaaaaaaaaaaaaaaaaaaaaaaaaaaaaaaaaaaaaaaaaaaaaaaaaaaaaaaaaaaugcaucccccccccccccccccccccccccccccccaaaggcucuuuucagagccaccagaauu

SEQ ID NO: 13185 - RNA, 595 nt, Artificial Sequence
  mRNA product Design a-2 comprising derived and/or modified sequence from LASV(KAK-428;Clade n.d. (VII))__ANH09761__Z (opt11)
gggagaguccgcucagccagguugcagaagcggcuuagcguguguccuaaucuucucucugcguguagguaggccugugccgcaaacaagcuuaccaugggcaacaaaggcaccaaacccacccaaaacuccgaacccucccgcgccaaccucguccccgacgccuccuaccucggcccccaauucugcaaauccugcugguucgaaaacaaaggccucgucgaaugcaacaaccacuaccucugccucaacugccucaccaugcuccucuccgucuccaaccgcugccccaucugcaaaaugccccuccccaccaaaaucaaagccuccggcucccccuccgccccccccaccgaagccaacuccgccgucucccccccccccuacacccccuaaggacuagucccuguucccagagcccacuuuuuuuucuuuuuuugaaauaaaauagccugucuuucagaucuaaaaaaaaaaaaaaaaaaaaaaaaaaaaaaaaaaaaaaaaaaaaaaaaaaaaaaaaaaaaaaaaugcaucccccccccccccccccccccccccccccccaaaggcucuuuucagagccaccagaauu

SEQ ID NO: 13186 - RNA, 595 nt, Artificial Sequence
  mRNA product Design a-2 comprising derived and/or modified sequence from LASV(ISTH0009-NIG-2011;Clade II)__AIT17402__Z (opt11)
gggagaguccgcucagccagguugcagaagcggcuuagcguguguccuaaucuucucucugcguguagguaggccugugccgcaaacaagcuuaccaugggcaaccgccaagccaaauccaccaaagucgacgaacaccaacgcgcccaccucguccccgacgccucccaccucggcccccaauucugcaaauccugcugguucgaaaaccgcggccuagucgaaugcaacaaccacuaccucugccucaacugccucucccuccuccucuccgucuccucccgcugccccaucugcaaaaugccccuccccaccaaacucaaagccgccgcccaacccuccgcccccuccaccgaaaccauccaaaacaccacccccccccccuacacccccuaaggacuagucccuguucccagagcccacuuuuuuuucuuuuuuugaaauaaaauagccugucuuucagaucuaaaaaaaaaaaaaaaaaaaaaaaaaaaaaaaaaaaaaaaaaaaaaaaaaaaaaaaaaaaaaaaaugcaucccccccccccccccccccccccccccccccaaaggcucuuuucagagccaccagaauu

SEQ ID NO: 13187 - RNA, 595 nt, Artificial Sequence
  mRNA product Design a-2 comprising derived and/or modified sequence from LASV(ISTH2010-NIG-2012;Clade II)__AIT17480__Z (opt11)
gggagaguccgcucagccagguugcagaagcggcuuagcguguguccuaaucuucucucugcguguagguaggccugugccgcaaacaagcuuaccaugggcaaccgccacgccaaauccaccaaagucgacgaacaccaacgcgcccaccucguccccgacgccucccaccuaggcccccaauucugcaaauccugcugguucgaaaaccgcggccucgucgaaugcaacaaccacuaccucugccucaacugccucucccuccuccucuccgucuccucccgcugccccaucugcaaaaugccccuccccaccaaacucaaagccgccgcccaaccauccgcccccuccaccgaagucauccaauccaccacccccccccccuacacccccuaaggacuagucccuguucccagagcccacuuuuuuuucuuuuuuugaaauaaaauagccugucuuucagaucuaaaaaaaaaaaaaaaaaaaaaaaaaaaaaaaaaaaaaaaaaaaaaaaaaaaaaaaaaaaaaaaaugcaucccccccccccccccccccccccccccccccaaaggcucuuuucagagccaccagaauu

SEQ ID NO: 13188 - RNA, 595 nt, Artificial Sequence
  mRNA product Design a-2 comprising derived and/or modified sequence from LASV(Lassa virus/H.sapiens-wt/NGA/2016/ISTH_0017;Clade II)__AVO03713__Z (opt11)
gggagaguccgcucagccagguugcagaagcggcuuagcguguguccuaaucuucucucugcguguagguaggccugugccgcaaacaagcuuaccaugggcaaccgccaagccaaauccaccaaagucgacgaacaccaacgcgcccaccucguccccgacgccucccaccucggcccccaauucugcaaauccugcugguucgaaaaccgcggccucgucgaaugcaacaaccacuaccucugccucaacugccucucccuccuccucuccgucuccucccgcugccccaucugcaaaaugccccuccccaccaaacucaaagccgccacccaacccuccgcccccuccaccgaagucaaccaaaacaccacccccccccccuacacccccuaaggacuagucccuguucccagagcccacuuuuuuuucuuuuuuugaaauaaaauagccugucuuucagaucuaaaaaaaaaaaaaaaaaaaaaaaaaaaaaaaaaaaaaaaaaaaaaaaaaaaaaaaaaaaaaaaaugcaucccccccccccccccccccccccccccccccaaaggcucuuuucagagccaccagaauu

SEQ ID NO: 13189 - RNA, 595 nt, Artificial Sequence
  mRNA product Design a-2 comprising derived and/or modified sequence from LASV(Lassa virus/H.sapiens-wt/NGA/2018/ISTH_0959;Clade II)__AVV65084__Z (opt11)
gggagaguccgcucagccagguugcagaagcggcuuagcguguguccuaaucuucucucugcguguagguaggccugugccgcaaacaagcuuaccaugggcaacaaacaagccaaauccaccaaagucgacgaacaccaacgcgcccaccucguccccgacgccucccaccucggcccccaauucugcaaauccugcugguucgaaaaccgcggccucgucgaaugcaacaaccacuaccucugccucaacugccucucccuccuccucuccgucuccucccgcugccccaucugcaaaaugccccuccccaccaaacucaaagccgccgcccaacccuccgcccccuccaccgaagccauccaauccaccacccccccccccuacacccccuaaggacuagucccuguucccagagcccacuuuuuuuucuuuuuuugaaauaaaauagccugucuuucagaucuaaaaaaaaaaaaaaaaaaaaaaaaaaaaaaaaaaaaaaaaaaaaaaaaaaaaaaaaaaaaaaaaugcaucccccccccccccccccccccccccccccccaaaggcucuuuucagagccaccagaauu

SEQ ID NO: 13190 - RNA, 595 nt, Artificial Sequence
  mRNA product Design a-2 comprising derived and/or modified sequence from LASV(LASV003-NIG-2008;Clade II)__AIT17578__Z (opt11)
gggagaguccgcucagccagguugcagaagcggcuuagcguguguccuaaucuucucucugcguguagguaggccugugccgcaaacaagcuuaccaugggcaaccgccaagccaaauccaccaaagucgacgaacaccaacgcgcccaccucguccccgacgccucccaccucggcccccaauucugcaaaucaugcugguucgaaaacaaaggccucgucgaaugcaacaaccacuaccucugccucaacugccucucacuccuccucuccgucuccucccgcugccccaucugcaaaaugccccuccccaccaaacuccgcgccgccgcccaacccuccgcccccuccaccgaauccgcccaaaacaccgcccccccccccuacgcccccuaaggacuagucccuguucccagagcccacuuuuuuuucuuuuuuugaaauaaaauagccugucuuucagaucuaaaaaaaaaaaaaaaaaaaaaaaaaaaaaaaaaaaaaaaaaaaaaaaaaaaaaaaaaaaaaaaaugcaucccccccccccccccccccccccccccccccaaaggcucuuuucagagccaccagaauu

SEQ ID NO: 13191 - RNA, 595 nt, Artificial Sequence
  mRNA product Design a-2 comprising derived and/or modified sequence from LASV(LASV035-NIG-2009;Clade II)__AIT17586__Z (opt11)
gggagaguccgcucagccagguugcagaagcggcuuagcguguguccuaaucuucucucugcguguagguaggccugugccgcaaacaagcuuaccaugggcaacaaacaagccaaauccaccaaagucgacgaacaccaacgcgcccaccucguccccgacgccucccaccucggcccccaauucugcaaauccugcugguucgaaaaccgcggccucgucgaaugcaacaaccacuaccucugccucaacugccucucccuccuccucuccgucuccucccgcugccccaucugcaaaaugccccuccccacccgccucaaagccgccgcccaacccuccgcccccuccaccgaagucacccaaaacaccacccccccccccuacacccccuaaggacuagucccuguucccagagcccacuuuuuuuucuuuuuuugaaauaaaauagccugucuuucagaucuaaaaaaaaaaaaaaaaaaaaaaaaaaaaaaaaaaaaaaaaaaaaaaaaaaaaaaaaaaaaaaaaugcaucccccccccccccccccccccccccccccccaaaggcucuuuucagagccaccagaauu

SEQ ID NO: 13192 - RNA, 595 nt, Artificial Sequence
  mRNA product Design a-2 comprising derived and/or modified sequence from LASV(LASV1000-NIG-2009;Clade II)__AIT17780__Z (opt11)
gggagaguccgcucagccagguugcagaagcggcuuagcguguguccuaaucuucucucugcguguagguaggccugugccgcaaacaagcuuaccaugggcaaccgccaaaccaaauccaccaaagucgacgaacaccaacgcgcauaccucguccccgacgccucccuccucggcccccaauucugcaaauccugcugguucgaaaacaaaggccucgucgaaugcaacaaccacuaccucugccucaacugccucucccuccuccucuccgucuccucccgcugccccaucugcaaaaugccccuccccacccgccucaaagccgccgcccaacccuccgccccccccacagaagccauccaaaacaccacccccccccccuacacccccuaaggacuagucccuguucccagagcccacuuuuuuuucuuuuuuugaaauaaaauagccugucuuucagaucuaaaaaaaaaaaaaaaaaaaaaaaaaaaaaaaaaaaaaaaaaaaaaaaaaaaaaaaaaaaaaaaaugcaucccccccccccccccccccccccccccccccaaaggcucuuuucagagccaccagaauu

SEQ ID NO: 13193 - RNA, 595 nt, Artificial Sequence
  mRNA product Design a-2 comprising derived and/or modified sequence from LASV(LASV221-NIG-2010;Clade II)__AIT17622__Z (opt11)
gggagaguccgcucagccagguugcagaagcggcuuagcguguguccuaaucuucucucugcguguagguaggccugugccgcaaacaagcuuaccaugggcaaccgccaagccaaauccaccaaagucgacgaacaccaacgcgcccaccucguccccgacgccucccaccucggcccccaauucugcaaauccugcugguucgaaaaccgcggccucgucgaaugcaacaaccacuaccucugccucaacugccuaucccuccuccucuccgucuccucccgcugccccaucugcaaaaugccccuccccaccaaacucaaagccgccacccaacccuccgcccccuccaccgaagucacccaaaacaccauccccccccccuacucccccuaaggacuagucccuguucccagagcccacuuuuuuuucuuuuuuugaaauaaaauagccugucuuucagaucuaaaaaaaaaaaaaaaaaaaaaaaaaaaaaaaaaaaaaaaaaaaaaaaaaaaaaaaaaaaaaaaaugcaucccccccccccccccccccccccccccccccaaaggcucuuuucagagccaccagaauu

SEQ ID NO: 13194 - RNA, 595 nt, Artificial Sequence
  mRNA product Design a-2 comprising derived and/or modified sequence from LASV(LASV237-NIG-2010;Clade II)__AIT17636__Z (opt11)
gggagaguccgcucagccagguugcagaagcggcuuagcguguguccuaaucuucucucugcguguagguaggccugugccgcaaacaagcuuaccaugggcaaccgccaagccaaauccaccaaagucgacgaacaccaacgcgcccaccuaguccccgacgccucacaccucggcccccaauucugcaaauccugcugguucgaaaaccgcggccucgucgaaugcaacaaccacuaccucugccucaacugccucucccuccuccucuccgucuccucccgcugccccaucugcaaaaugccccuccccaccaaacucaaagccgcagcccaacccuccgcccccucaaucgaaaccauccaaaacaccacacccccccccuacacccccuaaggacuagucccuguucccagagcccacuuuuuuuucuuuuuuugaaauaaaauagccugucuuucagaucuaaaaaaaaaaaaaaaaaaaaaaaaaaaaaaaaaaaaaaaaaaaaaaaaaaaaaaaaaaaaaaaaugcaucccccccccccccccccccccccccccccccaaaggcucuuuucagagccaccagaauu

SEQ ID NO: 13195 - RNA, 595 nt, Artificial Sequence
  mRNA product Design a-2 comprising derived and/or modified sequence from LASV(LASV253-NIG-2011;Clade II)__AIT17668__Z (opt11)
gggagaguccgcucagccagguugcagaagcggcuuagcguguguccuaaucuucucucugcguguagguaggccugugccgcaaacaagcuuaccaugggcaaccgccaagccaaauccacaaaagucgacgaacaccaacgcgcccaccucguccccgacgccucccaccucggcccccaauucugcaaauccugcugguucgaaaacaaaggccucgucgaaugcaacaaccacuaccucugccucaacugccucucccuccuccucuccgucuccucccgcugccccaucugcaaaaugccccuccccaccaaacucaaaaccaccgcccaacccuccgccccccccaccgaagccgccaaaaacaccgcccccccccccuacgcccccuaaggacuagucccuguucccagagcccacuuuuuuuucuuuuuuugaaauaaaauagccugucuuucagaucuaaaaaaaaaaaaaaaaaaaaaaaaaaaaaaaaaaaaaaaaaaaaaaaaaaaaaaaaaaaaaaaaugcaucccccccccccccccccccccccccccccccaaaggcucuuuucagagccaccagaauu

SEQ ID NO: 13196 - RNA, 595 nt, Artificial Sequence
  mRNA product Design a-2 comprising derived and/or modified sequence from LASV(G1180-SLE-2010;Clade IV)__AIT17166__Z (opt11)
gggagaguccgcucagccagguugcagaagcggcuuagcguguguccuaaucuucucucugcguguagguaggccugugccgcaaacaagcuuaccaugggcaacaaacaagccaaagcccccgaagccaaagacuccccccgcgccucccucauccccgacgccacccaccucggcccccaauucugcaaauccugcugguucgaaaccaaaggccucgucgaaugcaacaaccacuaccucugccucaacugccucacccuccuccucuccgucuccaaccgcugccccaucugcaaaaugccccuccccaccaaacuccgccccuccgccacccccaccgccccccccaccgaagccgccgacuccaucggccccccccccuacucccccuaaggacuagucccuguucccagagcccacuuuuuuuucuuuuuuugaaauaaaauagccugucuuucagaucuaaaaaaaaaaaaaaaaaaaaaaaaaaaaaaaaaaaaaaaaaaaaaaaaaaaaaaaaaaaaaaaaugcaucccccccccccccccccccccccccccccccaaaggcucuuuucagagccaccagaauu

SEQ ID NO: 13197 - RNA, 595 nt, Artificial Sequence
  mRNA product Design a-2 comprising derived and/or modified sequence from LASV(G1442-SLE-2011;Clade IV)__AIT17178__Z (opt11)
gggagaguccgcucagccagguugcagaagcggcuuagcguguguccuaaucuucucucugcguguagguaggccugugccgcaaacaagcuuaccaugggcaacaaacaagccaaagccuccgaagccaaagacuccccccgcgccucccucauccccgacgccacccaccucggcccccaauucugcaaauccugcugguucgaaaacaaaggccucgucgaaugcaacaaccacuaccucugccucaacugccucucccuccuccucuccgucuccucccgcugccccaucugcaaaaugccccuccccacccgccuccgccccuccaccgcccccaccgcaccccccgcccgcgccggcgacaacaucaaacccccccccuacucccccuaaggacuagucccuguucccagagcccacuuuuuuuucuuuuuuugaaauaaaauagccugucuuucagaucuaaaaaaaaaaaaaaaaaaaaaaaaaaaaaaaaaaaaaaaaaaaaaaaaaaaaaaaaaaaaaaaaugcaucccccccccccccccccccccccccccccccaaaggcucuuuucagagccaccagaauu

SEQ ID NO: 13198 - RNA, 595 nt, Artificial Sequence
  mRNA product Design a-2 comprising derived and/or modified sequence from LASV(G502-SLE-2009;Clade IV)__AIT17124__Z (opt11)
gggagaguccgcucagccagguugcagaagcggcuuagcguguguccuaaucuucucucugcguguagguaggccugugccgcaaacaagcuuaccaugggcaacaaacaagucaaaacccccgaagccaaagacuccccccgcgccucccucauccccgacgccacccaccucggcccccaauucugcaaauccugcugguucgaaaacaaaggccucgucgaaugcaacaaccacuaccucugccucaacugccucacccuccuccucuccgucggcaaccgcugccccaucugcaaaaugccccuccccaccaaacuccgccccuccgucacccccaccgccccccccacccgcgccgccgacuccaucggccccccccccuacucccccuaaggacuagucccuguucccagagcccacuuuuuuuucuuuuuuugaaauaaaauagccugucuuucagaucuaaaaaaaaaaaaaaaaaaaaaaaaaaaaaaaaaaaaaaaaaaaaaaaaaaaaaaaaaaaaaaaaugcaucccccccccccccccccccccccccccccccaaaggcucuuuucagagccaccagaauu

SEQ ID NO: 13199 - RNA, 595 nt, Artificial Sequence
  mRNA product Design a-2 comprising derived and/or modified sequence from LASV(G733-SLE-2010;Clade IV)__AIT17152__Z (opt11)
gggagaguccgcucagccagguugcagaagcggcuuagcguguguccuaaucuucucucugcguguagguaggccugugccgcaaacaagcuuaccaugggcaacaaacaagccaaaacccccgaaaccaaagacuccccccgcgccucacucauccccgacgccacccaccucggcccccaauucugcaaauccugcugguucgaaaacaaaggccucgucgaaugcaacaaccacuaccucugccucaacugccucacccuccuccucuccgucuccaaccgcugccccaucugcaaaaugccccuccccaccaaacuccgccccuccaccgcccccaccgccccccccgccggcgccgccgacaacacccgccccccccccuacucccccuaaggacuagucccuguucccagagcccacuuuuuuuucuuuuuuugaaauaaaauagccugucuuucagaucuaaaaaaaaaaaaaaaaaaaaaaaaaaaaaaaaaaaaaaaaaaaaaaaaaaaaaaaaaaaaaaaaugcaucccccccccccccccccccccccccccccccaaaggcucuuuucagagccaccagaauu

SEQ ID NO: 13200 - RNA, 607 nt, Artificial Sequence
  mRNA product Design a-2 comprising derived and/or modified sequence from MOPV/LASV reassortant(IGS-1;Clade IV)__AFY05533__Z (opt11)
gggagaguccgcucagccagguugcagaagcggcuuagcguguguccuaaucuucucucugcguguagguaggccugugccgcaaacaagcuuaccaugggcaaaacccaauccaaaggccaacccuccaccaaccuacucaaagaaaccgaaccccgccaccccgucauccccgacgcccgcggcaccggccccgaauucugcaaauccugcugguucgaacgccgcggccucguccgcugcaacgaccacuaccucugccucaacugccucacccuccuccacaccgucuccgaccgcugccccaucugcaaacacaaacuccccuuccgccucgaacuccaaacccaacccaccgccccccccgaaaucccccccucccaaaaccccccccccuacucccccuaaggacuagucccuguucccagagcccacuuuuuuuucuuuuuuugaaauaaaauagccugucuuucagaucuaaaaaaaaaaaaaaaaaaaaaaaaaaaaaaaaaaaaaaaaaaaaaaaaaaaaaaaaaaaaaaaaugcaucccccccccccccccccccccccccccccccaaaggcucuuuucagagccaccagaauu

SEQ ID NO: 13201 - RNA, 595 nt, Artificial Sequence
  mRNA product Design a-2 comprising derived and/or modified sequence from LASV(LM776-SLE-2012;Clade IV)__AIT17824__Z (opt11)
gggagaguccgcucagccagguugcagaagcggcuuagcguguguccuaaucuucucucugcguguagguaggccugugccgcaaacaagcuuaccaugggcaacaaacaagccaaagccuccgaagaaaaaaacuccccccgcgccucccucauccccgacgccacccaccucggcccccaauucugcaaauccugcugguucgaaaacaaaggccuagucgaaugcaacaaccacuaccucugccucaacugccucacccuccuccucucagucuccaaccgcugccccaucugcaaaaugccccuccccaccaaacuccgccccuccaccacccccaccgccccccccaccggcgccgccgacuccauccgccccccccccuacucccccuaaggacuagucccuguucccagagcccacuuuuuuuucuuuuuuugaaauaaaauagccugucuuucagaucuaaaaaaaaaaaaaaaaaaaaaaaaaaaaaaaaaaaaaaaaaaaaaaaaaaaaaaaaaaaaaaaaugcaucccccccccccccccccccccccccccccccaaaggcucuuuucagagccaccagaauu

SEQ ID NO: 13202 - RNA, 595 nt, Artificial Sequence
  mRNA product Design a-2 comprising derived and/or modified sequence from LASV(Mad39;Clade IV)__ANH09743__Z (opt11)
gggagaguccgcucagccagguugcagaagcggcuuagcguguguccuaaucuucucucugcguguagguaggccugugccgcaaacaagcuuaccaugggcaacaaacaagccaaagccuccgaagucgaagacggcccccgcgccucccucauccccgacgccacccaccucggcccccaauucugcaaauccugcugguucgaaaacaaaucccucgucgaaugcaacaaccacuaccucugccuaaacugccucacccuccuccucuccgucuccaaccgcugccccaucugcaaaaugccccuccccacccgccucaaacccuccgucguccccaccgccccccccacccgcgccggcgacggcacccgccccccccccuacucccccuaaggacuagucccuguucccagagcccacuuuuuuuucuuuuuuugaaauaaaauagccugucuuucagaucuaaaaaaaaaaaaaaaaaaaaaaaaaaaaaaaaaaaaaaaaaaaaaaaaaaaaaaaaaaaaaaaaugcaucccccccccccccccccccccccccccccccaaaggcucuuuucagagccaccagaauu

SEQ ID NO: 13203 - RNA, 595 nt, Artificial Sequence
  mRNA product Design a-2 comprising derived and/or modified sequence from LASV(Z0947-SLE-2011;Clade IV)__AIT17838__Z (opt11)
gggagaguccgcucagccagguugcagaagcggcuuagcguguguccuaaucuucucucugcguguagguaggccugugccgcaaacaagcuuaccaugggcaacaaacaagccaaaguccccgaauccaaagacuccccccgcgccucccucauccccgacgccacccaccucggcccccaauucugcaaauccugcugguucgaaaacaaaggccucgucgaaugcaacaaccacuaccucugccucaacugccucacccuccuccucuccgucuccaaccgcugccccaucugcaaaaugccccuccccaccaaacucaaacccuccgccgcccccaccgccccccccaccggcgccgccgacuccauccgccccccccccuacuccccauaaggacuagucccuguucccagagcccacuuuuuuuucuuuuuuugaaauaaaauagccugucuuucagaucuaaaaaaaaaaaaaaaaaaaaaaaaaaaaaaaaaaaaaaaaaaaaaaaaaaaaaaaaaaaaaaaaugcaucccccccccccccccccccccccccccccccaaaggcucuuuucagagccaccagaauu

SEQ ID NO: 13204 - RNA, 640 nt, Artificial Sequence
  mRNA product Design b-4 comprising derived and/or modified sequence from LASV(Josiah;Clade IV)__ADY11072/NP_694871__Z (wt)
gggagagucccgcagucggcguccagcggcucugcuuguucgugugugugucguugcaggccuuauucaagcuuaccaugggaaacaagcaagccaaagccccagaaucaaaagacaguccgagagccagccugaucccagaugccacacaucuagggccacaguucuguaagagcugcugguucgaaaacaagggccugguugagugcaacaaccacuaucugugucucaacugccucaccuuacuucuaagugucagcaacaggugucccauuugcaagaugccucuccccacaaaacugagaccaucagccgcuccaacagcaccuccaaccggagcagcggacagcaucagacccccacccuacagucccugaggacuaguaauaaggaaacuguaugaaugucugugggcaggaagugaagagauccuucuguaaagguuuuuggaauuaugucugcugaauaauaaacuuuuuugaaauaauaaaucugguagaaaaaugagaucuaaaaaaaaaaaaaaaaaaaaaaaaaaaaaaaaaaaaaaaaaaaaaaaaaaaaaaaaaaaaaaaaugcaucccccccccccccccccccccccccccccccaaaggcucuuuucagagccaccagaauu

SEQ ID NO: 13205 - RNA, 643 nt, Artificial Sequence
  mRNA product Design b-4 comprising derived and/or modified sequence from LASV(Pinneo-NIG-1969;Clade I)__AIT17834__Z (wt)
gggagagucccgcagucggcguccagcggcucugcuuguucgugugugugucguugcaggccuuauucaagcuuaccaugggcaacaagcagaccagguccccacccaaaccagagcaccccagaccaacccugcuacccgacgcaucccaccugggcccccaauucugcaagagcugcugguuugagaacaagggacugguggaguguaauaaccauuaccucugucuaaacugucucacacugcuucucagcgugagcgacagauguccuauuuguaagaugccccuccccaccaagcuggcaguccgaacccaaccaagugcacccccacucaaccagggcaacacucaauccuccccgccccccuacagccccuaaggacuaguaauaaggaaacuguaugaaugucugugggcaggaagugaagagauccuucuguaaagguuuuuggaauuaugucugcugaauaauaaacuuuuuugaaauaauaaaucugguagaaaaaugagaucuaaaaaaaaaaaaaaaaaaaaaaaaaaaaaaaaaaaaaaaaaaaaaaaaaaaaaaaaaaaaaaaaugcaucccccccccccccccccccccccccccccccaaaggcucuuuucagagccaccagaauu

SEQ ID NO: 13206 - RNA, 640 nt, Artificial Sequence
  mRNA product Design b-4 comprising derived and/or modified sequence from LASV(Nig08-04;Clade II)__ADU56612__Z (wt)
gggagagucccgcagucggcguccagcggcucugcuuguucgugugugugucguugcaggccuuauucaagcuuaccaugggcaacaggcaaaccaggccaacugaagccacugaacagagcagggcucacuugguaccagacgcaucccaccugggaccccaauucugcaagagcuguugguuugaaaacagaggucuaguggagugcaacaaccacuaccugugucucaacugucucaguuugcuccucagugucagcagcagauguccaaucugcaagaugccccuucccaccaggcugaaggcaucagcacagcccagcgcacccccaaccgaagcaccccagaacacaacacccccaccauacaccccauaaggacuaguaauaaggaaacuguaugaaugucugugggcaggaagugaagagauccuucuguaaagguuuuuggaauuaugucugcugaauaauaaacuuuuuugaaauaauaaaucugguagaaaaaugagaucuaaaaaaaaaaaaaaaaaaaaaaaaaaaaaaaaaaaaaaaaaaaaaaaaaaaaaaaaaaaaaaaaugcaucccccccccccccccccccccccccccccccaaaggcucuuuucagagccaccagaauu

SEQ ID NO: 13207 - RNA, 640 nt, Artificial Sequence
  mRNA product Design b-4 comprising derived and/or modified sequence from LASV(Nig08-A19;Clade III)__ADU56620__Z (wt)
gggagagucccgcagucggcguccagcggcucugcuuguucgugugugugucguugcaggccuuauucaagcuuaccauggguggcaaacacaccaaaccacagagagaauccaacagucccagagccucucuaauucccgaugcaacacaccugggcccucaauuuugcaagaguuguugguuugagaacaaaggucugguggagugcaacaaccauuacuuaugccucaacugccuuacuuuacuccugucugucagcaacagaugccccaucuguaagaugccccuccccacgaggcugagagcaucaaccaacccaacagcaccccaggucgaacaagucggcccuacaaauccuccaccauacagucccuaaggacuaguaauaaggaaacuguaugaaugucugugggcaggaagugaagagauccuucuguaaagguuuuuggaauuaugucugcugaauaauaaacuuuuuugaaauaauaaaucugguagaaaaaugagaucuaaaaaaaaaaaaaaaaaaaaaaaaaaaaaaaaaaaaaaaaaaaaaaaaaaaaaaaaaaaaaaaaugcaucccccccccccccccccccccccccccccccaaaggcucuuuucagagccaccagaauu

SEQ ID NO: 13208 - RNA, 640 nt, Artificial Sequence
  mRNA product Design b-4 comprising derived and/or modified sequence from LASV(AV;Clade V)__CCA30312__Z (wt)
gggagagucccgcagucggcguccagcggcucugcuuguucgugugugugucguugcaggccuuauucaagcuuaccauggggaacagacaagccaaaaauccagagguggagaacagcccaagggcuagucuaauuccggaugccacgcaccuugggccacaguucugcaagagcugcugguucgaaaacaaagguuuaguugaguguaauaaccacuaucuuugccucaacugccucuccuugcuuuuaagcgucagcaacaggugcccuaucugcaagaugccccuucccacgaggcugagaccgacaaccacaccaacagcgccacagaucaucaaggaaaacaccaccaaccccccgccauacacacccuaaggacuaguaauaaggaaacuguaugaaugucugugggcaggaagugaagagauccuucuguaaagguuuuuggaauuaugucugcugaauaauaaacuuuuuugaaauaauaaaucugguagaaaaaugagaucuaaaaaaaaaaaaaaaaaaaaaaaaaaaaaaaaaaaaaaaaaaaaaaaaaaaaaaaaaaaaaaaaugcaucccccccccccccccccccccccccccccccaaaggcucuuuucagagccaccagaauu

SEQ ID NO: 13209 - RNA, 640 nt, Artificial Sequence
  mRNA product Design b-4 comprising derived and/or modified sequence from LASV(Togo/2016/7082;Clade VI)__AMR44579__Z (wt)
gggagagucccgcagucggcguccagcggcucugcuuguucgugugugugucguugcaggccuuauucaagcuuaccaugggagccagacagaccaagcaaccucagauugagggaucuccuagagccucucuggugcccgaugcaagccaucuaggaccccaguucugcaagagcugcugguuugagaacaaagggcuuguggaguguaacaaucauuaccuuugccucaauugccucagccuccuacucagugucagcaacaggugcccuaucugcaagaugccccuccccaccaagcugagagugucaagcgcucccagugcacccccagcggccacggcccaacccggaacuccuccaccauacagccccuagggacuaguaauaaggaaacuguaugaaugucugugggcaggaagugaagagauccuucuguaaagguuuuuggaauuaugucugcugaauaauaaacuuuuuugaaauaauaaaucugguagaaaaaugagaucuaaaaaaaaaaaaaaaaaaaaaaaaaaaaaaaaaaaaaaaaaaaaaaaaaaaaaaaaaaaaaaaaugcaucccccccccccccccccccccccccccccccaaaggcucuuuucagagccaccagaauu

SEQ ID NO: 13210 - RNA, 640 nt, Artificial Sequence
  mRNA product Design b-4 comprising derived and/or modified sequence from LASV(KAK-428;Clade n.d. (VII))__ANH09761__Z (wt)
gggagagucccgcagucggcguccagcggcucugcuuguucgugugugugucguugcaggccuuauucaagcuuaccaugggcaacaaagggaccaaacccacccagaacucagaacccagcagggccaaccuagugccugaugcaagcuacuuaggaccccaguucugcaagaguugcugguuugaaaacaaagggcugguggaguguaacaaucauuaucucugccucaacugucucacaaugcuucucucugucagcaacaggugcccaaucugcaaaaugccgcuucccaccaaaauaaaggccucaggaagccccagcgcuccuccgaccgaggccaacuccgcagucagccccccuccauacacccccuaaggacuaguaauaaggaaacuguaugaaugucugugggcaggaagugaagagauccuucuguaaagguuuuuggaauuaugucugcugaauaauaaacuuuuuugaaauaauaaaucugguagaaaaaugagaucuaaaaaaaaaaaaaaaaaaaaaaaaaaaaaaaaaaaaaaaaaaaaaaaaaaaaaaaaaaaaaaaaugcaucccccccccccccccccccccccccccccccaaaggcucuuuucagagccaccagaauu

SEQ ID NO: 13211 - RNA, 640 nt, Artificial Sequence
  mRNA product Design b-4 comprising derived and/or modified sequence from LASV(ISTH0009-NIG-2011;Clade II)__AIT17402__Z (wt)
gggagagucccgcagucggcguccagcggcucugcuuguucgugugugugucguugcaggccuuauucaagcuuaccaugggcaacagacaggcuaaaucgacaaaagucgaugaacaucaaagagcucaucuagugccagaugcaucccaucuaggcccccaguucugcaagaguugcugguuugagaacagaggguugguagaguguaacaaucacuaccugugucucaacugucucagccugcuucucagcgucagcaguagaugcccgaucugcaagaugccccuucccaccaagcuaaaggcagcagcacagccgagcgcaccaucaaccgagacgauccagaacacaacaccuccaccguacaccccauaaggacuaguaauaaggaaacuguaugaaugucugugggcaggaagugaagagauccuucuguaaagguuuuuggaauuaugucugcugaauaauaaacuuuuuugaaauaauaaaucugguagaaaaaugagaucuaaaaaaaaaaaaaaaaaaaaaaaaaaaaaaaaaaaaaaaaaaaaaaaaaaaaaaaaaaaaaaaaugcaucccccccccccccccccccccccccccccccaaaggcucuuuucagagccaccagaauu

SEQ ID NO: 13212 - RNA, 640 nt, Artificial Sequence
  mRNA product Design b-4 comprising derived and/or modified sequence from LASV(ISTH2010-NIG-2012;Clade II)__AIT17480__Z (wt)
gggagagucccgcagucggcguccagcggcucugcuuguucgugugugugucguugcaggccuuauucaagcuuaccauggguaacagacaugccaaaucgacaaaagucgaugaacaucaaagagcucaucuagugccagaugcaucccaucuaggcccccaguucugcaagaguugcugguuugagaauagaggguugguagagugcaacaaucacuaccugugucucaacugucucagccugcuccucagugucagcagcagaugcccgaucugcaagaugccccuucccaccaagcuaaaggcagcagcacagccgagcgcaccauccaccgaggugauccagagcacaacaccuccaccauacaccccauaaggacuaguaauaaggaaacuguaugaaugucugugggcaggaagugaagagauccuucuguaaagguuuuuggaauuaugucugcugaauaauaaacuuuuuugaaauaauaaaucugguagaaaaaugagaucuaaaaaaaaaaaaaaaaaaaaaaaaaaaaaaaaaaaaaaaaaaaaaaaaaaaaaaaaaaaaaaaaugcaucccccccccccccccccccccccccccccccaaaggcucuuuucagagccaccagaauu

SEQ ID NO: 13213 - RNA, 640 nt, Artificial Sequence
  mRNA product Design b-4 comprising derived and/or modified sequence from LASV(Lassa virus/H.sapiens-wt/NGA/2016/ISTH_0017;Clade II)__AVO03713__Z (wt)
gggagagucccgcagucggcguccagcggcucugcuuguucgugugugugucguugcaggccuuauucaagcuuaccaugggcaauagacaggccaagucgacaaaagucgaugaacaucaaagagcucaucuagugccagaugcaucccaucuaggcccccaguucugcaaaaguugcugguuugagaacaggggguuaguagagugcaacaaucacuaccugugucucaacugucucagccuacuccucagcgucaguagcagaugcccgaucugcaagaugccccuucccaccaagcuaaaggcggcaacacagccgagcgcaccaucaaccgaggugaaccagaauacaacaccuccaccguacacuccaugaggacuaguaauaaggaaacuguaugaaugucugugggcaggaagugaagagauccuucuguaaagguuuuuggaauuaugucugcugaauaauaaacuuuuuugaaauaauaaaucugguagaaaaaugagaucuaaaaaaaaaaaaaaaaaaaaaaaaaaaaaaaaaaaaaaaaaaaaaaaaaaaaaaaaaaaaaaaaugcaucccccccccccccccccccccccccccccccaaaggcucuuuucagagccaccagaauu

SEQ ID NO: 13214 - RNA, 640 nt, Artificial Sequence
  mRNA product Design b-4 comprising derived and/or modified sequence from LASV(Lassa virus/H.sapiens-wt/NGA/2018/ISTH_0959;Clade II)__AVV65084__Z (wt)
gggagagucccgcagucggcguccagcggcucugcuuguucgugugugugucguugcaggccuuauucaagcuuaccaugggcaacaaacaggccaaaucgacaaaagucgacgaacaucaaagggcucaucuaguaccggaugcaucccaucuaggcccccaguucugcaagaguugcugguuugagaacagaggguugguagagugcaacaaucacuaccugugucucaacugucucagccugcuucucagugucagcagcagaugcccgaucugcaagaugccccuucccaccaagcuaaaggcagcagcacagccgagcgcaccaucaacagaggcgauccagagcacaacaccuccaccguacacuccauaaggacuaguaauaaggaaacuguaugaaugucugugggcaggaagugaagagauccuucuguaaagguuuuuggaauuaugucugcugaauaauaaacuuuuuugaaauaauaaaucugguagaaaaaugagaucuaaaaaaaaaaaaaaaaaaaaaaaaaaaaaaaaaaaaaaaaaaaaaaaaaaaaaaaaaaaaaaaaugcaucccccccccccccccccccccccccccccccaaaggcucuuuucagagccaccagaauu

SEQ ID NO: 13215 - RNA, 640 nt, Artificial Sequence
  mRNA product Design b-4 comprising derived and/or modified sequence from LASV(LASV003-NIG-2008;Clade II)__AIT17578__Z (wt)
gggagagucccgcagucggcguccagcggcucugcuuguucgugugugugucguugcaggccuuauucaagcuuaccaugggcaacagacaggcuaaaucaacaaaagucgaugaacaucaaagagcucaucuagugccagaugcaucccaucuaggcccccaguuuugcaaaaguugcugguuugagaacaagggguugguggagugcaacaaccacuaccugugucucaacugucucagccugcuccucagcgucagcaguagaugcccgaucugcaagaugccccuucccaccaagcugagggcagcagcacagccgagcgcacccucaacugagucggcucagaacacagcaccuccaccguaugccccaugaggacuaguaauaaggaaacuguaugaaugucugugggcaggaagugaagagauccuucuguaaagguuuuuggaauuaugucugcugaauaauaaacuuuuuugaaauaauaaaucugguagaaaaaugagaucuaaaaaaaaaaaaaaaaaaaaaaaaaaaaaaaaaaaaaaaaaaaaaaaaaaaaaaaaaaaaaaaaugcaucccccccccccccccccccccccccccccccaaaggcucuuuucagagccaccagaauu

SEQ ID NO: 13216 - RNA, 640 nt, Artificial Sequence
  mRNA product Design b-4 comprising derived and/or modified sequence from LASV(LASV035-NIG-2009;Clade II)__AIT17586__Z (wt)
gggagagucccgcagucggcguccagcggcucugcuuguucgugugugugucguugcaggccuuauucaagcuuaccaugggcaacaaacaggccaaaucgacaaaagucgaugaacaucaaagagcucaucuagugccagaugcaucucaucuaggcccccaguucuguaagagcugcugguuugagaacagagggcugguagagugcaacaaccacuaccugugucucaacugucucagccugcuucucagcgucagcagcagguguccgaucugcaaaaugccccuucccaccaggcugaaggcagcagcacagccgagcgcacccucaaccgaggugacccagaacacaacaccuccaccguacaccccgugaggacuaguaauaaggaaacuguaugaaugucugugggcaggaagugaagagauccuucuguaaagguuuuuggaauuaugucugcugaauaauaaacuuuuuugaaauaauaaaucugguagaaaaaugagaucuaaaaaaaaaaaaaaaaaaaaaaaaaaaaaaaaaaaaaaaaaaaaaaaaaaaaaaaaaaaaaaaaugcaucccccccccccccccccccccccccccccccaaaggcucuuuucagagccaccagaauu

SEQ ID NO: 13217 - RNA, 640 nt, Artificial Sequence
  mRNA product Design b-4 comprising derived and/or modified sequence from LASV(LASV1000-NIG-2009;Clade II)__AIT17780__Z (wt)
gggagagucccgcagucggcguccagcggcucugcuuguucgugugugugucguugcaggccuuauucaagcuuaccaugggcaacagacagaccaaaucgacaaaagucgaugaacaucaaagagcuuaucuagugccagaugcaucccuucuaggcccccaguucugcaagaguugcugguuugagaacaaaggguugguagaaugcaacaaucacuaccugugucuuaacugucucagccugcuccucagcgucagcagcagaugcccgaucugcaagaugccucuucccaccaggcuaaaggcagcagcacagccgagugcaccaccaacugaggcgauccagaacacaacaccuccaccguacaccccauaaggacuaguaauaaggaaacuguaugaaugucugugggcaggaagugaagagauccuucuguaaagguuuuuggaauuaugucugcugaauaauaaacuuuuuugaaauaauaaaucugguagaaaaaugagaucuaaaaaaaaaaaaaaaaaaaaaaaaaaaaaaaaaaaaaaaaaaaaaaaaaaaaaaaaaaaaaaaaugcaucccccccccccccccccccccccccccccccaaaggcucuuuucagagccaccagaauu

SEQ ID NO: 13218 - RNA, 640 nt, Artificial Sequence
  mRNA product Design b-4 comprising derived and/or modified sequence from LASV(LASV221-NIG-2010;Clade II)__AIT17622__Z (wt)
gggagagucccgcagucggcguccagcggcucugcuuguucgugugugugucguugcaggccuuauucaagcuuaccaugggcaacagacaggccaaaucgacaaaagucgaugaacaucaaagagcucaucuagugccagaugcaucccaucucggcccucaauucugcaagaguugcugguuugagaacagagggcugguagagugcaacaaucacuaccugugucucaacugucucagccugcuccucagcgucagcagcagaugcccgaucugcaagaugccccuucccaccaagcuaaaagcagcaacacagccgagcgcaccaucaaccgaagugacccagaacacaauaccuccaccauacuccccaugaggacuaguaauaaggaaacuguaugaaugucugugggcaggaagugaagagauccuucuguaaagguuuuuggaauuaugucugcugaauaauaaacuuuuuugaaauaauaaaucugguagaaaaaugagaucuaaaaaaaaaaaaaaaaaaaaaaaaaaaaaaaaaaaaaaaaaaaaaaaaaaaaaaaaaaaaaaaaugcaucccccccccccccccccccccccccccccccaaaggcucuuuucagagccaccagaauu

SEQ ID NO: 13219 - RNA, 640 nt, Artificial Sequence
  mRNA product Design b-4 comprising derived and/or modified sequence from LASV(LASV237-NIG-2010;Clade II)__AIT17636__Z (wt)
gggagagucccgcagucggcguccagcggcucugcuuguucgugugugugucguugcaggccuuauucaagcuuaccaugggcaacagacaggcuaaaucgacaaaagucgaugaacaucaaagagcucaucuagugccagaugcaucccaucuaggcccccaguucugcaagaguuguugguuugagaacagaggguugguagaguguaacaaucacuaccugugucucaacugucucagccugcuucucagcgucagcaguagaugcccgaucugcaagaugccccuucccaccaagcuaaaggcagcagcacagccgagcgcaccaucaaucgagacgauccagaacacaacaccuccuccguacaccccauaaggacuaguaauaaggaaacuguaugaaugucugugggcaggaagugaagagauccuucuguaaagguuuuuggaauuaugucugcugaauaauaaacuuuuuugaaauaauaaaucugguagaaaaaugagaucuaaaaaaaaaaaaaaaaaaaaaaaaaaaaaaaaaaaaaaaaaaaaaaaaaaaaaaaaaaaaaaaaugcaucccccccccccccccccccccccccccccccaaaggcucuuuucagagccaccagaauu

SEQ ID NO: 13220 - RNA, 640 nt, Artificial Sequence
  mRNA product Design b-4 comprising derived and/or modified sequence from LASV(LASV253-NIG-2011;Clade II)__AIT17668__Z (wt)
gggagagucccgcagucggcguccagcggcucugcuuguucgugugugugucguugcaggccuuauucaagcuuaccauggguaacagacaggccaaaucaacaaaagucgaugaacaucaaagagcucaucuagugccagaugcaucccaucuaggcccccaguuuugcaaaaguugcugguuugagaacaagggguugguugagugcaacaaccacuaccugugucucaacugucucagccugcuccuuagcguuagcagcagaugcccgauuugcaagaugccccuccccaccaagcuaaagacaacagcacagccaagugcacccccgacugaggcggccaagaacacagcaccuccaccguaugccccaugaggacuaguaauaaggaaacuguaugaaugucugugggcaggaagugaagagauccuucuguaaagguuuuuggaauuaugucugcugaauaauaaacuuuuuugaaauaauaaaucugguagaaaaaugagaucuaaaaaaaaaaaaaaaaaaaaaaaaaaaaaaaaaaaaaaaaaaaaaaaaaaaaaaaaaaaaaaaaugcaucccccccccccccccccccccccccccccccaaaggcucuuuucagagccaccagaauu

SEQ ID NO: 13221 - RNA, 640 nt, Artificial Sequence
  mRNA product Design b-4 comprising derived and/or modified sequence from LASV(G1180-SLE-2010;Clade IV)__AIT17166__Z (wt)
gggagagucccgcagucggcguccagcggcucugcuuguucgugugugugucguugcaggccuuauucaagcuuaccaugggaaacaagcaagccaaagccccggaagcaaaagacaguccgagagccagccugaucccagaugccacacaccuagggccacaguuuugcaagagcugcugguucgaaaccaagggccugguugagugcaacaaccacuaucuaugucucaauugccucacuuuacuucuaagugucagcaauaggugccccauuugcaagaugccccuucccacaaaacugagaccgucagccacuccaacggcacccccaaccgaagcugcggacagcaucggacccccacccuacagucccugaggacuaguaauaaggaaacuguaugaaugucugugggcaggaagugaagagauccuucuguaaagguuuuuggaauuaugucugcugaauaauaaacuuuuuugaaauaauaaaucugguagaaaaaugagaucuaaaaaaaaaaaaaaaaaaaaaaaaaaaaaaaaaaaaaaaaaaaaaaaaaaaaaaaaaaaaaaaaugcaucccccccccccccccccccccccccccccccaaaggcucuuuucagagccaccagaauu

SEQ ID NO: 13222 - RNA, 640 nt, Artificial Sequence
  mRNA product Design b-4 comprising derived and/or modified sequence from LASV(G1442-SLE-2011;Clade IV)__AIT17178__Z (wt)
gggagagucccgcagucggcguccagcggcucugcuuguucgugugugugucguugcaggccuuauucaagcuuaccauggggaacaagcaagccaaagcuucagaagcaaaagacagcccgagggcuagucugauuccagaugccacacaccuaggaccacaguucuguaagagcuguugguuugagaacaagggccugguugaaugcaacaaucacuaucugugucucaacugccucagucugcuucugagugucagcagcaggugccccaucugcaaaaugccccucccgacaagacugaggccaucaacagccccaacagcacccccagccagagcaggggauaacaucaaacccccacccuacagucccugaggacuaguaauaaggaaacuguaugaaugucugugggcaggaagugaagagauccuucuguaaagguuuuuggaauuaugucugcugaauaauaaacuuuuuugaaauaauaaaucugguagaaaaaugagaucuaaaaaaaaaaaaaaaaaaaaaaaaaaaaaaaaaaaaaaaaaaaaaaaaaaaaaaaaaaaaaaaaugcaucccccccccccccccccccccccccccccccaaaggcucuuuucagagccaccagaauu

SEQ ID NO: 13223 - RNA, 640 nt, Artificial Sequence
  mRNA product Design b-4 comprising derived and/or modified sequence from LASV(G502-SLE-2009;Clade IV)__AIT17124__Z (wt)
gggagagucccgcagucggcguccagcggcucugcuuguucgugugugugucguugcaggccuuauucaagcuuaccaugggaaacaagcaagucaaaaccccggaagcaaaagacaguccgagagccagccugaucccagaugccacacaccuagggccacaguucugcaagagcugcugguucgaaaacaagggccugguugagugcaacaaccacuaucugugucucaacugccucacuuuacuucuaaguguuggcaacaggugccccauuugcaagaugccccuucccacaaaacugagaccaucagucacuccaacagcacccccaaccagagcagcggacagcaucggacccccacccuacagucccugaggacuaguaauaaggaaacuguaugaaugucugugggcaggaagugaagagauccuucuguaaagguuuuuggaauuaugucugcugaauaauaaacuuuuuugaaauaauaaaucugguagaaaaaugagaucuaaaaaaaaaaaaaaaaaaaaaaaaaaaaaaaaaaaaaaaaaaaaaaaaaaaaaaaaaaaaaaaaugcaucccccccccccccccccccccccccccccccaaaggcucuuuucagagccaccagaauu

SEQ ID NO: 13224 - RNA, 640 nt, Artificial Sequence
  mRNA product Design b-4 comprising derived and/or modified sequence from LASV(G733-SLE-2010;Clade IV)__AIT17152__Z (wt)
gggagagucccgcagucggcguccagcggcucugcuuguucgugugugugucguugcaggccuuauucaagcuuaccaugggaaacaagcaagccaagaccccagaaacaaaagacaguccgagagccagccugaucccagaugccacacaccuagggccacaguuuugcaagagcugcugguucgaaaacaagggccugguugagugcaauaaccacuaucugugccucaauugucuuacccuacuucuaagugucagcaacaggugucccauuugcaagaugccucuccccacaaaacugagaccaucaaccgccccaacagcacccccagccggagcagcggacaacaccagacccccacccuauagccccugaggacuaguaauaaggaaacuguaugaaugucugugggcaggaagugaagagauccuucuguaaagguuuuuggaauuaugucugcugaauaauaaacuuuuuugaaauaauaaaucugguagaaaaaugagaucuaaaaaaaaaaaaaaaaaaaaaaaaaaaaaaaaaaaaaaaaaaaaaaaaaaaaaaaaaaaaaaaaugcaucccccccccccccccccccccccccccccccaaaggcucuuuucagagccaccagaauu

SEQ ID NO: 13225 - RNA, 652 nt, Artificial Sequence
  mRNA product Design b-4 comprising derived and/or modified sequence from MOPV/LASV reassortant(IGS-1;Clade IV)__AFY05533__Z (wt)
gggagagucccgcagucggcguccagcggcucugcuuguucgugugugugucguugcaggccuuauucaagcuuaccauggggaaaacgcaguccaagggacagcccagcacaaaucuccucaaggagacagaaccaaggcauccaguaauaccagaugccaggggaacuggcccugaauucugcaagagcugcugguucgaaaggaggggguuagucaggugcaacgaucacuaccuauguuugaacugucuuacacuuuuacacacagugucagauaggugccccaucugcaaacacaaacuacccuucagacuagagcuccagacccagccgacagcaccaccagaaaucccaccaucccaaaaucccccacccuacagccccugaggacuaguaauaaggaaacuguaugaaugucugugggcaggaagugaagagauccuucuguaaagguuuuuggaauuaugucugcugaauaauaaacuuuuuugaaauaauaaaucugguagaaaaaugagaucuaaaaaaaaaaaaaaaaaaaaaaaaaaaaaaaaaaaaaaaaaaaaaaaaaaaaaaaaaaaaaaaaugcaucccccccccccccccccccccccccccccccaaaggcucuuuucagagccaccagaauu

SEQ ID NO: 13226 - RNA, 640 nt, Artificial Sequence
  mRNA product Design b-4 comprising derived and/or modified sequence from LASV(LM776-SLE-2012;Clade IV)__AIT17824__Z (wt)
gggagagucccgcagucggcguccagcggcucugcuuguucgugugugugucguugcaggccuuauucaagcuuaccaugggaaacaagcaagccaaagccucagaagaaaaaaacaguccgagagccagccugauuccagaugccacacaccuagggccacaauuuugcaagagcugcugguucgaaaacaagggccugguugagugcaacaaccacuaucugugucucaacugccucaccuuacuuuuaagugucagcaacaggugccccaucugcaagaugccucuucccacaaaacugagaccaucaaccacuccaacagcaccuccaaccggagcagcagacagcaucagacccccaccuuacagucccugaggacuaguaauaaggaaacuguaugaaugucugugggcaggaagugaagagauccuucuguaaagguuuuuggaauuaugucugcugaauaauaaacuuuuuugaaauaauaaaucugguagaaaaaugagaucuaaaaaaaaaaaaaaaaaaaaaaaaaaaaaaaaaaaaaaaaaaaaaaaaaaaaaaaaaaaaaaaaugcaucccccccccccccccccccccccccccccccaaaggcucuuuucagagccaccagaauu

SEQ ID NO: 13227 - RNA, 640 nt, Artificial Sequence
  mRNA product Design b-4 comprising derived and/or modified sequence from LASV(Mad39;Clade IV)__ANH09743__Z (wt)
gggagagucccgcagucggcguccagcggcucugcuuguucgugugugugucguugcaggccuuauucaagcuuaccaugggaaacaagcaggccaaagccucagaaguggaggaugguccaagggccagucugaucccagaugccacacaccuggggccacaguucugcaagagcugcugguucgaaaauaagagcuugguugagugcaacaaccauuaucugugccucaacugccucacucugcuucugagcgucagcaacaggugccccaucugcaaaaugccucucccaacaagacugaaaccaucagucgucccaacagcaccccccaccagagcaggagacggcaccaggcccccacccuacagucccuaaggacuaguaauaaggaaacuguaugaaugucugugggcaggaagugaagagauccuucuguaaagguuuuuggaauuaugucugcugaauaauaaacuuuuuugaaauaauaaaucugguagaaaaaugagaucuaaaaaaaaaaaaaaaaaaaaaaaaaaaaaaaaaaaaaaaaaaaaaaaaaaaaaaaaaaaaaaaaugcaucccccccccccccccccccccccccccccccaaaggcucuuuucagagccaccagaauu

SEQ ID NO: 13228 - RNA, 640 nt, Artificial Sequence
  mRNA product Design b-4 comprising derived and/or modified sequence from LASV(Z0947-SLE-2011;Clade IV)__AIT17838__Z (wt)
gggagagucccgcagucggcguccagcggcucugcuuguucgugugugugucguugcaggccuuauucaagcuuaccaugggaaacaaacaagccaaggucccagaaucaaaagacagcccgagagccagccuaaucccagaugccacacaucuagggccgcaauucuguaagaguugcugguucgaaaacaagggccugguugaguguaacaaccacuaucugugucucaacugccucaccuuacuuuugagugucagcaacaggugccccauuugcaagaugccucuccccacaaaacugaaaccaucagccgcuccaacagcacccccaacuggagcagcggacagcaucagacccccaccuuacagucccugaggacuaguaauaaggaaacuguaugaaugucugugggcaggaagugaagagauccuucuguaaagguuuuuggaauuaugucugcugaauaauaaacuuuuuugaaauaauaaaucugguagaaaaaugagaucuaaaaaaaaaaaaaaaaaaaaaaaaaaaaaaaaaaaaaaaaaaaaaaaaaaaaaaaaaaaaaaaaugcaucccccccccccccccccccccccccccccccaaaggcucuuuucagagccaccagaauu

SEQ ID NO: 13229 - RNA, 640 nt, Artificial Sequence
  mRNA product Design b-4 comprising derived and/or modified sequence from LASV(Josiah;Clade IV)__ADY11072/NP_694871__Z (opt1)
gggagagucccgcagucggcguccagcggcucugcuuguucgugugugugucguugcaggccuuauucaagcuuaccaugggcaacaagcaggccaaggcccccgagagcaaggacuccccgcgcgcgagccugauccccgacgccacccaccucgggccccaguucugcaaguccugcugguucgagaacaagggccugguggagugcaacaaccacuaccugugccucaacugccugacccugcuccugagcgucuccaaccggugccccaucugcaagaugccgcugcccacgaagcuccgccccagcgccgcccccaccgccccgcccaccggggcggccgacuccauccggcccccgcccuacagccccugaggacuaguaauaaggaaacuguaugaaugucugugggcaggaagugaagagauccuucuguaaagguuuuuggaauuaugucugcugaauaauaaacuuuuuugaaauaauaaaucugguagaaaaaugagaucuaaaaaaaaaaaaaaaaaaaaaaaaaaaaaaaaaaaaaaaaaaaaaaaaaaaaaaaaaaaaaaaaugcaucccccccccccccccccccccccccccccccaaaggcucuuuucagagccaccagaauu

SEQ ID NO: 13230 - RNA, 643 nt, Artificial Sequence
  mRNA product Design b-4 comprising derived and/or modified sequence from LASV(Pinneo-NIG-1969;Clade I)__AIT17834__Z (opt1)
gggagagucccgcagucggcguccagcggcucugcuuguucgugugugugucguugcaggccuuauucaagcuuaccaugggcaacaagcagacccgcagcccgcccaagcccgagcacccccggcccacccugcuccccgacgccucccaccuggggccccaguucugcaagagcugcugguucgagaacaagggccugguggagugcaacaaccacuaccucugccugaacugccugacgcuccugcuguccgucagcgaccgcugccccaucugcaagaugccccuccccaccaagcuggccgugcggacccagcccuccgcgccgccccugaaccaggggaacacccagagcagcccgccgcccuacucccccugaggacuaguaauaaggaaacuguaugaaugucugugggcaggaagugaagagauccuucuguaaagguuuuuggaauuaugucugcugaauaauaaacuuuuuugaaauaauaaaucugguagaaaaaugagaucuaaaaaaaaaaaaaaaaaaaaaaaaaaaaaaaaaaaaaaaaaaaaaaaaaaaaaaaaaaaaaaaaugcaucccccccccccccccccccccccccccccccaaaggcucuuuucagagccaccagaauu

SEQ ID NO: 13231 - RNA, 640 nt, Artificial Sequence
  mRNA product Design b-4 comprising derived and/or modified sequence from LASV(Nig08-04;Clade II)__ADU56612__Z (opt1)
gggagagucccgcagucggcguccagcggcucugcuuguucgugugugugucguugcaggccuuauucaagcuuaccaugggcaaccgccagacccggcccaccgaggccacggagcagagccgcgcccaccuggugccggacgccucccaccucgggccccaguucugcaagagcugcugguucgagaaccggggccuggucgagugcaacaaccacuaccugugccucaacugccugucccugcuccugagcguguccagccgcugccccaucugcaagaugccccugccgacccggcucaaggccuccgcccagcccagcgccccgcccaccgaggcgccccagaacaccacgcccccgcccuacacccccugaggacuaguaauaaggaaacuguaugaaugucugugggcaggaagugaagagauccuucuguaaagguuuuuggaauuaugucugcugaauaauaaacuuuuuugaaauaauaaaucugguagaaaaaugagaucuaaaaaaaaaaaaaaaaaaaaaaaaaaaaaaaaaaaaaaaaaaaaaaaaaaaaaaaaaaaaaaaaugcaucccccccccccccccccccccccccccccccaaaggcucuuuucagagccaccagaauu

SEQ ID NO: 13232 - RNA, 640 nt, Artificial Sequence
  mRNA product Design b-4 comprising derived and/or modified sequence from LASV(Nig08-A19;Clade III)__ADU56620__Z (opt1)
gggagagucccgcagucggcguccagcggcucugcuuguucgugugugugucguugcaggccuuauucaagcuuaccaugggcgggaagcacaccaagccccagcgcgagagcaacuccccgcgggccagccugauccccgacgccacccaccucggcccccaguucugcaaguccugcugguucgagaacaaggggcugguggagugcaacaaccacuaccugugccucaacugccugacgcugcuccugagcguguccaaccgcugccccaucugcaagaugccccugcccacccggcuccgcgccagcaccaaccccaccgcgccccagguggagcaggucggcccgacgaacccgccgcccuacucccccugaggacuaguaauaaggaaacuguaugaaugucugugggcaggaagugaagagauccuucuguaaagguuuuuggaauuaugucugcugaauaauaaacuuuuuugaaauaauaaaucugguagaaaaaugagaucuaaaaaaaaaaaaaaaaaaaaaaaaaaaaaaaaaaaaaaaaaaaaaaaaaaaaaaaaaaaaaaaaugcaucccccccccccccccccccccccccccccccaaaggcucuuuucagagccaccagaauu

SEQ ID NO: 13233 - RNA, 640 nt, Artificial Sequence
  mRNA product Design b-4 comprising derived and/or modified sequence from LASV(AV;Clade V)__CCA30312__Z (opt1)
gggagagucccgcagucggcguccagcggcucugcuuguucgugugugugucguugcaggccuuauucaagcuuaccaugggcaaccgccaggccaagaaccccgagguggagaacagcccccgggccucccugauccccgacgcgacccaccucgggccccaguucugcaagagcugcugguucgagaacaagggccuggucgagugcaacaaccacuaccugugccucaacugccugucccugcuccugagcguguccaaccgcugccccaucugcaagaugccgcugcccacccggcuccgccccacgaccacccccaccgccccgcagaucaucaaggagaacacgaccaacccgccgcccuacacccccugaggacuaguaauaaggaaacuguaugaaugucugugggcaggaagugaagagauccuucuguaaagguuuuuggaauuaugucugcugaauaauaaacuuuuuugaaauaauaaaucugguagaaaaaugagaucuaaaaaaaaaaaaaaaaaaaaaaaaaaaaaaaaaaaaaaaaaaaaaaaaaaaaaaaaaaaaaaaaugcaucccccccccccccccccccccccccccccccaaaggcucuuuucagagccaccagaauu

SEQ ID NO: 13234 - RNA, 640 nt, Artificial Sequence
  mRNA product Design b-4 comprising derived and/or modified sequence from LASV(Togo/2016/7082;Clade VI)__AMR44579__Z (opt1)
gggagagucccgcagucggcguccagcggcucugcuuguucgugugugugucguugcaggccuuauucaagcuuaccaugggcgcccgccagaccaagcagccccagaucgaggggagcccccgggccucccuggugcccgacgcgagccaccucggcccccaguucugcaaguccugcugguucgagaacaaggggcuggucgagugcaacaaccacuaccugugccucaacugccugagccugcuccuguccgugagcaaccgcugccccaucugcaagaugccgcugcccaccaagcuccggguguccagcgcccccuccgcgcccccggccgccacggcccagcccggcaccccgccgcccuacagccccugaggacuaguaauaaggaaacuguaugaaugucugugggcaggaagugaagagauccuucuguaaagguuuuuggaauuaugucugcugaauaauaaacuuuuuugaaauaauaaaucugguagaaaaaugagaucuaaaaaaaaaaaaaaaaaaaaaaaaaaaaaaaaaaaaaaaaaaaaaaaaaaaaaaaaaaaaaaaaugcaucccccccccccccccccccccccccccccccaaaggcucuuuucagagccaccagaauu

SEQ ID NO: 13235 - RNA, 640 nt, Artificial Sequence
  mRNA product Design b-4 comprising derived and/or modified sequence from LASV(KAK-428;Clade n.d. (VII))__ANH09761__Z (opt1)
gggagagucccgcagucggcguccagcggcucugcuuguucgugugugugucguugcaggccuuauucaagcuuaccaugggcaacaaggggaccaagcccacccagaacagcgagcccucccgcgccaaccuggugcccgacgccagcuaccucggcccccaguucugcaaguccugcugguucgagaacaaggggcuggucgagugcaacaaccacuaccugugccucaacugccugacgaugcugcucagcguguccaaccggugccccaucugcaagaugccgcugcccaccaagaucaaggccagcggcucccccagcgcgcccccgaccgaggccaacuccgccgugagcccgccgcccuacacccccugaggacuaguaauaaggaaacuguaugaaugucugugggcaggaagugaagagauccuucuguaaagguuuuuggaauuaugucugcugaauaauaaacuuuuuugaaauaauaaaucugguagaaaaaugagaucuaaaaaaaaaaaaaaaaaaaaaaaaaaaaaaaaaaaaaaaaaaaaaaaaaaaaaaaaaaaaaaaaugcaucccccccccccccccccccccccccccccccaaaggcucuuuucagagccaccagaauu

SEQ ID NO: 13236 - RNA, 640 nt, Artificial Sequence
  mRNA product Design b-4 comprising derived and/or modified sequence from LASV(ISTH0009-NIG-2011;Clade II)__AIT17402__Z (opt1)
gggagagucccgcagucggcguccagcggcucugcuuguucgugugugugucguugcaggccuuauucaagcuuaccaugggcaaccgccaggccaagagcaccaagguggacgagcaccagcgggcccaccugguccccgacgcgucccaccucgggccccaguucugcaagagcugcugguucgagaaccgcggccugguggagugcaacaaccacuaccugugccucaacugccugucccugcuccugagcguguccagccggugccccaucugcaagaugccccugcccaccaagcucaaggccgccgcccagccguccgcccccagcacggagaccauccagaacaccaccccgccgcccuacacgcccugaggacuaguaauaaggaaacuguaugaaugucugugggcaggaagugaagagauccuucuguaaagguuuuuggaauuaugucugcugaauaauaaacuuuuuugaaauaauaaaucugguagaaaaaugagaucuaaaaaaaaaaaaaaaaaaaaaaaaaaaaaaaaaaaaaaaaaaaaaaaaaaaaaaaaaaaaaaaaugcaucccccccccccccccccccccccccccccccaaaggcucuuuucagagccaccagaauu

SEQ ID NO: 13237 - RNA, 640 nt, Artificial Sequence
  mRNA product Design b-4 comprising derived and/or modified sequence from LASV(ISTH2010-NIG-2012;Clade II)__AIT17480__Z (opt1)
gggagagucccgcagucggcguccagcggcucugcuuguucgugugugugucguugcaggccuuauucaagcuuaccaugggcaaccgccacgccaagagcaccaagguggacgagcaccagcgggcccaccugguccccgacgcgucccaccucgggccccaguucugcaagagcugcugguucgagaaccgcggccugguggagugcaacaaccacuaccugugccucaacugccugucccugcuccugagcguguccagccggugccccaucugcaagaugccccugcccaccaagcucaaggccgccgcccagccguccgcccccagcacggaggucauccaguccaccaccccgccgcccuacacccccugaggacuaguaauaaggaaacuguaugaaugucugugggcaggaagugaagagauccuucuguaaagguuuuuggaauuaugucugcugaauaauaaacuuuuuugaaauaauaaaucugguagaaaaaugagaucuaaaaaaaaaaaaaaaaaaaaaaaaaaaaaaaaaaaaaaaaaaaaaaaaaaaaaaaaaaaaaaaaugcaucccccccccccccccccccccccccccccccaaaggcucuuuucagagccaccagaauu

SEQ ID NO: 13238 - RNA, 640 nt, Artificial Sequence
  mRNA product Design b-4 comprising derived and/or modified sequence from LASV(Lassa virus/H.sapiens-wt/NGA/2016/ISTH_0017;Clade II)__AVO03713__Z (opt1)
gggagagucccgcagucggcguccagcggcucugcuuguucgugugugugucguugcaggccuuauucaagcuuaccaugggcaaccgccaggccaagagcaccaagguggacgagcaccagcgggcccaccugguccccgacgcgucccaccucgggccccaguucugcaagagcugcugguucgagaaccgcggccugguggagugcaacaaccacuaccugugccucaacugccugucccugcuccugagcguguccagccggugccccaucugcaagaugccccugcccaccaagcucaaggccgccacgcagccguccgcccccagcaccgaggucaaccagaacaccaccccgccgcccuacacgcccugaggacuaguaauaaggaaacuguaugaaugucugugggcaggaagugaagagauccuucuguaaagguuuuuggaauuaugucugcugaauaauaaacuuuuuugaaauaauaaaucugguagaaaaaugagaucuaaaaaaaaaaaaaaaaaaaaaaaaaaaaaaaaaaaaaaaaaaaaaaaaaaaaaaaaaaaaaaaaugcaucccccccccccccccccccccccccccccccaaaggcucuuuucagagccaccagaauu

SEQ ID NO: 13239 - RNA, 640 nt, Artificial Sequence
  mRNA product Design b-4 comprising derived and/or modified sequence from LASV(Lassa virus/H.sapiens-wt/NGA/2018/ISTH_0959;Clade II)__AVV65084__Z (opt1)
gggagagucccgcagucggcguccagcggcucugcuuguucgugugugugucguugcaggccuuauucaagcuuaccaugggcaacaagcaggccaagagcaccaagguggacgagcaccagcgcgcccaccugguccccgacgcgucccaccucgggccccaguucugcaagagcugcugguucgagaaccggggccugguggagugcaacaaccacuaccugugccucaacugccugucccugcuccugagcguguccagccgcugccccaucugcaagaugccccugcccaccaagcucaaggccgccgcccagccguccgcccccagcacggaggcgauccaguccaccaccccgccgcccuacacccccugaggacuaguaauaaggaaacuguaugaaugucugugggcaggaagugaagagauccuucuguaaagguuuuuggaauuaugucugcugaauaauaaacuuuuuugaaauaauaaaucugguagaaaaaugagaucuaaaaaaaaaaaaaaaaaaaaaaaaaaaaaaaaaaaaaaaaaaaaaaaaaaaaaaaaaaaaaaaaugcaucccccccccccccccccccccccccccccccaaaggcucuuuucagagccaccagaauu

SEQ ID NO: 13240 - RNA, 640 nt, Artificial Sequence
  mRNA product Design b-4 comprising derived and/or modified sequence from LASV(LASV003-NIG-2008;Clade II)__AIT17578__Z (opt1)
gggagagucccgcagucggcguccagcggcucugcuuguucgugugugugucguugcaggccuuauucaagcuuaccaugggcaaccgccaggccaagagcaccaagguggacgagcaccagcgggcccaccugguccccgacgcgucccaccucgggccccaguucugcaagagcugcugguucgagaacaagggccugguggagugcaacaaccacuaccugugccucaacugccugucccugcuccugagcguguccagccgcugccccaucugcaagaugccccugcccaccaagcuccgggccgccgcccagccguccgcccccagcacggaguccgcgcagaacaccgccccgccgcccuacgcccccugaggacuaguaauaaggaaacuguaugaaugucugugggcaggaagugaagagauccuucuguaaagguuuuuggaauuaugucugcugaauaauaaacuuuuuugaaauaauaaaucugguagaaaaaugagaucuaaaaaaaaaaaaaaaaaaaaaaaaaaaaaaaaaaaaaaaaaaaaaaaaaaaaaaaaaaaaaaaaugcaucccccccccccccccccccccccccccccccaaaggcucuuuucagagccaccagaauu

SEQ ID NO: 13241 - RNA, 640 nt, Artificial Sequence
  mRNA product Design b-4 comprising derived and/or modified sequence from LASV(LASV035-NIG-2009;Clade II)__AIT17586__Z (opt1)
gggagagucccgcagucggcguccagcggcucugcuuguucgugugugugucguugcaggccuuauucaagcuuaccaugggcaacaagcaggccaagagcaccaagguggacgagcaccagcgcgcccaccugguccccgacgcgucccaccucgggccccaguucugcaagagcugcugguucgagaaccggggccugguggagugcaacaaccacuaccugugccucaacugccugucccugcuccugagcguguccagccgcugccccaucugcaagaugccccugcccacccggcucaaggccgccgcccagccguccgcccccagcacggaggucacccagaacaccaccccgccgcccuacacgcccugaggacuaguaauaaggaaacuguaugaaugucugugggcaggaagugaagagauccuucuguaaagguuuuuggaauuaugucugcugaauaauaaacuuuuuugaaauaauaaaucugguagaaaaaugagaucuaaaaaaaaaaaaaaaaaaaaaaaaaaaaaaaaaaaaaaaaaaaaaaaaaaaaaaaaaaaaaaaaugcaucccccccccccccccccccccccccccccccaaaggcucuuuucagagccaccagaauu

SEQ ID NO: 13242 - RNA, 640 nt, Artificial Sequence
  mRNA product Design b-4 comprising derived and/or modified sequence from LASV(LASV1000-NIG-2009;Clade II)__AIT17780__Z (opt1)
gggagagucccgcagucggcguccagcggcucugcuuguucgugugugugucguugcaggccuuauucaagcuuaccaugggcaaccgccagaccaagagcaccaagguggacgagcaccagcgggccuaccugguccccgacgccucccuccuggggccccaguucugcaagagcugcugguucgagaacaagggccugguggagugcaacaaccacuaccucugccugaacugccugucccuccugcugagcguguccagccgcugccccaucugcaagaugccccuccccacgcggcugaaggcggccgcccagcccuccgccccgcccaccgaggccauccagaacaccacgccgccgcccuacacccccugaggacuaguaauaaggaaacuguaugaaugucugugggcaggaagugaagagauccuucuguaaagguuuuuggaauuaugucugcugaauaauaaacuuuuuugaaauaauaaaucugguagaaaaaugagaucuaaaaaaaaaaaaaaaaaaaaaaaaaaaaaaaaaaaaaaaaaaaaaaaaaaaaaaaaaaaaaaaaugcaucccccccccccccccccccccccccccccccaaaggcucuuuucagagccaccagaauu

SEQ ID NO: 13243 - RNA, 640 nt, Artificial Sequence
  mRNA product Design b-4 comprising derived and/or modified sequence from LASV(LASV221-NIG-2010;Clade II)__AIT17622__Z (opt1)
gggagagucccgcagucggcguccagcggcucugcuuguucgugugugugucguugcaggccuuauucaagcuuaccaugggcaaccgccaggccaagagcaccaagguggacgagcaccagcgggcccaccugguccccgacgcgucccaccucgggccccaguucugcaagagcugcugguucgagaaccgcggccugguggagugcaacaaccacuaccugugccucaacugccugucccugcuccugagcguguccagccggugccccaucugcaagaugccccugcccaccaagcucaaggccgccacgcagccguccgcccccagcaccgaggucacccagaacaccaucccgccgcccuacucccccugaggacuaguaauaaggaaacuguaugaaugucugugggcaggaagugaagagauccuucuguaaagguuuuuggaauuaugucugcugaauaauaaacuuuuuugaaauaauaaaucugguagaaaaaugagaucuaaaaaaaaaaaaaaaaaaaaaaaaaaaaaaaaaaaaaaaaaaaaaaaaaaaaaaaaaaaaaaaaugcaucccccccccccccccccccccccccccccccaaaggcucuuuucagagccaccagaauu

SEQ ID NO: 13244 - RNA, 640 nt, Artificial Sequence
  mRNA product Design b-4 comprising derived and/or modified sequence from LASV(LASV237-NIG-2010;Clade II)__AIT17636__Z (opt1)
gggagagucccgcagucggcguccagcggcucugcuuguucgugugugugucguugcaggccuuauucaagcuuaccaugggcaaccgccaggccaagagcaccaagguggacgagcaccagcgggcccaccugguccccgacgcgucccaccucgggccccaguucugcaagagcugcugguucgagaaccgcggccugguggagugcaacaaccacuaccugugccucaacugccugucccugcuccugagcguguccagccggugccccaucugcaagaugccccugcccaccaagcucaaggccgccgcccagccguccgcccccagcaucgagacgauccagaacaccaccccgccgcccuacacccccugaggacuaguaauaaggaaacuguaugaaugucugugggcaggaagugaagagauccuucuguaaagguuuuuggaauuaugucugcugaauaauaaacuuuuuugaaauaauaaaucugguagaaaaaugagaucuaaaaaaaaaaaaaaaaaaaaaaaaaaaaaaaaaaaaaaaaaaaaaaaaaaaaaaaaaaaaaaaaugcaucccccccccccccccccccccccccccccccaaaggcucuuuucagagccaccagaauu

SEQ ID NO: 13245 - RNA, 640 nt, Artificial Sequence
  mRNA product Design b-4 comprising derived and/or modified sequence from LASV(LASV253-NIG-2011;Clade II)__AIT17668__Z (opt1)
gggagagucccgcagucggcguccagcggcucugcuuguucgugugugugucguugcaggccuuauucaagcuuaccaugggcaaccgccaggccaagagcaccaagguggacgagcaccagcgggcccaccugguccccgacgcgucccaccucgggccccaguucugcaagagcugcugguucgagaacaagggccugguggagugcaacaaccacuaccugugccucaacugccugucccugcuccugagcguguccagccgcugccccaucugcaagaugccccugcccaccaagcucaagacgaccgcccagccguccgccccgcccaccgaggccgccaagaacaccgcgcccccgcccuacgcccccugaggacuaguaauaaggaaacuguaugaaugucugugggcaggaagugaagagauccuucuguaaagguuuuuggaauuaugucugcugaauaauaaacuuuuuugaaauaauaaaucugguagaaaaaugagaucuaaaaaaaaaaaaaaaaaaaaaaaaaaaaaaaaaaaaaaaaaaaaaaaaaaaaaaaaaaaaaaaaugcaucccccccccccccccccccccccccccccccaaaggcucuuuucagagccaccagaauu

SEQ ID NO: 13246 - RNA, 640 nt, Artificial Sequence
  mRNA product Design b-4 comprising derived and/or modified sequence from LASV(G1180-SLE-2010;Clade IV)__AIT17166__Z (opt1)
gggagagucccgcagucggcguccagcggcucugcuuguucgugugugugucguugcaggccuuauucaagcuuaccaugggcaacaagcaggccaaggcccccgaggcgaaggacagcccgcgcgccucccugauccccgacgccacccaccucgggccccaguucugcaagagcugcugguucgagaccaagggccugguggagugcaacaaccacuaccugugccucaacugccugacgcugcuccuguccgucagcaaccggugccccaucugcaagaugccgcugcccaccaagcuccgccccuccgccacccccaccgccccgcccacggaggcggccgacagcaucgggcccccgcccuacucccccugaggacuaguaauaaggaaacuguaugaaugucugugggcaggaagugaagagauccuucuguaaagguuuuuggaauuaugucugcugaauaauaaacuuuuuugaaauaauaaaucugguagaaaaaugagaucuaaaaaaaaaaaaaaaaaaaaaaaaaaaaaaaaaaaaaaaaaaaaaaaaaaaaaaaaaaaaaaaaugcaucccccccccccccccccccccccccccccccaaaggcucuuuucagagccaccagaauu

SEQ ID NO: 13247 - RNA, 640 nt, Artificial Sequence
  mRNA product Design b-4 comprising derived and/or modified sequence from LASV(G1442-SLE-2011;Clade IV)__AIT17178__Z (opt1)
gggagagucccgcagucggcguccagcggcucugcuuguucgugugugugucguugcaggccuuauucaagcuuaccaugggcaacaagcaggccaaggccagcgaggcgaaggacagcccccgcgccucccugaucccggacgccacccaccucgggccccaguucugcaaguccugcugguucgagaacaagggccugguggagugcaacaaccacuaccugugccucaacugccugagccugcuccuguccgucagcucccggugccccaucugcaagaugccccugccgacccgccuccggcccagcacggcccccaccgcgcccccggcccgcgccggggacaacaucaagcccccgcccuacucccccugaggacuaguaauaaggaaacuguaugaaugucugugggcaggaagugaagagauccuucuguaaagguuuuuggaauuaugucugcugaauaauaaacuuuuuugaaauaauaaaucugguagaaaaaugagaucuaaaaaaaaaaaaaaaaaaaaaaaaaaaaaaaaaaaaaaaaaaaaaaaaaaaaaaaaaaaaaaaaugcaucccccccccccccccccccccccccccccccaaaggcucuuuucagagccaccagaauu

SEQ ID NO: 13248 - RNA, 640 nt, Artificial Sequence
  mRNA product Design b-4 comprising derived and/or modified sequence from LASV(G502-SLE-2009;Clade IV)__AIT17124__Z (opt1)
gggagagucccgcagucggcguccagcggcucugcuuguucgugugugugucguugcaggccuuauucaagcuuaccaugggcaacaagcaggucaagacccccgaggccaaggacagcccccgcgccucccugauccccgacgcgacccaccucgggccccaguucugcaagagcugcugguucgagaacaagggccugguggagugcaacaaccacuaccugugccucaacugccugacgcugcuccuguccguggggaaccggugccccaucugcaagaugccgcugcccaccaagcuccgccccagcgugacccccaccgccccgcccacgcgggccgccgacuccaucggcccgccgcccuacagccccugaggacuaguaauaaggaaacuguaugaaugucugugggcaggaagugaagagauccuucuguaaagguuuuuggaauuaugucugcugaauaauaaacuuuuuugaaauaauaaaucugguagaaaaaugagaucuaaaaaaaaaaaaaaaaaaaaaaaaaaaaaaaaaaaaaaaaaaaaaaaaaaaaaaaaaaaaaaaaugcaucccccccccccccccccccccccccccccccaaaggcucuuuucagagccaccagaauu

SEQ ID NO: 13249 - RNA, 640 nt, Artificial Sequence
  mRNA product Design b-4 comprising derived and/or modified sequence from LASV(G733-SLE-2010;Clade IV)__AIT17152__Z (opt1)
gggagagucccgcagucggcguccagcggcucugcuuguucgugugugugucguugcaggccuuauucaagcuuaccaugggcaacaagcaggccaagacccccgagaccaaggacagcccgcgcgccucccugauccccgacgcgacgcaccucgggccccaguucugcaagagcugcugguucgagaacaagggccugguggagugcaacaaccacuaccugugccucaacugccugacccugcuccuguccgucagcaaccggugccccaucugcaagaugccgcugcccaccaagcuccgccccuccaccgcccccacggccccgcccgccggggccgcggacaacacccggcccccgcccuacagccccugaggacuaguaauaaggaaacuguaugaaugucugugggcaggaagugaagagauccuucuguaaagguuuuuggaauuaugucugcugaauaauaaacuuuuuugaaauaauaaaucugguagaaaaaugagaucuaaaaaaaaaaaaaaaaaaaaaaaaaaaaaaaaaaaaaaaaaaaaaaaaaaaaaaaaaaaaaaaaugcaucccccccccccccccccccccccccccccccaaaggcucuuuucagagccaccagaauu

SEQ ID NO: 13250 - RNA, 652 nt, Artificial Sequence
  mRNA product Design b-4 comprising derived and/or modified sequence from MOPV/LASV reassortant(IGS-1;Clade IV)__AFY05533__Z (opt1)
gggagagucccgcagucggcguccagcggcucugcuuguucgugugugugucguugcaggccuuauucaagcuuaccaugggcaagacccagagcaaggggcagcccuccaccaaccugcucaaggagacggagccccgccaccccgugauccccgacgcccggggcaccgggcccgaguucugcaagagcugcugguucgagcgccggggccugguccgcugcaacgaccacuaccugugccucaacugccugacccugcuccacaccguguccgaccggugccccaucugcaagcacaagcugcccuuccgccuggagcuccagacgcagcccaccgccccgcccgagaucccgcccagccagaacccgccgcccuacucccccugaggacuaguaauaaggaaacuguaugaaugucugugggcaggaagugaagagauccuucuguaaagguuuuuggaauuaugucugcugaauaauaaacuuuuuugaaauaauaaaucugguagaaaaaugagaucuaaaaaaaaaaaaaaaaaaaaaaaaaaaaaaaaaaaaaaaaaaaaaaaaaaaaaaaaaaaaaaaaugcaucccccccccccccccccccccccccccccccaaaggcucuuuucagagccaccagaauu

SEQ ID NO: 13251 - RNA, 640 nt, Artificial Sequence
  mRNA product Design b-4 comprising derived and/or modified sequence from LASV(LM776-SLE-2012;Clade IV)__AIT17824__Z (opt1)
gggagagucccgcagucggcguccagcggcucugcuuguucgugugugugucguugcaggccuuauucaagcuuaccaugggcaacaagcaggccaaggccagcgaggagaagaacagcccccgcgccucccugaucccggacgccacccaccucgggccccaguucugcaaguccugcugguucgagaacaagggccugguggagugcaacaaccacuaccugugccucaacugccugacccugcuccugagcgucuccaaccggugccccaucugcaagaugccccugccgacgaagcuccgccccagcaccacccccaccgcgcccccgacgggggccgccgacuccauccggcccccgcccuacagccccugaggacuaguaauaaggaaacuguaugaaugucugugggcaggaagugaagagauccuucuguaaagguuuuuggaauuaugucugcugaauaauaaacuuuuuugaaauaauaaaucugguagaaaaaugagaucuaaaaaaaaaaaaaaaaaaaaaaaaaaaaaaaaaaaaaaaaaaaaaaaaaaaaaaaaaaaaaaaaugcaucccccccccccccccccccccccccccccccaaaggcucuuuucagagccaccagaauu

SEQ ID NO: 13252 - RNA, 640 nt, Artificial Sequence
  mRNA product Design b-4 comprising derived and/or modified sequence from LASV(Mad39;Clade IV)__ANH09743__Z (opt1)
gggagagucccgcagucggcguccagcggcucugcuuguucgugugugugucguugcaggccuuauucaagcuuaccaugggcaacaagcaggccaaggccagcgagguggaggacgggccccgcgccucccugauccccgacgccacccaccucggcccccaguucugcaagagcugcugguucgagaacaagucccuggucgagugcaacaaccacuaccugugccucaacugccugacccugcuccugagcguguccaaccggugccccaucugcaagaugccccugccgacgcgccucaagcccagcgugguccccaccgcgcccccgacccgggccggggacggcacccgcccgccgcccuacucccccugaggacuaguaauaaggaaacuguaugaaugucugugggcaggaagugaagagauccuucuguaaagguuuuuggaauuaugucugcugaauaauaaacuuuuuugaaauaauaaaucugguagaaaaaugagaucuaaaaaaaaaaaaaaaaaaaaaaaaaaaaaaaaaaaaaaaaaaaaaaaaaaaaaaaaaaaaaaaaugcaucccccccccccccccccccccccccccccccaaaggcucuuuucagagccaccagaauu

SEQ ID NO: 13253 - RNA, 640 nt, Artificial Sequence
  mRNA product Design b-4 comprising derived and/or modified sequence from LASV(Z0947-SLE-2011;Clade IV)__AIT17838__Z (opt1)
gggagagucccgcagucggcguccagcggcucugcuuguucgugugugugucguugcaggccuuauucaagcuuaccaugggcaacaagcaggccaaggugcccgagagcaaggacuccccgcgcgccagccugauccccgacgcgacccaccucgggccccaguucugcaaguccugcugguucgagaacaagggccuggucgagugcaacaaccacuaccugugccucaacugccugacccugcuccugagcguguccaaccgcugccccaucugcaagaugccgcugcccacgaagcucaagcccagcgccgcccccaccgccccgcccaccggggccgcggacuccauccggcccccgcccuacagccccugaggacuaguaauaaggaaacuguaugaaugucugugggcaggaagugaagagauccuucuguaaagguuuuuggaauuaugucugcugaauaauaaacuuuuuugaaauaauaaaucugguagaaaaaugagaucuaaaaaaaaaaaaaaaaaaaaaaaaaaaaaaaaaaaaaaaaaaaaaaaaaaaaaaaaaaaaaaaaugcaucccccccccccccccccccccccccccccccaaaggcucuuuucagagccaccagaauu

SEQ ID NO: 13254 - RNA, 640 nt, Artificial Sequence
  mRNA product Design b-4 comprising derived and/or modified sequence from LASV(Josiah;Clade IV)__ADY11072/NP_694871__Z (opt2)
gggagagucccgcagucggcguccagcggcucugcuuguucgugugugugucguugcaggccuuauucaagcuuaccaugggcaacaagcaggccaaggcccccgaguccaaggacuccccccgcgccucccucauccccgacgccacccaccucggcccccaguucugcaaguccugcugguucgagaacaagggccucgucgagugcaacaaccacuaccucugccucaacugccucacccuccuccucuccgucuccaaccgcugccccaucugcaagaugccccuccccaccaagcuccgccccuccgccgcccccaccgccccccccaccggcgccgccgacuccauccgccccccccccuacucccccugaggacuaguaauaaggaaacuguaugaaugucugugggcaggaagugaagagauccuucuguaaagguuuuuggaauuaugucugcugaauaauaaacuuuuuugaaauaauaaaucugguagaaaaaugagaucuaaaaaaaaaaaaaaaaaaaaaaaaaaaaaaaaaaaaaaaaaaaaaaaaaaaaaaaaaaaaaaaaugcaucccccccccccccccccccccccccccccccaaaggcucuuuucagagccaccagaauu

SEQ ID NO: 13255 - RNA, 643 nt, Artificial Sequence
  mRNA product Design b-4 comprising derived and/or modified sequence from LASV(Pinneo-NIG-1969;Clade I)__AIT17834__Z (opt2)
gggagagucccgcagucggcguccagcggcucugcuuguucgugugugugucguugcaggccuuauucaagcuuaccaugggcaacaagcagacccgcuccccccccaagcccgagcacccccgccccacccuccuccccgacgccucccaccucggcccccaguucugcaaguccugcugguucgagaacaagggccucgucgagugcaacaaccacuaccucugccucaacugccucacccuccuccucuccgucuccgaccgcugccccaucugcaagaugccccuccccaccaagcucgccguccgcacccagcccuccgcccccccccucaaccagggcaacacccaguccucccccccccccuacucccccugaggacuaguaauaaggaaacuguaugaaugucugugggcaggaagugaagagauccuucuguaaagguuuuuggaauuaugucugcugaauaauaaacuuuuuugaaauaauaaaucugguagaaaaaugagaucuaaaaaaaaaaaaaaaaaaaaaaaaaaaaaaaaaaaaaaaaaaaaaaaaaaaaaaaaaaaaaaaaugcaucccccccccccccccccccccccccccccccaaaggcucuuuucagagccaccagaauu

SEQ ID NO: 13256 - RNA, 640 nt, Artificial Sequence
  mRNA product Design b-4 comprising derived and/or modified sequence from LASV(Nig08-04;Clade II)__ADU56612__Z (opt2)
gggagagucccgcagucggcguccagcggcucugcuuguucgugugugugucguugcaggccuuauucaagcuuaccaugggcaaccgccagacccgccccaccgaggccaccgagcagucccgcgcccaccucguccccgacgccucccaccucggcccccaguucugcaaguccugcugguucgagaaccgcggccucgucgagugcaacaaccacuaccucugccucaacugccucucccuccuccucuccgucuccucccgcugccccaucugcaagaugccccuccccacccgccucaaggccuccgcccagcccuccgccccccccaccgaggccccccagaacaccacccccccccccuacacccccugaggacuaguaauaaggaaacuguaugaaugucugugggcaggaagugaagagauccuucuguaaagguuuuuggaauuaugucugcugaauaauaaacuuuuuugaaauaauaaaucugguagaaaaaugagaucuaaaaaaaaaaaaaaaaaaaaaaaaaaaaaaaaaaaaaaaaaaaaaaaaaaaaaaaaaaaaaaaaugcaucccccccccccccccccccccccccccccccaaaggcucuuuucagagccaccagaauu

SEQ ID NO: 13257 - RNA, 640 nt, Artificial Sequence
  mRNA product Design b-4 comprising derived and/or modified sequence from LASV(Nig08-A19;Clade III)__ADU56620__Z (opt2)
gggagagucccgcagucggcguccagcggcucugcuuguucgugugugugucguugcaggccuuauucaagcuuaccaugggcggcaagcacaccaagccccagcgcgaguccaacuccccccgcgccucccucauccccgacgccacccaccucggcccccaguucugcaaguccugcugguucgagaacaagggccucgucgagugcaacaaccacuaccucugccucaacugccucacccuccuccucuccgucuccaaccgcugccccaucugcaagaugccccuccccacccgccuccgcgccuccaccaaccccaccgccccccaggucgagcaggucggccccaccaaccccccccccuacucccccugaggacuaguaauaaggaaacuguaugaaugucugugggcaggaagugaagagauccuucuguaaagguuuuuggaauuaugucugcugaauaauaaacuuuuuugaaauaauaaaucugguagaaaaaugagaucuaaaaaaaaaaaaaaaaaaaaaaaaaaaaaaaaaaaaaaaaaaaaaaaaaaaaaaaaaaaaaaaaugcaucccccccccccccccccccccccccccccccaaaggcucuuuucagagccaccagaauu

SEQ ID NO: 13258 - RNA, 640 nt, Artificial Sequence
  mRNA product Design b-4 comprising derived and/or modified sequence from LASV(AV;Clade V)__CCA30312__Z (opt2)
gggagagucccgcagucggcguccagcggcucugcuuguucgugugugugucguugcaggccuuauucaagcuuaccaugggcaaccgccaggccaagaaccccgaggucgagaacuccccccgcgccucccucauccccgacgccacccaccucggcccccaguucugcaaguccugcugguucgagaacaagggccucgucgagugcaacaaccacuaccucugccucaacugccucucccuccuccucuccgucuccaaccgcugccccaucugcaagaugccccuccccacccgccuccgccccaccaccacccccaccgccccccagaucaucaaggagaacaccaccaaccccccccccuacacccccugaggacuaguaauaaggaaacuguaugaaugucugugggcaggaagugaagagauccuucuguaaagguuuuuggaauuaugucugcugaauaauaaacuuuuuugaaauaauaaaucugguagaaaaaugagaucuaaaaaaaaaaaaaaaaaaaaaaaaaaaaaaaaaaaaaaaaaaaaaaaaaaaaaaaaaaaaaaaaugcaucccccccccccccccccccccccccccccccaaaggcucuuuucagagccaccagaauu

SEQ ID NO: 13259 - RNA, 640 nt, Artificial Sequence
  mRNA product Design b-4 comprising derived and/or modified sequence from LASV(Togo/2016/7082;Clade VI)__AMR44579__Z (opt2)
gggagagucccgcagucggcguccagcggcucugcuuguucgugugugugucguugcaggccuuauucaagcuuaccaugggcgcccgccagaccaagcagccccagaucgagggcuccccccgcgccucccucguccccgacgccucccaccucggcccccaguucugcaaguccugcugguucgagaacaagggccucgucgagugcaacaaccacuaccucugccucaacugccucucccuccuccucuccgucuccaaccgcugccccaucugcaagaugccccuccccaccaagcuccgcgucuccuccgcccccuccgccccccccgccgccaccgcccagcccggcacccccccccccuacucccccugaggacuaguaauaaggaaacuguaugaaugucugugggcaggaagugaagagauccuucuguaaagguuuuuggaauuaugucugcugaauaauaaacuuuuuugaaauaauaaaucugguagaaaaaugagaucuaaaaaaaaaaaaaaaaaaaaaaaaaaaaaaaaaaaaaaaaaaaaaaaaaaaaaaaaaaaaaaaaugcaucccccccccccccccccccccccccccccccaaaggcucuuuucagagccaccagaauu

SEQ ID NO: 13260 - RNA, 640 nt, Artificial Sequence
  mRNA product Design b-4 comprising derived and/or modified sequence from LASV(KAK-428;Clade n.d. (VII))__ANH09761__Z (opt2)
gggagagucccgcagucggcguccagcggcucugcuuguucgugugugugucguugcaggccuuauucaagcuuaccaugggcaacaagggcaccaagcccacccagaacuccgagcccucccgcgccaaccucguccccgacgccuccuaccucggcccccaguucugcaaguccugcugguucgagaacaagggccucgucgagugcaacaaccacuaccucugccucaacugccucaccaugcuccucuccgucuccaaccgcugccccaucugcaagaugccccuccccaccaagaucaaggccuccggcucccccuccgccccccccaccgaggccaacuccgccgucucccccccccccuacacccccugaggacuaguaauaaggaaacuguaugaaugucugugggcaggaagugaagagauccuucuguaaagguuuuuggaauuaugucugcugaauaauaaacuuuuuugaaauaauaaaucugguagaaaaaugagaucuaaaaaaaaaaaaaaaaaaaaaaaaaaaaaaaaaaaaaaaaaaaaaaaaaaaaaaaaaaaaaaaaugcaucccccccccccccccccccccccccccccccaaaggcucuuuucagagccaccagaauu

SEQ ID NO: 13261 - RNA, 640 nt, Artificial Sequence
  mRNA product Design b-4 comprising derived and/or modified sequence from LASV(ISTH0009-NIG-2011;Clade II)__AIT17402__Z (opt2)
gggagagucccgcagucggcguccagcggcucugcuuguucgugugugugucguugcaggccuuauucaagcuuaccaugggcaaccgccaggccaaguccaccaaggucgacgagcaccagcgcgcccaccucguccccgacgccucccaccucggcccccaguucugcaaguccugcugguucgagaaccgcggccucgucgagugcaacaaccacuaccucugccucaacugccucucccuccuccucuccgucuccucccgcugccccaucugcaagaugccccuccccaccaagcucaaggccgccgcccagcccuccgcccccuccaccgagaccauccagaacaccacccccccccccuacacccccugaggacuaguaauaaggaaacuguaugaaugucugugggcaggaagugaagagauccuucuguaaagguuuuuggaauuaugucugcugaauaauaaacuuuuuugaaauaauaaaucugguagaaaaaugagaucuaaaaaaaaaaaaaaaaaaaaaaaaaaaaaaaaaaaaaaaaaaaaaaaaaaaaaaaaaaaaaaaaugcaucccccccccccccccccccccccccccccccaaaggcucuuuucagagccaccagaauu

SEQ ID NO: 13262 - RNA, 640 nt, Artificial Sequence
  mRNA product Design b-4 comprising derived and/or modified sequence from LASV(ISTH2010-NIG-2012;Clade II)__AIT17480__Z (opt2)
gggagagucccgcagucggcguccagcggcucugcuuguucgugugugugucguugcaggccuuauucaagcuuaccaugggcaaccgccacgccaaguccaccaaggucgacgagcaccagcgcgcccaccucguccccgacgccucccaccucggcccccaguucugcaaguccugcugguucgagaaccgcggccucgucgagugcaacaaccacuaccucugccucaacugccucucccuccuccucuccgucuccucccgcugccccaucugcaagaugccccuccccaccaagcucaaggccgccgcccagcccuccgcccccuccaccgaggucauccaguccaccacccccccccccuacacccccugaggacuaguaauaaggaaacuguaugaaugucugugggcaggaagugaagagauccuucuguaaagguuuuuggaauuaugucugcugaauaauaaacuuuuuugaaauaauaaaucugguagaaaaaugagaucuaaaaaaaaaaaaaaaaaaaaaaaaaaaaaaaaaaaaaaaaaaaaaaaaaaaaaaaaaaaaaaaaugcaucccccccccccccccccccccccccccccccaaaggcucuuuucagagccaccagaauu

SEQ ID NO: 13263 - RNA, 640 nt, Artificial Sequence
  mRNA product Design b-4 comprising derived and/or modified sequence from LASV(Lassa virus/H.sapiens-wt/NGA/2016/ISTH_0017;Clade II)__AVO03713__Z (opt2)
gggagagucccgcagucggcguccagcggcucugcuuguucgugugugugucguugcaggccuuauucaagcuuaccaugggcaaccgccaggccaaguccaccaaggucgacgagcaccagcgcgcccaccucguccccgacgccucccaccucggcccccaguucugcaaguccugcugguucgagaaccgcggccucgucgagugcaacaaccacuaccucugccucaacugccucucccuccuccucuccgucuccucccgcugccccaucugcaagaugccccuccccaccaagcucaaggccgccacccagcccuccgcccccuccaccgaggucaaccagaacaccacccccccccccuacacccccugaggacuaguaauaaggaaacuguaugaaugucugugggcaggaagugaagagauccuucuguaaagguuuuuggaauuaugucugcugaauaauaaacuuuuuugaaauaauaaaucugguagaaaaaugagaucuaaaaaaaaaaaaaaaaaaaaaaaaaaaaaaaaaaaaaaaaaaaaaaaaaaaaaaaaaaaaaaaaugcaucccccccccccccccccccccccccccccccaaaggcucuuuucagagccaccagaauu

SEQ ID NO: 13264 - RNA, 640 nt, Artificial Sequence
  mRNA product Design b-4 comprising derived and/or modified sequence from LASV(Lassa virus/H.sapiens-wt/NGA/2018/ISTH_0959;Clade II)__AVV65084__Z (opt2)
gggagagucccgcagucggcguccagcggcucugcuuguucgugugugugucguugcaggccuuauucaagcuuaccaugggcaacaagcaggccaaguccaccaaggucgacgagcaccagcgcgcccaccucguccccgacgccucccaccucggcccccaguucugcaaguccugcugguucgagaaccgcggccucgucgagugcaacaaccacuaccucugccucaacugccucucccuccuccucuccgucuccucccgcugccccaucugcaagaugccccuccccaccaagcucaaggccgccgcccagcccuccgcccccuccaccgaggccauccaguccaccacccccccccccuacacccccugaggacuaguaauaaggaaacuguaugaaugucugugggcaggaagugaagagauccuucuguaaagguuuuuggaauuaugucugcugaauaauaaacuuuuuugaaauaauaaaucugguagaaaaaugagaucuaaaaaaaaaaaaaaaaaaaaaaaaaaaaaaaaaaaaaaaaaaaaaaaaaaaaaaaaaaaaaaaaugcaucccccccccccccccccccccccccccccccaaaggcucuuuucagagccaccagaauu

SEQ ID NO: 13265 - RNA, 640 nt, Artificial Sequence
  mRNA product Design b-4 comprising derived and/or modified sequence from LASV(LASV003-NIG-2008;Clade II)__AIT17578__Z (opt2)
gggagagucccgcagucggcguccagcggcucugcuuguucgugugugugucguugcaggccuuauucaagcuuaccaugggcaaccgccaggccaaguccaccaaggucgacgagcaccagcgcgcccaccucguccccgacgccucccaccucggcccccaguucugcaaguccugcugguucgagaacaagggccucgucgagugcaacaaccacuaccucugccucaacugccucucccuccuccucuccgucuccucccgcugccccaucugcaagaugccccuccccaccaagcuccgcgccgccgcccagcccuccgcccccuccaccgaguccgcccagaacaccgcccccccccccuacgcccccugaggacuaguaauaaggaaacuguaugaaugucugugggcaggaagugaagagauccuucuguaaagguuuuuggaauuaugucugcugaauaauaaacuuuuuugaaauaauaaaucugguagaaaaaugagaucuaaaaaaaaaaaaaaaaaaaaaaaaaaaaaaaaaaaaaaaaaaaaaaaaaaaaaaaaaaaaaaaaugcaucccccccccccccccccccccccccccccccaaaggcucuuuucagagccaccagaauu

SEQ ID NO: 13266 - RNA, 640 nt, Artificial Sequence
  mRNA product Design b-4 comprising derived and/or modified sequence from LASV(LASV035-NIG-2009;Clade II)__AIT17586__Z (opt2)
gggagagucccgcagucggcguccagcggcucugcuuguucgugugugugucguugcaggccuuauucaagcuuaccaugggcaacaagcaggccaaguccaccaaggucgacgagcaccagcgcgcccaccucguccccgacgccucccaccucggcccccaguucugcaaguccugcugguucgagaaccgcggccucgucgagugcaacaaccacuaccucugccucaacugccucucccuccuccucuccgucuccucccgcugccccaucugcaagaugccccuccccacccgccucaaggccgccgcccagcccuccgcccccuccaccgaggucacccagaacaccacccccccccccuacacccccugaggacuaguaauaaggaaacuguaugaaugucugugggcaggaagugaagagauccuucuguaaagguuuuuggaauuaugucugcugaauaauaaacuuuuuugaaauaauaaaucugguagaaaaaugagaucuaaaaaaaaaaaaaaaaaaaaaaaaaaaaaaaaaaaaaaaaaaaaaaaaaaaaaaaaaaaaaaaaugcaucccccccccccccccccccccccccccccccaaaggcucuuuucagagccaccagaauu

SEQ ID NO: 13267 - RNA, 640 nt, Artificial Sequence
  mRNA product Design b-4 comprising derived and/or modified sequence from LASV(LASV1000-NIG-2009;Clade II)__AIT17780__Z (opt2)
gggagagucccgcagucggcguccagcggcucugcuuguucgugugugugucguugcaggccuuauucaagcuuaccaugggcaaccgccagaccaaguccaccaaggucgacgagcaccagcgcgccuaccucguccccgacgccucccuccucggcccccaguucugcaaguccugcugguucgagaacaagggccucgucgagugcaacaaccacuaccucugccucaacugccucucccuccuccucuccgucuccucccgcugccccaucugcaagaugccccuccccacccgccucaaggccgccgcccagcccuccgccccccccaccgaggccauccagaacaccacccccccccccuacacccccugaggacuaguaauaaggaaacuguaugaaugucugugggcaggaagugaagagauccuucuguaaagguuuuuggaauuaugucugcugaauaauaaacuuuuuugaaauaauaaaucugguagaaaaaugagaucuaaaaaaaaaaaaaaaaaaaaaaaaaaaaaaaaaaaaaaaaaaaaaaaaaaaaaaaaaaaaaaaaugcaucccccccccccccccccccccccccccccccaaaggcucuuuucagagccaccagaauu

SEQ ID NO: 13268 - RNA, 640 nt, Artificial Sequence
  mRNA product Design b-4 comprising derived and/or modified sequence from LASV(LASV221-NIG-2010;Clade II)__AIT17622__Z (opt2)
gggagagucccgcagucggcguccagcggcucugcuuguucgugugugugucguugcaggccuuauucaagcuuaccaugggcaaccgccaggccaaguccaccaaggucgacgagcaccagcgcgcccaccucguccccgacgccucccaccucggcccccaguucugcaaguccugcugguucgagaaccgcggccucgucgagugcaacaaccacuaccucugccucaacugccucucccuccuccucuccgucuccucccgcugccccaucugcaagaugccccuccccaccaagcucaaggccgccacccagcccuccgcccccuccaccgaggucacccagaacaccauccccccccccuacucccccugaggacuaguaauaaggaaacuguaugaaugucugugggcaggaagugaagagauccuucuguaaagguuuuuggaauuaugucugcugaauaauaaacuuuuuugaaauaauaaaucugguagaaaaaugagaucuaaaaaaaaaaaaaaaaaaaaaaaaaaaaaaaaaaaaaaaaaaaaaaaaaaaaaaaaaaaaaaaaugcaucccccccccccccccccccccccccccccccaaaggcucuuuucagagccaccagaauu

SEQ ID NO: 13269 - RNA, 640 nt, Artificial Sequence
  mRNA product Design b-4 comprising derived and/or modified sequence from LASV(LASV237-NIG-2010;Clade II)__AIT17636__Z (opt2)
gggagagucccgcagucggcguccagcggcucugcuuguucgugugugugucguugcaggccuuauucaagcuuaccaugggcaaccgccaggccaaguccaccaaggucgacgagcaccagcgcgcccaccucguccccgacgccucccaccucggcccccaguucugcaaguccugcugguucgagaaccgcggccucgucgagugcaacaaccacuaccucugccucaacugccucucccuccuccucuccgucuccucccgcugccccaucugcaagaugccccuccccaccaagcucaaggccgccgcccagcccuccgcccccuccaucgagaccauccagaacaccacccccccccccuacacccccugaggacuaguaauaaggaaacuguaugaaugucugugggcaggaagugaagagauccuucuguaaagguuuuuggaauuaugucugcugaauaauaaacuuuuuugaaauaauaaaucugguagaaaaaugagaucuaaaaaaaaaaaaaaaaaaaaaaaaaaaaaaaaaaaaaaaaaaaaaaaaaaaaaaaaaaaaaaaaugcaucccccccccccccccccccccccccccccccaaaggcucuuuucagagccaccagaauu

SEQ ID NO: 13270 - RNA, 640 nt, Artificial Sequence
  mRNA product Design b-4 comprising derived and/or modified sequence from LASV(LASV253-NIG-2011;Clade II)__AIT17668__Z (opt2)
gggagagucccgcagucggcguccagcggcucugcuuguucgugugugugucguugcaggccuuauucaagcuuaccaugggcaaccgccaggccaaguccaccaaggucgacgagcaccagcgcgcccaccucguccccgacgccucccaccucggcccccaguucugcaaguccugcugguucgagaacaagggccucgucgagugcaacaaccacuaccucugccucaacugccucucccuccuccucuccgucuccucccgcugccccaucugcaagaugccccuccccaccaagcucaagaccaccgcccagcccuccgccccccccaccgaggccgccaagaacaccgcccccccccccuacgcccccugaggacuaguaauaaggaaacuguaugaaugucugugggcaggaagugaagagauccuucuguaaagguuuuuggaauuaugucugcugaauaauaaacuuuuuugaaauaauaaaucugguagaaaaaugagaucuaaaaaaaaaaaaaaaaaaaaaaaaaaaaaaaaaaaaaaaaaaaaaaaaaaaaaaaaaaaaaaaaugcaucccccccccccccccccccccccccccccccaaaggcucuuuucagagccaccagaauu

SEQ ID NO: 13271 - RNA, 640 nt, Artificial Sequence
  mRNA product Design b-4 comprising derived and/or modified sequence from LASV(G1180-SLE-2010;Clade IV)__AIT17166__Z (opt2)
gggagagucccgcagucggcguccagcggcucugcuuguucgugugugugucguugcaggccuuauucaagcuuaccaugggcaacaagcaggccaaggcccccgaggccaaggacuccccccgcgccucccucauccccgacgccacccaccucggcccccaguucugcaaguccugcugguucgagaccaagggccucgucgagugcaacaaccacuaccucugccucaacugccucacccuccuccucuccgucuccaaccgcugccccaucugcaagaugccccuccccaccaagcuccgccccuccgccacccccaccgccccccccaccgaggccgccgacuccaucggccccccccccuacucccccugaggacuaguaauaaggaaacuguaugaaugucugugggcaggaagugaagagauccuucuguaaagguuuuuggaauuaugucugcugaauaauaaacuuuuuugaaauaauaaaucugguagaaaaaugagaucuaaaaaaaaaaaaaaaaaaaaaaaaaaaaaaaaaaaaaaaaaaaaaaaaaaaaaaaaaaaaaaaaugcaucccccccccccccccccccccccccccccccaaaggcucuuuucagagccaccagaauu

SEQ ID NO: 13272 - RNA, 640 nt, Artificial Sequence
  mRNA product Design b-4 comprising derived and/or modified sequence from LASV(G1442-SLE-2011;Clade IV)__AIT17178__Z (opt2)
gggagagucccgcagucggcguccagcggcucugcuuguucgugugugugucguugcaggccuuauucaagcuuaccaugggcaacaagcaggccaaggccuccgaggccaaggacuccccccgcgccucccucauccccgacgccacccaccucggcccccaguucugcaaguccugcugguucgagaacaagggccucgucgagugcaacaaccacuaccucugccucaacugccucucccuccuccucuccgucuccucccgcugccccaucugcaagaugccccuccccacccgccuccgccccuccaccgcccccaccgccccccccgcccgcgccggcgacaacaucaagcccccccccuacucccccugaggacuaguaauaaggaaacuguaugaaugucugugggcaggaagugaagagauccuucuguaaagguuuuuggaauuaugucugcugaauaauaaacuuuuuugaaauaauaaaucugguagaaaaaugagaucuaaaaaaaaaaaaaaaaaaaaaaaaaaaaaaaaaaaaaaaaaaaaaaaaaaaaaaaaaaaaaaaaugcaucccccccccccccccccccccccccccccccaaaggcucuuuucagagccaccagaauu

SEQ ID NO: 13273 - RNA, 640 nt, Artificial Sequence
  mRNA product Design b-4 comprising derived and/or modified sequence from LASV(G502-SLE-2009;Clade IV)__AIT17124__Z (opt2)
gggagagucccgcagucggcguccagcggcucugcuuguucgugugugugucguugcaggccuuauucaagcuuaccaugggcaacaagcaggucaagacccccgaggccaaggacuccccccgcgccucccucauccccgacgccacccaccucggcccccaguucugcaaguccugcugguucgagaacaagggccucgucgagugcaacaaccacuaccucugccucaacugccucacccuccuccucuccgucggcaaccgcugccccaucugcaagaugccccuccccaccaagcuccgccccuccgucacccccaccgccccccccacccgcgccgccgacuccaucggccccccccccuacucccccugaggacuaguaauaaggaaacuguaugaaugucugugggcaggaagugaagagauccuucuguaaagguuuuuggaauuaugucugcugaauaauaaacuuuuuugaaauaauaaaucugguagaaaaaugagaucuaaaaaaaaaaaaaaaaaaaaaaaaaaaaaaaaaaaaaaaaaaaaaaaaaaaaaaaaaaaaaaaaugcaucccccccccccccccccccccccccccccccaaaggcucuuuucagagccaccagaauu

SEQ ID NO: 13274 - RNA, 640 nt, Artificial Sequence
  mRNA product Design b-4 comprising derived and/or modified sequence from LASV(G733-SLE-2010;Clade IV)__AIT17152__Z (opt2)
gggagagucccgcagucggcguccagcggcucugcuuguucgugugugugucguugcaggccuuauucaagcuuaccaugggcaacaagcaggccaagacccccgagaccaaggacuccccccgcgccucccucauccccgacgccacccaccucggcccccaguucugcaaguccugcugguucgagaacaagggccucgucgagugcaacaaccacuaccucugccucaacugccucacccuccuccucuccgucuccaaccgcugccccaucugcaagaugccccuccccaccaagcuccgccccuccaccgcccccaccgccccccccgccggcgccgccgacaacacccgccccccccccuacucccccugaggacuaguaauaaggaaacuguaugaaugucugugggcaggaagugaagagauccuucuguaaagguuuuuggaauuaugucugcugaauaauaaacuuuuuugaaauaauaaaucugguagaaaaaugagaucuaaaaaaaaaaaaaaaaaaaaaaaaaaaaaaaaaaaaaaaaaaaaaaaaaaaaaaaaaaaaaaaaugcaucccccccccccccccccccccccccccccccaaaggcucuuuucagagccaccagaauu

SEQ ID NO: 13275 - RNA, 652 nt, Artificial Sequence
  mRNA product Design b-4 comprising derived and/or modified sequence from MOPV/LASV reassortant(IGS-1;Clade IV)__AFY05533__Z (opt2)
gggagagucccgcagucggcguccagcggcucugcuuguucgugugugugucguugcaggccuuauucaagcuuaccaugggcaagacccaguccaagggccagcccuccaccaaccuccucaaggagaccgagccccgccaccccgucauccccgacgcccgcggcaccggccccgaguucugcaaguccugcugguucgagcgccgcggccucguccgcugcaacgaccacuaccucugccucaacugccucacccuccuccacaccgucuccgaccgcugccccaucugcaagcacaagcuccccuuccgccucgagcuccagacccagcccaccgccccccccgagaucccccccucccagaaccccccccccuacucccccugaggacuaguaauaaggaaacuguaugaaugucugugggcaggaagugaagagauccuucuguaaagguuuuuggaauuaugucugcugaauaauaaacuuuuuugaaauaauaaaucugguagaaaaaugagaucuaaaaaaaaaaaaaaaaaaaaaaaaaaaaaaaaaaaaaaaaaaaaaaaaaaaaaaaaaaaaaaaaugcaucccccccccccccccccccccccccccccccaaaggcucuuuucagagccaccagaauu

SEQ ID NO: 13276 - RNA, 640 nt, Artificial Sequence
  mRNA product Design b-4 comprising derived and/or modified sequence from LASV(LM776-SLE-2012;Clade IV)__AIT17824__Z (opt2)
gggagagucccgcagucggcguccagcggcucugcuuguucgugugugugucguugcaggccuuauucaagcuuaccaugggcaacaagcaggccaaggccuccgaggagaagaacuccccccgcgccucccucauccccgacgccacccaccucggcccccaguucugcaaguccugcugguucgagaacaagggccucgucgagugcaacaaccacuaccucugccucaacugccucacccuccuccucuccgucuccaaccgcugccccaucugcaagaugccccuccccaccaagcuccgccccuccaccacccccaccgccccccccaccggcgccgccgacuccauccgccccccccccuacucccccugaggacuaguaauaaggaaacuguaugaaugucugugggcaggaagugaagagauccuucuguaaagguuuuuggaauuaugucugcugaauaauaaacuuuuuugaaauaauaaaucugguagaaaaaugagaucuaaaaaaaaaaaaaaaaaaaaaaaaaaaaaaaaaaaaaaaaaaaaaaaaaaaaaaaaaaaaaaaaugcaucccccccccccccccccccccccccccccccaaaggcucuuuucagagccaccagaauu

SEQ ID NO: 13277 - RNA, 640 nt, Artificial Sequence
  mRNA product Design b-4 comprising derived and/or modified sequence from LASV(Mad39;Clade IV)__ANH09743__Z (opt2)
gggagagucccgcagucggcguccagcggcucugcuuguucgugugugugucguugcaggccuuauucaagcuuaccaugggcaacaagcaggccaaggccuccgaggucgaggacggcccccgcgccucccucauccccgacgccacccaccucggcccccaguucugcaaguccugcugguucgagaacaagucccucgucgagugcaacaaccacuaccucugccucaacugccucacccuccuccucuccgucuccaaccgcugccccaucugcaagaugccccuccccacccgccucaagcccuccgucguccccaccgccccccccacccgcgccggcgacggcacccgccccccccccuacucccccugaggacuaguaauaaggaaacuguaugaaugucugugggcaggaagugaagagauccuucuguaaagguuuuuggaauuaugucugcugaauaauaaacuuuuuugaaauaauaaaucugguagaaaaaugagaucuaaaaaaaaaaaaaaaaaaaaaaaaaaaaaaaaaaaaaaaaaaaaaaaaaaaaaaaaaaaaaaaaugcaucccccccccccccccccccccccccccccccaaaggcucuuuucagagccaccagaauu

SEQ ID NO: 13278 - RNA, 640 nt, Artificial Sequence
  mRNA product Design b-4 comprising derived and/or modified sequence from LASV(Z0947-SLE-2011;Clade IV)__AIT17838__Z (opt2)
gggagagucccgcagucggcguccagcggcucugcuuguucgugugugugucguugcaggccuuauucaagcuuaccaugggcaacaagcaggccaagguccccgaguccaaggacuccccccgcgccucccucauccccgacgccacccaccucggcccccaguucugcaaguccugcugguucgagaacaagggccucgucgagugcaacaaccacuaccucugccucaacugccucacccuccuccucuccgucuccaaccgcugccccaucugcaagaugccccuccccaccaagcucaagcccuccgccgcccccaccgccccccccaccggcgccgccgacuccauccgccccccccccuacucccccugaggacuaguaauaaggaaacuguaugaaugucugugggcaggaagugaagagauccuucuguaaagguuuuuggaauuaugucugcugaauaauaaacuuuuuugaaauaauaaaucugguagaaaaaugagaucuaaaaaaaaaaaaaaaaaaaaaaaaaaaaaaaaaaaaaaaaaaaaaaaaaaaaaaaaaaaaaaaaugcaucccccccccccccccccccccccccccccccaaaggcucuuuucagagccaccagaauu

SEQ ID NO: 13279 - RNA, 640 nt, Artificial Sequence
  mRNA product Design b-4 comprising derived and/or modified sequence from LASV(Josiah;Clade IV)__ADY11072/NP_694871__Z (opt3)
gggagagucccgcagucggcguccagcggcucugcuuguucgugugugugucguugcaggccuuauucaagcuuaccaugggcaacaagcaggccaaggcucccgagagcaaggacuccccuagagcaucucugaucccagaugccacccaccucgggccgcaauucugcaaaucauguugguuugaaaauaagggacuuguggagugcaacaaucauuaccuguguuugaacugcuuaacacugcuacucagugucagcaauaggugucccauuugcaaaaugccucugccaacuaaacuucggcccuccgcggcuccuacggccccacccaccggugcagccgacucuauacgcccuccaccguauucgcccugaggacuaguaauaaggaaacuguaugaaugucugugggcaggaagugaagagauccuucuguaaagguuuuuggaauuaugucugcugaauaauaaacuuuuuugaaauaauaaaucugguagaaaaaugagaucuaaaaaaaaaaaaaaaaaaaaaaaaaaaaaaaaaaaaaaaaaaaaaaaaaaaaaaaaaaaaaaaaugcaucccccccccccccccccccccccccccccccaaaggcucuuuucagagccaccagaauu

SEQ ID NO: 13280 - RNA, 643 nt, Artificial Sequence
  mRNA product Design b-4 comprising derived and/or modified sequence from LASV(Pinneo-NIG-1969;Clade I)__AIT17834__Z (opt3)
gggagagucccgcagucggcguccagcggcucugcuuguucgugugugugucguugcaggccuuauucaagcuuaccaugggcaacaagcagaccagaagcccucccaaaccagagcacccgaggcccacacugcucccugacgccucccaucuugggccacaauucugcaagucuuguugguuugaaaauaaaggacugguggagugcaacaaucacuacuuguguuuaaacugccugacucuacuccugucagucagugaucggugucccaucugcaagaugccucuuccaacgaaacuggcuguucgcacccagcccagcgcaccuccauugaaucaggguaacacacaguccucuccgcccccuuauucgccaugaggacuaguaauaaggaaacuguaugaaugucugugggcaggaagugaagagauccuucuguaaagguuuuuggaauuaugucugcugaauaauaaacuuuuuugaaauaauaaaucugguagaaaaaugagaucuaaaaaaaaaaaaaaaaaaaaaaaaaaaaaaaaaaaaaaaaaaaaaaaaaaaaaaaaaaaaaaaaugcaucccccccccccccccccccccccccccccccaaaggcucuuuucagagccaccagaauu

SEQ ID NO: 13281 - RNA, 640 nt, Artificial Sequence
  mRNA product Design b-4 comprising derived and/or modified sequence from LASV(Nig08-04;Clade II)__ADU56612__Z (opt3)
gggagagucccgcagucggcguccagcggcucugcuuguucgugugugugucguugcaggccuuauucaagcuuaccaugggcaacagacagaccaggcccacagaggccacugaacaaagccgggcucaccuggugccugacgcaucccaucucgggccacaguucugcaagucuuguugguuugagaaucgcggacuugucgaaugcaacaaucacuaccuguguuugaacugcuuaucacugcuacucaguguuagcucccgauguccgaucugcaaaaugccccugccuacgcgucuuaaggccucugcgcagccaucggcucccccuaccgaggccccacagaauacaacucccccuccauauaccccgugaggacuaguaauaaggaaacuguaugaaugucugugggcaggaagugaagagauccuucuguaaagguuuuuggaauuaugucugcugaauaauaaacuuuuuugaaauaauaaaucugguagaaaaaugagaucuaaaaaaaaaaaaaaaaaaaaaaaaaaaaaaaaaaaaaaaaaaaaaaaaaaaaaaaaaaaaaaaaugcaucccccccccccccccccccccccccccccccaaaggcucuuuucagagccaccagaauu

SEQ ID NO: 13282 - RNA, 640 nt, Artificial Sequence
  mRNA product Design b-4 comprising derived and/or modified sequence from LASV(Nig08-A19;Clade III)__ADU56620__Z (opt3)
gggagagucccgcagucggcguccagcggcucugcuuguucgugugugugucguugcaggccuuauucaagcuuaccaugggcgggaagcacaccaaaccccagagagagagcaacuccccuagggccucucugaucccagacgcuacacaucucggaccgcaauucugcaagucauguugguuugaaaauaaaggucuuguggagugcaacaaucacuaccuguguuugaacugcuuaacucugcuacucagugucagcaaucggugucccauuugcaagaugccucugccaacgcgccuucgagcauccaccaaccccacagccccucagguugaacaggugggcccaacuaaucccccuccauauucuccgugaggacuaguaauaaggaaacuguaugaaugucugugggcaggaagugaagagauccuucuguaaagguuuuuggaauuaugucugcugaauaauaaacuuuuuugaaauaauaaaucugguagaaaaaugagaucuaaaaaaaaaaaaaaaaaaaaaaaaaaaaaaaaaaaaaaaaaaaaaaaaaaaaaaaaaaaaaaaaugcaucccccccccccccccccccccccccccccccaaaggcucuuuucagagccaccagaauu

SEQ ID NO: 13283 - RNA, 640 nt, Artificial Sequence
  mRNA product Design b-4 comprising derived and/or modified sequence from LASV(AV;Clade V)__CCA30312__Z (opt3)
gggagagucccgcagucggcguccagcggcucugcuuguucgugugugugucguugcaggccuuauucaagcuuaccaugggcaacagacaggccaagaaucccgagguggaaaacagcccuagggcuucccugaucccagacgcaacccaccucgggccgcaauucugcaaaucuuguugguuugagaauaagggacuugucgaaugcaacaaucauuaccuguguuugaacugcuuaucacugcuacucaguguuagcaaucggugucccauuugcaaaaugccucugccaacacgccuucgacccacuacgaccccuacagccccacagauaaucaaggagaacacuaccaaucccccuccauauacaccgugaggacuaguaauaaggaaacuguaugaaugucugugggcaggaagugaagagauccuucuguaaagguuuuuggaauuaugucugcugaauaauaaacuuuuuugaaauaauaaaucugguagaaaaaugagaucuaaaaaaaaaaaaaaaaaaaaaaaaaaaaaaaaaaaaaaaaaaaaaaaaaaaaaaaaaaaaaaaaugcaucccccccccccccccccccccccccccccccaaaggcucuuuucagagccaccagaauu

SEQ ID NO: 13284 - RNA, 640 nt, Artificial Sequence
  mRNA product Design b-4 comprising derived and/or modified sequence from LASV(Togo/2016/7082;Clade VI)__AMR44579__Z (opt3)
gggagagucccgcagucggcguccagcggcucugcuuguucgugugugugucguugcaggccuuauucaagcuuaccaugggcgccagacagaccaagcaaccccagaucgaggggagcccuagggcuucccuggugccagacgcaucucaccucggaccgcaguucugcaagucauguugguuugaaaacaagggucuugucgagugcaauaaccauuaccuguguuugaauugcuuaagucugcuacucagcguuuccaaccggugucccauuugcaaaaugccucugccaacaaaacuucgcgugucuucggcccccucagcgccuccagcugccacugcacagcccggcacgccuccaccguauagccccugaggacuaguaauaaggaaacuguaugaaugucugugggcaggaagugaagagauccuucuguaaagguuuuuggaauuaugucugcugaauaauaaacuuuuuugaaauaauaaaucugguagaaaaaugagaucuaaaaaaaaaaaaaaaaaaaaaaaaaaaaaaaaaaaaaaaaaaaaaaaaaaaaaaaaaaaaaaaaugcaucccccccccccccccccccccccccccccccaaaggcucuuuucagagccaccagaauu

SEQ ID NO: 13285 - RNA, 640 nt, Artificial Sequence
  mRNA product Design b-4 comprising derived and/or modified sequence from LASV(KAK-428;Clade n.d. (VII))__ANH09761__Z (opt3)
gggagagucccgcagucggcguccagcggcucugcuuguucgugugugugucguugcaggccuuauucaagcuuaccaugggcaacaaggggaccaaacccacacagaauagcgagccuuccagagccaaccuggugccagacgcuucuuaccucggaccgcaauucugcaagucauguugguuugaaaauaaaggucuugucgagugcaacaaucacuaucuguguuugaacugcuuaacuaugcugcuaaguguuagcaauaggugucccaucugcaagaugccucucccaacgaaaauuaaggcauccggcucucccucggccccuccaaccgaagcgaacucagcugugagcccucccccauacacaccgugaggacuaguaauaaggaaacuguaugaaugucugugggcaggaagugaagagauccuucuguaaagguuuuuggaauuaugucugcugaauaauaaacuuuuuugaaauaauaaaucugguagaaaaaugagaucuaaaaaaaaaaaaaaaaaaaaaaaaaaaaaaaaaaaaaaaaaaaaaaaaaaaaaaaaaaaaaaaaugcaucccccccccccccccccccccccccccccccaaaggcucuuuucagagccaccagaauu

SEQ ID NO: 13286 - RNA, 640 nt, Artificial Sequence
  mRNA product Design b-4 comprising derived and/or modified sequence from LASV(ISTH0009-NIG-2011;Clade II)__AIT17402__Z (opt3)
gggagagucccgcagucggcguccagcggcucugcuuguucgugugugugucguugcaggccuuauucaagcuuaccaugggcaacagacaggccaagagcaccaaaguggacgagcaccaaagggcucaucugguccccgaugcaucccaccucgggccucaguucugcaagucuuguugguuugaaaaucggggacuuguugagugcaacaaucauuaccuguguuugaacugcuuaucacugcuacucagugugagcucccgcuguccaaucugcaaaaugccgcugcccacaaaacuuaaggccgcggcucagccuucugccccaucgacugaaacgauucagaauaccacacccccuccauauacucccugaggacuaguaauaaggaaacuguaugaaugucugugggcaggaagugaagagauccuucuguaaagguuuuuggaauuaugucugcugaauaauaaacuuuuuugaaauaauaaaucugguagaaaaaugagaucuaaaaaaaaaaaaaaaaaaaaaaaaaaaaaaaaaaaaaaaaaaaaaaaaaaaaaaaaaaaaaaaaugcaucccccccccccccccccccccccccccccccaaaggcucuuuucagagccaccagaauu

SEQ ID NO: 13287 - RNA, 640 nt, Artificial Sequence
  mRNA product Design b-4 comprising derived and/or modified sequence from LASV(ISTH2010-NIG-2012;Clade II)__AIT17480__Z (opt3)
gggagagucccgcagucggcguccagcggcucugcuuguucgugugugugucguugcaggccuuauucaagcuuaccaugggcaacagacacgccaagagcaccaaaguggacgagcaucagagggcucaccugguccccgaugcaucccaucucgggccucaauucugcaagucuuguugguuugaaaaucggggacuuguugagugcaacaaucacuaccuguguuugaacugcuuaucacugcuacucagugugagcucccgcuguccaaucugcaaaaugccgcugcccacaaaacuuaaggccgcggcucagccuucugccccaucgacugaaguaauucagucaacgacacccccuccauauacccccugaggacuaguaauaaggaaacuguaugaaugucugugggcaggaagugaagagauccuucuguaaagguuuuuggaauuaugucugcugaauaauaaacuuuuuugaaauaauaaaucugguagaaaaaugagaucuaaaaaaaaaaaaaaaaaaaaaaaaaaaaaaaaaaaaaaaaaaaaaaaaaaaaaaaaaaaaaaaaugcaucccccccccccccccccccccccccccccccaaaggcucuuuucagagccaccagaauu

SEQ ID NO: 13288 - RNA, 640 nt, Artificial Sequence
  mRNA product Design b-4 comprising derived and/or modified sequence from LASV(Lassa virus/H.sapiens-wt/NGA/2016/ISTH_0017;Clade II)__AVO03713__Z (opt3)
gggagagucccgcagucggcguccagcggcucugcuuguucgugugugugucguugcaggccuuauucaagcuuaccaugggcaacagacaggccaagagcaccaaaguggacgagcaccaaagggcucaucugguccccgaugcaucccaccucgggccucaguucugcaagucuuguugguuugaaaaucggggacuuguugagugcaacaaucauuaccuguguuugaacugcuuaucacugcuacucagugugagcucccgcuguccaaucugcaaaaugccgcugcccacaaaacuuaaggccgcgacucagccuucugcuccaucgacggaaguaaaucagaacaccacacccccuccauauacucccugaggacuaguaauaaggaaacuguaugaaugucugugggcaggaagugaagagauccuucuguaaagguuuuuggaauuaugucugcugaauaauaaacuuuuuugaaauaauaaaucugguagaaaaaugagaucuaaaaaaaaaaaaaaaaaaaaaaaaaaaaaaaaaaaaaaaaaaaaaaaaaaaaaaaaaaaaaaaaugcaucccccccccccccccccccccccccccccccaaaggcucuuuucagagccaccagaauu

SEQ ID NO: 13289 - RNA, 640 nt, Artificial Sequence
  mRNA product Design b-4 comprising derived and/or modified sequence from LASV(Lassa virus/H.sapiens-wt/NGA/2018/ISTH_0959;Clade II)__AVV65084__Z (opt3)
gggagagucccgcagucggcguccagcggcucugcuuguucgugugugugucguugcaggccuuauucaagcuuaccaugggcaacaagcaggccaaaagcaccaagguggacgagcaccaaagagcucaucugguccccgaugcaucccaccucgggccucaguucugcaaaucuuguugguuugaaaauaggggacuuguugagugcaacaaucauuaccuguguuugaacugcuuaucacugcuacucagugugagcucccgguguccaaucugcaagaugccgcugcccacaaaacuuaaggccgcggcucagccuucugccccaucgacugaagcaauucagucaacgacacccccuccauauacccccugaggacuaguaauaaggaaacuguaugaaugucugugggcaggaagugaagagauccuucuguaaagguuuuuggaauuaugucugcugaauaauaaacuuuuuugaaauaauaaaucugguagaaaaaugagaucuaaaaaaaaaaaaaaaaaaaaaaaaaaaaaaaaaaaaaaaaaaaaaaaaaaaaaaaaaaaaaaaaugcaucccccccccccccccccccccccccccccccaaaggcucuuuucagagccaccagaauu

SEQ ID NO: 13290 - RNA, 640 nt, Artificial Sequence
  mRNA product Design b-4 comprising derived and/or modified sequence from LASV(LASV003-NIG-2008;Clade II)__AIT17578__Z (opt3)
gggagagucccgcagucggcguccagcggcucugcuuguucgugugugugucguugcaggccuuauucaagcuuaccaugggcaacagacaggccaagagcaccaaaguggacgagcaccaaagggcucaucugguccccgaugcaucccaccucgggccucaguucugcaagucuuguugguuugaaaauaaaggacuuguugagugcaacaaucauuaccuguguuugaacugcuuaucacugcuacucagugugagcucccgguguccaaucugcaagaugccgcugcccacaaaacuucgcgccgcggcucagccuucugccccaucgacugaaucagcacagaauacggcucccccuccauaugcccccugaggacuaguaauaaggaaacuguaugaaugucugugggcaggaagugaagagauccuucuguaaagguuuuuggaauuaugucugcugaauaauaaacuuuuuugaaauaauaaaucugguagaaaaaugagaucuaaaaaaaaaaaaaaaaaaaaaaaaaaaaaaaaaaaaaaaaaaaaaaaaaaaaaaaaaaaaaaaaugcaucccccccccccccccccccccccccccccccaaaggcucuuuucagagccaccagaauu

SEQ ID NO: 13291 - RNA, 640 nt, Artificial Sequence
  mRNA product Design b-4 comprising derived and/or modified sequence from LASV(LASV035-NIG-2009;Clade II)__AIT17586__Z (opt3)
gggagagucccgcagucggcguccagcggcucugcuuguucgugugugugucguugcaggccuuauucaagcuuaccaugggcaacaagcaggccaaaagcaccaagguggacgagcaccaaagagcucaucugguccccgaugcaucccaccucgggccucaguucugcaaaucuuguugguuugaaaauaggggacuuguugagugcaacaaucauuaccuguguuugaacugcuuaucacugcuacucagugugagcucccgguguccaaucugcaagaugccgcugcccacacgccuuaaagccgcggcucagccuucugccccaucgacugaaguaacgcagaauaccacacccccuccauauacucccugaggacuaguaauaaggaaacuguaugaaugucugugggcaggaagugaagagauccuucuguaaagguuuuuggaauuaugucugcugaauaauaaacuuuuuugaaauaauaaaucugguagaaaaaugagaucuaaaaaaaaaaaaaaaaaaaaaaaaaaaaaaaaaaaaaaaaaaaaaaaaaaaaaaaaaaaaaaaaugcaucccccccccccccccccccccccccccccccaaaggcucuuuucagagccaccagaauu

SEQ ID NO: 13292 - RNA, 640 nt, Artificial Sequence
  mRNA product Design b-4 comprising derived and/or modified sequence from LASV(LASV1000-NIG-2009;Clade II)__AIT17780__Z (opt3)
gggagagucccgcagucggcguccagcggcucugcuuguucgugugugugucguugcaggccuuauucaagcuuaccaugggcaacagacagaccaagagcacaaaaguggacgagcaccaaagggccuaccugguccccgaugcuucccuccuugggccucaguucugcaagucuuguugguuugaaaauaaaggacugguugagugcaacaaucauuauuuguguuuaaacugccugucacuacuccugagugugagcucccgguguccaaucugcaagaugccgcuucccacucgccugaaagcagccgcgcagccuucugcuccacccacggaagccauucagaauaccacaccuccacccuacacuccuugaggacuaguaauaaggaaacuguaugaaugucugugggcaggaagugaagagauccuucuguaaagguuuuuggaauuaugucugcugaauaauaaacuuuuuugaaauaauaaaucugguagaaaaaugagaucuaaaaaaaaaaaaaaaaaaaaaaaaaaaaaaaaaaaaaaaaaaaaaaaaaaaaaaaaaaaaaaaaugcaucccccccccccccccccccccccccccccccaaaggcucuuuucagagccaccagaauu

SEQ ID NO: 13293 - RNA, 640 nt, Artificial Sequence
  mRNA product Design b-4 comprising derived and/or modified sequence from LASV(LASV221-NIG-2010;Clade II)__AIT17622__Z (opt3)
gggagagucccgcagucggcguccagcggcucugcuuguucgugugugugucguugcaggccuuauucaagcuuaccaugggcaacagacaggccaagagcaccaaaguggacgagcaccaaagggcucaucugguccccgaugcaucccaccucgggccucaguucugcaagucuuguugguuugaaaaucggggacuuguugagugcaacaaucauuaccuguguuugaacugcuuaucacugcuacucagugugagcucccgcuguccaaucugcaaaaugccgcugcccacaaaacuuaaggccgcgacucagccuucugcuccaucgacggaaguaacccagaauacaauucccccuccauauucacccugaggacuaguaauaaggaaacuguaugaaugucugugggcaggaagugaagagauccuucuguaaagguuuuuggaauuaugucugcugaauaauaaacuuuuuugaaauaauaaaucugguagaaaaaugagaucuaaaaaaaaaaaaaaaaaaaaaaaaaaaaaaaaaaaaaaaaaaaaaaaaaaaaaaaaaaaaaaaaugcaucccccccccccccccccccccccccccccccaaaggcucuuuucagagccaccagaauu

SEQ ID NO: 13294 - RNA, 640 nt, Artificial Sequence
  mRNA product Design b-4 comprising derived and/or modified sequence from LASV(LASV237-NIG-2010;Clade II)__AIT17636__Z (opt3)
gggagagucccgcagucggcguccagcggcucugcuuguucgugugugugucguugcaggccuuauucaagcuuaccaugggcaacagacaggccaagagcaccaaaguggacgagcaccaaagggcucaucugguccccgaugcaucccaccucgggccucaguucugcaagucuuguugguuugaaaaucggggacuuguugagugcaacaaucauuaccuguguuugaacugcuuaucacugcuacucagugugagcucccgcuguccaaucugcaaaaugccgcugcccacaaaacuuaaggccgcggcucagccuucugccccaucgauugaaacuauacagaauacgacacccccuccauauacccccugaggacuaguaauaaggaaacuguaugaaugucugugggcaggaagugaagagauccuucuguaaagguuuuuggaauuaugucugcugaauaauaaacuuuuuugaaauaauaaaucugguagaaaaaugagaucuaaaaaaaaaaaaaaaaaaaaaaaaaaaaaaaaaaaaaaaaaaaaaaaaaaaaaaaaaaaaaaaaugcaucccccccccccccccccccccccccccccccaaaggcucuuuucagagccaccagaauu

SEQ ID NO: 13295 - RNA, 640 nt, Artificial Sequence
  mRNA product Design b-4 comprising derived and/or modified sequence from LASV(LASV253-NIG-2011;Clade II)__AIT17668__Z (opt3)
gggagagucccgcagucggcguccagcggcucugcuuguucgugugugugucguugcaggccuuauucaagcuuaccaugggcaacagacaggccaagagcaccaaaguggacgagcaccaaagggcucaucugguccccgaugcaucccaccucgggccucaguucugcaagucuuguugguuugaaaauaaaggacuuguugagugcaacaaucauuaccuguguuugaacugcuuaucacugcuacucagugugagcucccgguguccaaucugcaagaugccgcugcccacaaaacuuaagacuacggcccagccuucugcgccacccaccgaagcugccaagaauacagcaccuccacccuaugccccuugaggacuaguaauaaggaaacuguaugaaugucugugggcaggaagugaagagauccuucuguaaagguuuuuggaauuaugucugcugaauaauaaacuuuuuugaaauaauaaaucugguagaaaaaugagaucuaaaaaaaaaaaaaaaaaaaaaaaaaaaaaaaaaaaaaaaaaaaaaaaaaaaaaaaaaaaaaaaaugcaucccccccccccccccccccccccccccccccaaaggcucuuuucagagccaccagaauu

SEQ ID NO: 13296 - RNA, 640 nt, Artificial Sequence
  mRNA product Design b-4 comprising derived and/or modified sequence from LASV(G1180-SLE-2010;Clade IV)__AIT17166__Z (opt3)
gggagagucccgcagucggcguccagcggcucugcuuguucgugugugugucguugcaggccuuauucaagcuuaccaugggcaacaagcaggccaaggcucccgaggcaaaggacagcccuagagccucccugaucccagaugcgacccaccucgggccgcaauucugcaaaucuuguugguuugaaacaaagggacuuguggagugcaauaaccauuaccuguguuugaauugcuuaacucugcuacucucagucaguaacaggugucccauuugcaaaaugccucugccaacgaaacuucggcccagcgcuaccccuacagccccacccacugaagcagccgacuccauagguccuccaccguauucucccugaggacuaguaauaaggaaacuguaugaaugucugugggcaggaagugaagagauccuucuguaaagguuuuuggaauuaugucugcugaauaauaaacuuuuuugaaauaauaaaucugguagaaaaaugagaucuaaaaaaaaaaaaaaaaaaaaaaaaaaaaaaaaaaaaaaaaaaaaaaaaaaaaaaaaaaaaaaaaugcaucccccccccccccccccccccccccccccccaaaggcucuuuucagagccaccagaauu

SEQ ID NO: 13297 - RNA, 640 nt, Artificial Sequence
  mRNA product Design b-4 comprising derived and/or modified sequence from LASV(G1442-SLE-2011;Clade IV)__AIT17178__Z (opt3)
gggagagucccgcagucggcguccagcggcucugcuuguucgugugugugucguugcaggccuuauucaagcuuaccaugggcaacaagcaggccaaagcuagcgaggcaaaggacucccccagagccucucugaucccugaugcgacccaccucgggccacaauucugcaaaucauguugguuugaaaauaagggacuuguggagugcaacaaucauuaccuguguuugaacugcuuaagucugcuacucagcgucuccucuagguguccgauuugcaaaaugccccugccuacacggcuucgcccaucgacugcucccacggccccuccagcacgagccggugacaauauaaagcccccuccauauucaccgugaggacuaguaauaaggaaacuguaugaaugucugugggcaggaagugaagagauccuucuguaaagguuuuuggaauuaugucugcugaauaauaaacuuuuuugaaauaauaaaucugguagaaaaaugagaucuaaaaaaaaaaaaaaaaaaaaaaaaaaaaaaaaaaaaaaaaaaaaaaaaaaaaaaaaaaaaaaaaugcaucccccccccccccccccccccccccccccccaaaggcucuuuucagagccaccagaauu

SEQ ID NO: 13298 - RNA, 640 nt, Artificial Sequence
  mRNA product Design b-4 comprising derived and/or modified sequence from LASV(G502-SLE-2009;Clade IV)__AIT17124__Z (opt3)
gggagagucccgcagucggcguccagcggcucugcuuguucgugugugugucguugcaggccuuauucaagcuuaccaugggcaacaaacaggugaagacccccgaggccaaggacagcccuagagcuucccugaucccagaugcaacacaccucgggccgcaauucugcaagucuuguugguuugaaaauaagggacuugucgagugcaacaaucauuaccuguguuugaacugcuuaacucugcuacucucaguugguaauaggugucccauuugcaaaaugccucugccaacgaaacuucggcccagugugaccccuacagccccacccacucgcgcggcugacagcauaggcccuccaccguauucccccugaggacuaguaauaaggaaacuguaugaaugucugugggcaggaagugaagagauccuucuguaaagguuuuuggaauuaugucugcugaauaauaaacuuuuuugaaauaauaaaucugguagaaaaaugagaucuaaaaaaaaaaaaaaaaaaaaaaaaaaaaaaaaaaaaaaaaaaaaaaaaaaaaaaaaaaaaaaaaugcaucccccccccccccccccccccccccccccccaaaggcucuuuucagagccaccagaauu

SEQ ID NO: 13299 - RNA, 640 nt, Artificial Sequence
  mRNA product Design b-4 comprising derived and/or modified sequence from LASV(G733-SLE-2010;Clade IV)__AIT17152__Z (opt3)
gggagagucccgcagucggcguccagcggcucugcuuguucgugugugugucguugcaggccuuauucaagcuuaccaugggcaacaagcaggccaagacccccgagacaaaggacagcccuagagcuucccugaucccagaugcaacucaccucgggccgcaauucugcaaaucuuguugguuugaaaauaagggacuuguggagugcaacaaucauuaccuguguuugaacugcuuaacgcugcuacucucagucaguaauaggugucccauuugcaaaaugccucugccaaccaaacuucggcccagcacagccccuacugcgccacccgcuggugccgcagacaacacccgcccuccaccguauucccccugaggacuaguaauaaggaaacuguaugaaugucugugggcaggaagugaagagauccuucuguaaagguuuuuggaauuaugucugcugaauaauaaacuuuuuugaaauaauaaaucugguagaaaaaugagaucuaaaaaaaaaaaaaaaaaaaaaaaaaaaaaaaaaaaaaaaaaaaaaaaaaaaaaaaaaaaaaaaaugcaucccccccccccccccccccccccccccccccaaaggcucuuuucagagccaccagaauu

SEQ ID NO: 13300 - RNA, 652 nt, Artificial Sequence
  mRNA product Design b-4 comprising derived and/or modified sequence from MOPV/LASV reassortant(IGS-1;Clade IV)__AFY05533__Z (opt3)
gggagagucccgcagucggcguccagcggcucugcuuguucgugugugugucguugcaggccuuauucaagcuuaccaugggcaagacccagagcaaagggcaacccuccacaaaccugcucaaggagacugaaccuagacacccagugaucccggacgccaggggaacgggucccgaguucugcaaaucuuguugguuugaacggcgcggccuuguccgaugcaaugaucauuaccuguguuugaacugcuuaacccugcuacacacaguuucagaccguuguccuauuugcaagcauaaacucccauucagacuggagcuucagacucagcccaccgcuccuccagaaauacccccuagucagaauccaccgcccuauagcccuugaggacuaguaauaaggaaacuguaugaaugucugugggcaggaagugaagagauccuucuguaaagguuuuuggaauuaugucugcugaauaauaaacuuuuuugaaauaauaaaucugguagaaaaaugagaucuaaaaaaaaaaaaaaaaaaaaaaaaaaaaaaaaaaaaaaaaaaaaaaaaaaaaaaaaaaaaaaaaugcaucccccccccccccccccccccccccccccccaaaggcucuuuucagagccaccagaauu

SEQ ID NO: 13301 - RNA, 640 nt, Artificial Sequence
  mRNA product Design b-4 comprising derived and/or modified sequence from LASV(LM776-SLE-2012;Clade IV)__AIT17824__Z (opt3)
gggagagucccgcagucggcguccagcggcucugcuuguucgugugugugucguugcaggccuuauucaagcuuaccaugggcaacaagcaggccaaggcuagcgaggaaaagaacucccccagagcaucucugaucccugacgccacccaccucgggccacaauucugcaaaucauguugguuugagaauaagggacuuguggaaugcaauaaccauuaccuguguuugaauugcuuaacacugcuacucagugucagcaacagguguccgauuugcaaaaugccccugccuacuaaacuucggccauccacgacccccacagcgccuccaacuggugcugccgauucuauacgcccucccccauauucgccgugaggacuaguaauaaggaaacuguaugaaugucugugggcaggaagugaagagauccuucuguaaagguuuuuggaauuaugucugcugaauaauaaacuuuuuugaaauaauaaaucugguagaaaaaugagaucuaaaaaaaaaaaaaaaaaaaaaaaaaaaaaaaaaaaaaaaaaaaaaaaaaaaaaaaaaaaaaaaaugcaucccccccccccccccccccccccccccccccaaaggcucuuuucagagccaccagaauu

SEQ ID NO: 13302 - RNA, 640 nt, Artificial Sequence
  mRNA product Design b-4 comprising derived and/or modified sequence from LASV(Mad39;Clade IV)__ANH09743__Z (opt3)
gggagagucccgcagucggcguccagcggcucugcuuguucgugugugugucguugcaggccuuauucaagcuuaccaugggcaacaagcaggccaaagcuagcgagguggaagacgggcccagagcaucccugaucccugaugccacccaccucggaccacaauucugcaagucuuguugguuugagaauaaaucacuugucgaaugcaacaaucauuaccuguguuugaacugcuuaacacugcuacucaguguuagcaauagguguccgauuugcaagaugccccugccuacucggcuuaaaccauccgugguacccacggcgccuccaacccgcgcuggugacggcacacgacccccuccauauucuccgugaggacuaguaauaaggaaacuguaugaaugucugugggcaggaagugaagagauccuucuguaaagguuuuuggaauuaugucugcugaauaauaaacuuuuuugaaauaauaaaucugguagaaaaaugagaucuaaaaaaaaaaaaaaaaaaaaaaaaaaaaaaaaaaaaaaaaaaaaaaaaaaaaaaaaaaaaaaaaugcaucccccccccccccccccccccccccccccccaaaggcucuuuucagagccaccagaauu

SEQ ID NO: 13303 - RNA, 640 nt, Artificial Sequence
  mRNA product Design b-4 comprising derived and/or modified sequence from LASV(Z0947-SLE-2011;Clade IV)__AIT17838__Z (opt3)
gggagagucccgcagucggcguccagcggcucugcuuguucgugugugugucguugcaggccuuauucaagcuuaccaugggcaacaagcaggccaaggugcccgagagcaaggacuccccuagagcuucucugaucccagaugcaacccaccucgggccgcaauucugcaaaucauguugguuugaaaauaagggacuugucgagugcaacaaucauuaccuguguuugaacugcuuaacacugcuacucaguguuagcaauaggugucccauuugcaaaaugccucugccaacuaaacuuaagcccuccgccgcgccuacggcuccacccaccggugccgcagacucuauacggccuccaccguauucgcccugaggacuaguaauaaggaaacuguaugaaugucugugggcaggaagugaagagauccuucuguaaagguuuuuggaauuaugucugcugaauaauaaacuuuuuugaaauaauaaaucugguagaaaaaugagaucuaaaaaaaaaaaaaaaaaaaaaaaaaaaaaaaaaaaaaaaaaaaaaaaaaaaaaaaaaaaaaaaaugcaucccccccccccccccccccccccccccccccaaaggcucuuuucagagccaccagaauu

SEQ ID NO: 13304 - RNA, 640 nt, Artificial Sequence
  mRNA product Design b-4 comprising derived and/or modified sequence from LASV(Josiah;Clade IV)__ADY11072/NP_694871__Z (opt4)
gggagagucccgcagucggcguccagcggcucugcuuguucgugugugugucguugcaggccuuauucaagcuuaccaugggcaacaagcaggccaaggcccccgagagcaaggacagccccagagccagccugauccccgacgccacccaccugggcccccaguucugcaagagcugcugguucgagaacaagggccugguggagugcaacaaccacuaccugugccugaacugccugacccugcugcugagcgugagcaacagaugccccaucugcaagaugccccugcccaccaagcugagacccagcgccgcccccaccgccccccccaccggcgccgccgacagcaucagacccccccccuacagccccugaggacuaguaauaaggaaacuguaugaaugucugugggcaggaagugaagagauccuucuguaaagguuuuuggaauuaugucugcugaauaauaaacuuuuuugaaauaauaaaucugguagaaaaaugagaucuaaaaaaaaaaaaaaaaaaaaaaaaaaaaaaaaaaaaaaaaaaaaaaaaaaaaaaaaaaaaaaaaugcaucccccccccccccccccccccccccccccccaaaggcucuuuucagagccaccagaauu

SEQ ID NO: 13305 - RNA, 643 nt, Artificial Sequence
  mRNA product Design b-4 comprising derived and/or modified sequence from LASV(Pinneo-NIG-1969;Clade I)__AIT17834__Z (opt4)
gggagagucccgcagucggcguccagcggcucugcuuguucgugugugugucguugcaggccuuauucaagcuuaccaugggcaacaagcagaccagaagcccccccaagcccgagcaccccagacccacccugcugcccgacgccagccaccugggcccccaguucugcaagagcugcugguucgagaacaagggccugguggagugcaacaaccacuaccugugccugaacugccugacccugcugcugagcgugagcgacagaugccccaucugcaagaugccccugcccaccaagcuggccgugagaacccagcccagcgcccccccccugaaccagggcaacacccagagcagccccccccccuacagccccugaggacuaguaauaaggaaacuguaugaaugucugugggcaggaagugaagagauccuucuguaaagguuuuuggaauuaugucugcugaauaauaaacuuuuuugaaauaauaaaucugguagaaaaaugagaucuaaaaaaaaaaaaaaaaaaaaaaaaaaaaaaaaaaaaaaaaaaaaaaaaaaaaaaaaaaaaaaaaugcaucccccccccccccccccccccccccccccccaaaggcucuuuucagagccaccagaauu

SEQ ID NO: 13306 - RNA, 640 nt, Artificial Sequence
  mRNA product Design b-4 comprising derived and/or modified sequence from LASV(Nig08-04;Clade II)__ADU56612__Z (opt4)
gggagagucccgcagucggcguccagcggcucugcuuguucgugugugugucguugcaggccuuauucaagcuuaccaugggcaacagacagaccagacccaccgaggccaccgagcagagcagagcccaccuggugcccgacgccagccaccugggcccccaguucugcaagagcugcugguucgagaacagaggccugguggagugcaacaaccacuaccugugccugaacugccugagccugcugcugagcgugagcagcagaugccccaucugcaagaugccccugcccaccagacugaaggccagcgcccagcccagcgccccccccaccgaggccccccagaacaccacccccccccccuacacccccugaggacuaguaauaaggaaacuguaugaaugucugugggcaggaagugaagagauccuucuguaaagguuuuuggaauuaugucugcugaauaauaaacuuuuuugaaauaauaaaucugguagaaaaaugagaucuaaaaaaaaaaaaaaaaaaaaaaaaaaaaaaaaaaaaaaaaaaaaaaaaaaaaaaaaaaaaaaaaugcaucccccccccccccccccccccccccccccccaaaggcucuuuucagagccaccagaauu

SEQ ID NO: 13307 - RNA, 640 nt, Artificial Sequence
  mRNA product Design b-4 comprising derived and/or modified sequence from LASV(Nig08-A19;Clade III)__ADU56620__Z (opt4)
gggagagucccgcagucggcguccagcggcucugcuuguucgugugugugucguugcaggccuuauucaagcuuaccaugggcggcaagcacaccaagccccagagagagagcaacagccccagagccagccugauccccgacgccacccaccugggcccccaguucugcaagagcugcugguucgagaacaagggccugguggagugcaacaaccacuaccugugccugaacugccugacccugcugcugagcgugagcaacagaugccccaucugcaagaugccccugcccaccagacugagagccagcaccaaccccaccgccccccagguggagcaggugggccccaccaaccccccccccuacagccccugaggacuaguaauaaggaaacuguaugaaugucugugggcaggaagugaagagauccuucuguaaagguuuuuggaauuaugucugcugaauaauaaacuuuuuugaaauaauaaaucugguagaaaaaugagaucuaaaaaaaaaaaaaaaaaaaaaaaaaaaaaaaaaaaaaaaaaaaaaaaaaaaaaaaaaaaaaaaaugcaucccccccccccccccccccccccccccccccaaaggcucuuuucagagccaccagaauu

SEQ ID NO: 13308 - RNA, 640 nt, Artificial Sequence
  mRNA product Design b-4 comprising derived and/or modified sequence from LASV(AV;Clade V)__CCA30312__Z (opt4)
gggagagucccgcagucggcguccagcggcucugcuuguucgugugugugucguugcaggccuuauucaagcuuaccaugggcaacagacaggccaagaaccccgagguggagaacagccccagagccagccugauccccgacgccacccaccugggcccccaguucugcaagagcugcugguucgagaacaagggccugguggagugcaacaaccacuaccugugccugaacugccugagccugcugcugagcgugagcaacagaugccccaucugcaagaugccccugcccaccagacugagacccaccaccacccccaccgccccccagaucaucaaggagaacaccaccaaccccccccccuacacccccugaggacuaguaauaaggaaacuguaugaaugucugugggcaggaagugaagagauccuucuguaaagguuuuuggaauuaugucugcugaauaauaaacuuuuuugaaauaauaaaucugguagaaaaaugagaucuaaaaaaaaaaaaaaaaaaaaaaaaaaaaaaaaaaaaaaaaaaaaaaaaaaaaaaaaaaaaaaaaugcaucccccccccccccccccccccccccccccccaaaggcucuuuucagagccaccagaauu

SEQ ID NO: 13309 - RNA, 640 nt, Artificial Sequence
  mRNA product Design b-4 comprising derived and/or modified sequence from LASV(Togo/2016/7082;Clade VI)__AMR44579__Z (opt4)
gggagagucccgcagucggcguccagcggcucugcuuguucgugugugugucguugcaggccuuauucaagcuuaccaugggcgccagacagaccaagcagccccagaucgagggcagccccagagccagccuggugcccgacgccagccaccugggcccccaguucugcaagagcugcugguucgagaacaagggccugguggagugcaacaaccacuaccugugccugaacugccugagccugcugcugagcgugagcaacagaugccccaucugcaagaugccccugcccaccaagcugagagugagcagcgcccccagcgccccccccgccgccaccgcccagcccggcacccccccccccuacagccccugaggacuaguaauaaggaaacuguaugaaugucugugggcaggaagugaagagauccuucuguaaagguuuuuggaauuaugucugcugaauaauaaacuuuuuugaaauaauaaaucugguagaaaaaugagaucuaaaaaaaaaaaaaaaaaaaaaaaaaaaaaaaaaaaaaaaaaaaaaaaaaaaaaaaaaaaaaaaaugcaucccccccccccccccccccccccccccccccaaaggcucuuuucagagccaccagaauu

SEQ ID NO: 13310 - RNA, 640 nt, Artificial Sequence
  mRNA product Design b-4 comprising derived and/or modified sequence from LASV(KAK-428;Clade n.d. (VII))__ANH09761__Z (opt4)
gggagagucccgcagucggcguccagcggcucugcuuguucgugugugugucguugcaggccuuauucaagcuuaccaugggcaacaagggcaccaagcccacccagaacagcgagcccagcagagccaaccuggugcccgacgccagcuaccugggcccccaguucugcaagagcugcugguucgagaacaagggccugguggagugcaacaaccacuaccugugccugaacugccugaccaugcugcugagcgugagcaacagaugccccaucugcaagaugccccugcccaccaagaucaaggccagcggcagccccagcgccccccccaccgaggccaacagcgccgugagccccccccccuacacccccugaggacuaguaauaaggaaacuguaugaaugucugugggcaggaagugaagagauccuucuguaaagguuuuuggaauuaugucugcugaauaauaaacuuuuuugaaauaauaaaucugguagaaaaaugagaucuaaaaaaaaaaaaaaaaaaaaaaaaaaaaaaaaaaaaaaaaaaaaaaaaaaaaaaaaaaaaaaaaugcaucccccccccccccccccccccccccccccccaaaggcucuuuucagagccaccagaauu

SEQ ID NO: 13311 - RNA, 640 nt, Artificial Sequence
  mRNA product Design b-4 comprising derived and/or modified sequence from LASV(ISTH0009-NIG-2011;Clade II)__AIT17402__Z (opt4)
gggagagucccgcagucggcguccagcggcucugcuuguucgugugugugucguugcaggccuuauucaagcuuaccaugggcaacagacaggccaagagcaccaagguggacgagcaccagagagcccaccuggugcccgacgccagccaccugggcccccaguucugcaagagcugcugguucgagaacagaggccugguggagugcaacaaccacuaccugugccugaacugccugagccugcugcugagcgugagcagcagaugccccaucugcaagaugccccugcccaccaagcugaaggccgccgcccagcccagcgcccccagcaccgagaccauccagaacaccacccccccccccuacacccccugaggacuaguaauaaggaaacuguaugaaugucugugggcaggaagugaagagauccuucuguaaagguuuuuggaauuaugucugcugaauaauaaacuuuuuugaaauaauaaaucugguagaaaaaugagaucuaaaaaaaaaaaaaaaaaaaaaaaaaaaaaaaaaaaaaaaaaaaaaaaaaaaaaaaaaaaaaaaaugcaucccccccccccccccccccccccccccccccaaaggcucuuuucagagccaccagaauu

SEQ ID NO: 13312 - RNA, 640 nt, Artificial Sequence
  mRNA product Design b-4 comprising derived and/or modified sequence from LASV(ISTH2010-NIG-2012;Clade II)__AIT17480__Z (opt4)
gggagagucccgcagucggcguccagcggcucugcuuguucgugugugugucguugcaggccuuauucaagcuuaccaugggcaacagacacgccaagagcaccaagguggacgagcaccagagagcccaccuggugcccgacgccagccaccugggcccccaguucugcaagagcugcugguucgagaacagaggccugguggagugcaacaaccacuaccugugccugaacugccugagccugcugcugagcgugagcagcagaugccccaucugcaagaugccccugcccaccaagcugaaggccgccgcccagcccagcgcccccagcaccgaggugauccagagcaccacccccccccccuacacccccugaggacuaguaauaaggaaacuguaugaaugucugugggcaggaagugaagagauccuucuguaaagguuuuuggaauuaugucugcugaauaauaaacuuuuuugaaauaauaaaucugguagaaaaaugagaucuaaaaaaaaaaaaaaaaaaaaaaaaaaaaaaaaaaaaaaaaaaaaaaaaaaaaaaaaaaaaaaaaugcaucccccccccccccccccccccccccccccccaaaggcucuuuucagagccaccagaauu

SEQ ID NO: 13313 - RNA, 640 nt, Artificial Sequence
  mRNA product Design b-4 comprising derived and/or modified sequence from LASV(Lassa virus/H.sapiens-wt/NGA/2016/ISTH_0017;Clade II)__AVO03713__Z (opt4)
gggagagucccgcagucggcguccagcggcucugcuuguucgugugugugucguugcaggccuuauucaagcuuaccaugggcaacagacaggccaagagcaccaagguggacgagcaccagagagcccaccuggugcccgacgccagccaccugggcccccaguucugcaagagcugcugguucgagaacagaggccugguggagugcaacaaccacuaccugugccugaacugccugagccugcugcugagcgugagcagcagaugccccaucugcaagaugccccugcccaccaagcugaaggccgccacccagcccagcgcccccagcaccgaggugaaccagaacaccacccccccccccuacacccccugaggacuaguaauaaggaaacuguaugaaugucugugggcaggaagugaagagauccuucuguaaagguuuuuggaauuaugucugcugaauaauaaacuuuuuugaaauaauaaaucugguagaaaaaugagaucuaaaaaaaaaaaaaaaaaaaaaaaaaaaaaaaaaaaaaaaaaaaaaaaaaaaaaaaaaaaaaaaaugcaucccccccccccccccccccccccccccccccaaaggcucuuuucagagccaccagaauu

SEQ ID NO: 13314 - RNA, 640 nt, Artificial Sequence
  mRNA product Design b-4 comprising derived and/or modified sequence from LASV(Lassa virus/H.sapiens-wt/NGA/2018/ISTH_0959;Clade II)__AVV65084__Z (opt4)
gggagagucccgcagucggcguccagcggcucugcuuguucgugugugugucguugcaggccuuauucaagcuuaccaugggcaacaagcaggccaagagcaccaagguggacgagcaccagagagcccaccuggugcccgacgccagccaccugggcccccaguucugcaagagcugcugguucgagaacagaggccugguggagugcaacaaccacuaccugugccugaacugccugagccugcugcugagcgugagcagcagaugccccaucugcaagaugccccugcccaccaagcugaaggccgccgcccagcccagcgcccccagcaccgaggccauccagagcaccacccccccccccuacacccccugaggacuaguaauaaggaaacuguaugaaugucugugggcaggaagugaagagauccuucuguaaagguuuuuggaauuaugucugcugaauaauaaacuuuuuugaaauaauaaaucugguagaaaaaugagaucuaaaaaaaaaaaaaaaaaaaaaaaaaaaaaaaaaaaaaaaaaaaaaaaaaaaaaaaaaaaaaaaaugcaucccccccccccccccccccccccccccccccaaaggcucuuuucagagccaccagaauu

SEQ ID NO: 13315 - RNA, 640 nt, Artificial Sequence
  mRNA product Design b-4 comprising derived and/or modified sequence from LASV(LASV003-NIG-2008;Clade II)__AIT17578__Z (opt4)
gggagagucccgcagucggcguccagcggcucugcuuguucgugugugugucguugcaggccuuauucaagcuuaccaugggcaacagacaggccaagagcaccaagguggacgagcaccagagagcccaccuggugcccgacgccagccaccugggcccccaguucugcaagagcugcugguucgagaacaagggccugguggagugcaacaaccacuaccugugccugaacugccugagccugcugcugagcgugagcagcagaugccccaucugcaagaugccccugcccaccaagcugagagccgccgcccagcccagcgcccccagcaccgagagcgcccagaacaccgcccccccccccuacgcccccugaggacuaguaauaaggaaacuguaugaaugucugugggcaggaagugaagagauccuucuguaaagguuuuuggaauuaugucugcugaauaauaaacuuuuuugaaauaauaaaucugguagaaaaaugagaucuaaaaaaaaaaaaaaaaaaaaaaaaaaaaaaaaaaaaaaaaaaaaaaaaaaaaaaaaaaaaaaaaugcaucccccccccccccccccccccccccccccccaaaggcucuuuucagagccaccagaauu

SEQ ID NO: 13316 - RNA, 640 nt, Artificial Sequence
  mRNA product Design b-4 comprising derived and/or modified sequence from LASV(LASV035-NIG-2009;Clade II)__AIT17586__Z (opt4)
gggagagucccgcagucggcguccagcggcucugcuuguucgugugugugucguugcaggccuuauucaagcuuaccaugggcaacaagcaggccaagagcaccaagguggacgagcaccagagagcccaccuggugcccgacgccagccaccugggcccccaguucugcaagagcugcugguucgagaacagaggccugguggagugcaacaaccacuaccugugccugaacugccugagccugcugcugagcgugagcagcagaugccccaucugcaagaugccccugcccaccagacugaaggccgccgcccagcccagcgcccccagcaccgaggugacccagaacaccacccccccccccuacacccccugaggacuaguaauaaggaaacuguaugaaugucugugggcaggaagugaagagauccuucuguaaagguuuuuggaauuaugucugcugaauaauaaacuuuuuugaaauaauaaaucugguagaaaaaugagaucuaaaaaaaaaaaaaaaaaaaaaaaaaaaaaaaaaaaaaaaaaaaaaaaaaaaaaaaaaaaaaaaaugcaucccccccccccccccccccccccccccccccaaaggcucuuuucagagccaccagaauu

SEQ ID NO: 13317 - RNA, 640 nt, Artificial Sequence
  mRNA product Design b-4 comprising derived and/or modified sequence from LASV(LASV1000-NIG-2009;Clade II)__AIT17780__Z (opt4)
gggagagucccgcagucggcguccagcggcucugcuuguucgugugugugucguugcaggccuuauucaagcuuaccaugggcaacagacagaccaagagcaccaagguggacgagcaccagagagccuaccuggugcccgacgccagccugcugggcccccaguucugcaagagcugcugguucgagaacaagggccugguggagugcaacaaccacuaccugugccugaacugccugagccugcugcugagcgugagcagcagaugccccaucugcaagaugccccugcccaccagacugaaggccgccgcccagcccagcgccccccccaccgaggccauccagaacaccacccccccccccuacacccccugaggacuaguaauaaggaaacuguaugaaugucugugggcaggaagugaagagauccuucuguaaagguuuuuggaauuaugucugcugaauaauaaacuuuuuugaaauaauaaaucugguagaaaaaugagaucuaaaaaaaaaaaaaaaaaaaaaaaaaaaaaaaaaaaaaaaaaaaaaaaaaaaaaaaaaaaaaaaaugcaucccccccccccccccccccccccccccccccaaaggcucuuuucagagccaccagaauu

SEQ ID NO: 13318 - RNA, 640 nt, Artificial Sequence
  mRNA product Design b-4 comprising derived and/or modified sequence from LASV(LASV221-NIG-2010;Clade II)__AIT17622__Z (opt4)
gggagagucccgcagucggcguccagcggcucugcuuguucgugugugugucguugcaggccuuauucaagcuuaccaugggcaacagacaggccaagagcaccaagguggacgagcaccagagagcccaccuggugcccgacgccagccaccugggcccccaguucugcaagagcugcugguucgagaacagaggccugguggagugcaacaaccacuaccugugccugaacugccugagccugcugcugagcgugagcagcagaugccccaucugcaagaugccccugcccaccaagcugaaggccgccacccagcccagcgcccccagcaccgaggugacccagaacaccauccccccccccuacagccccugaggacuaguaauaaggaaacuguaugaaugucugugggcaggaagugaagagauccuucuguaaagguuuuuggaauuaugucugcugaauaauaaacuuuuuugaaauaauaaaucugguagaaaaaugagaucuaaaaaaaaaaaaaaaaaaaaaaaaaaaaaaaaaaaaaaaaaaaaaaaaaaaaaaaaaaaaaaaaugcaucccccccccccccccccccccccccccccccaaaggcucuuuucagagccaccagaauu

SEQ ID NO: 13319 - RNA, 640 nt, Artificial Sequence
  mRNA product Design b-4 comprising derived and/or modified sequence from LASV(LASV237-NIG-2010;Clade II)__AIT17636__Z (opt4)
gggagagucccgcagucggcguccagcggcucugcuuguucgugugugugucguugcaggccuuauucaagcuuaccaugggcaacagacaggccaagagcaccaagguggacgagcaccagagagcccaccuggugcccgacgccagccaccugggcccccaguucugcaagagcugcugguucgagaacagaggccugguggagugcaacaaccacuaccugugccugaacugccugagccugcugcugagcgugagcagcagaugccccaucugcaagaugccccugcccaccaagcugaaggccgccgcccagcccagcgcccccagcaucgagaccauccagaacaccacccccccccccuacacccccugaggacuaguaauaaggaaacuguaugaaugucugugggcaggaagugaagagauccuucuguaaagguuuuuggaauuaugucugcugaauaauaaacuuuuuugaaauaauaaaucugguagaaaaaugagaucuaaaaaaaaaaaaaaaaaaaaaaaaaaaaaaaaaaaaaaaaaaaaaaaaaaaaaaaaaaaaaaaaugcaucccccccccccccccccccccccccccccccaaaggcucuuuucagagccaccagaauu

SEQ ID NO: 13320 - RNA, 640 nt, Artificial Sequence
  mRNA product Design b-4 comprising derived and/or modified sequence from LASV(LASV253-NIG-2011;Clade II)__AIT17668__Z (opt4)
gggagagucccgcagucggcguccagcggcucugcuuguucgugugugugucguugcaggccuuauucaagcuuaccaugggcaacagacaggccaagagcaccaagguggacgagcaccagagagcccaccuggugcccgacgccagccaccugggcccccaguucugcaagagcugcugguucgagaacaagggccugguggagugcaacaaccacuaccugugccugaacugccugagccugcugcugagcgugagcagcagaugccccaucugcaagaugccccugcccaccaagcugaagaccaccgcccagcccagcgccccccccaccgaggccgccaagaacaccgcccccccccccuacgcccccugaggacuaguaauaaggaaacuguaugaaugucugugggcaggaagugaagagauccuucuguaaagguuuuuggaauuaugucugcugaauaauaaacuuuuuugaaauaauaaaucugguagaaaaaugagaucuaaaaaaaaaaaaaaaaaaaaaaaaaaaaaaaaaaaaaaaaaaaaaaaaaaaaaaaaaaaaaaaaugcaucccccccccccccccccccccccccccccccaaaggcucuuuucagagccaccagaauu

SEQ ID NO: 13321 - RNA, 640 nt, Artificial Sequence
  mRNA product Design b-4 comprising derived and/or modified sequence from LASV(G1180-SLE-2010;Clade IV)__AIT17166__Z (opt4)
gggagagucccgcagucggcguccagcggcucugcuuguucgugugugugucguugcaggccuuauucaagcuuaccaugggcaacaagcaggccaaggcccccgaggccaaggacagccccagagccagccugauccccgacgccacccaccugggcccccaguucugcaagagcugcugguucgagaccaagggccugguggagugcaacaaccacuaccugugccugaacugccugacccugcugcugagcgugagcaacagaugccccaucugcaagaugccccugcccaccaagcugagacccagcgccacccccaccgccccccccaccgaggccgccgacagcaucggccccccccccuacagccccugaggacuaguaauaaggaaacuguaugaaugucugugggcaggaagugaagagauccuucuguaaagguuuuuggaauuaugucugcugaauaauaaacuuuuuugaaauaauaaaucugguagaaaaaugagaucuaaaaaaaaaaaaaaaaaaaaaaaaaaaaaaaaaaaaaaaaaaaaaaaaaaaaaaaaaaaaaaaaugcaucccccccccccccccccccccccccccccccaaaggcucuuuucagagccaccagaauu

SEQ ID NO: 13322 - RNA, 640 nt, Artificial Sequence
  mRNA product Design b-4 comprising derived and/or modified sequence from LASV(G1442-SLE-2011;Clade IV)__AIT17178__Z (opt4)
gggagagucccgcagucggcguccagcggcucugcuuguucgugugugugucguugcaggccuuauucaagcuuaccaugggcaacaagcaggccaaggccagcgaggccaaggacagccccagagccagccugauccccgacgccacccaccugggcccccaguucugcaagagcugcugguucgagaacaagggccugguggagugcaacaaccacuaccugugccugaacugccugagccugcugcugagcgugagcagcagaugccccaucugcaagaugccccugcccaccagacugagacccagcaccgcccccaccgccccccccgccagagccggcgacaacaucaagcccccccccuacagccccugaggacuaguaauaaggaaacuguaugaaugucugugggcaggaagugaagagauccuucuguaaagguuuuuggaauuaugucugcugaauaauaaacuuuuuugaaauaauaaaucugguagaaaaaugagaucuaaaaaaaaaaaaaaaaaaaaaaaaaaaaaaaaaaaaaaaaaaaaaaaaaaaaaaaaaaaaaaaaugcaucccccccccccccccccccccccccccccccaaaggcucuuuucagagccaccagaauu

SEQ ID NO: 13323 - RNA, 640 nt, Artificial Sequence
  mRNA product Design b-4 comprising derived and/or modified sequence from LASV(G502-SLE-2009;Clade IV)__AIT17124__Z (opt4)
gggagagucccgcagucggcguccagcggcucugcuuguucgugugugugucguugcaggccuuauucaagcuuaccaugggcaacaagcaggugaagacccccgaggccaaggacagccccagagccagccugauccccgacgccacccaccugggcccccaguucugcaagagcugcugguucgagaacaagggccugguggagugcaacaaccacuaccugugccugaacugccugacccugcugcugagcgugggcaacagaugccccaucugcaagaugccccugcccaccaagcugagacccagcgugacccccaccgccccccccaccagagccgccgacagcaucggccccccccccuacagccccugaggacuaguaauaaggaaacuguaugaaugucugugggcaggaagugaagagauccuucuguaaagguuuuuggaauuaugucugcugaauaauaaacuuuuuugaaauaauaaaucugguagaaaaaugagaucuaaaaaaaaaaaaaaaaaaaaaaaaaaaaaaaaaaaaaaaaaaaaaaaaaaaaaaaaaaaaaaaaugcaucccccccccccccccccccccccccccccccaaaggcucuuuucagagccaccagaauu

SEQ ID NO: 13324 - RNA, 640 nt, Artificial Sequence
  mRNA product Design b-4 comprising derived and/or modified sequence from LASV(G733-SLE-2010;Clade IV)__AIT17152__Z (opt4)
gggagagucccgcagucggcguccagcggcucugcuuguucgugugugugucguugcaggccuuauucaagcuuaccaugggcaacaagcaggccaagacccccgagaccaaggacagccccagagccagccugauccccgacgccacccaccugggcccccaguucugcaagagcugcugguucgagaacaagggccugguggagugcaacaaccacuaccugugccugaacugccugacccugcugcugagcgugagcaacagaugccccaucugcaagaugccccugcccaccaagcugagacccagcaccgcccccaccgccccccccgccggcgccgccgacaacaccagacccccccccuacagccccugaggacuaguaauaaggaaacuguaugaaugucugugggcaggaagugaagagauccuucuguaaagguuuuuggaauuaugucugcugaauaauaaacuuuuuugaaauaauaaaucugguagaaaaaugagaucuaaaaaaaaaaaaaaaaaaaaaaaaaaaaaaaaaaaaaaaaaaaaaaaaaaaaaaaaaaaaaaaaugcaucccccccccccccccccccccccccccccccaaaggcucuuuucagagccaccagaauu

SEQ ID NO: 13325 - RNA, 652 nt, Artificial Sequence
  mRNA product Design b-4 comprising derived and/or modified sequence from MOPV/LASV reassortant(IGS-1;Clade IV)__AFY05533__Z (opt4)
gggagagucccgcagucggcguccagcggcucugcuuguucgugugugugucguugcaggccuuauucaagcuuaccaugggcaagacccagagcaagggccagcccagcaccaaccugcugaaggagaccgagcccagacaccccgugauccccgacgccagaggcaccggccccgaguucugcaagagcugcugguucgagagaagaggccuggugagaugcaacgaccacuaccugugccugaacugccugacccugcugcacaccgugagcgacagaugccccaucugcaagcacaagcugcccuucagacuggagcugcagacccagcccaccgccccccccgagaucccccccagccagaaccccccccccuacagccccugaggacuaguaauaaggaaacuguaugaaugucugugggcaggaagugaagagauccuucuguaaagguuuuuggaauuaugucugcugaauaauaaacuuuuuugaaauaauaaaucugguagaaaaaugagaucuaaaaaaaaaaaaaaaaaaaaaaaaaaaaaaaaaaaaaaaaaaaaaaaaaaaaaaaaaaaaaaaaugcaucccccccccccccccccccccccccccccccaaaggcucuuuucagagccaccagaauu

SEQ ID NO: 13326 - RNA, 640 nt, Artificial Sequence
  mRNA product Design b-4 comprising derived and/or modified sequence from LASV(LM776-SLE-2012;Clade IV)__AIT17824__Z (opt4)
gggagagucccgcagucggcguccagcggcucugcuuguucgugugugugucguugcaggccuuauucaagcuuaccaugggcaacaagcaggccaaggccagcgaggagaagaacagccccagagccagccugauccccgacgccacccaccugggcccccaguucugcaagagcugcugguucgagaacaagggccugguggagugcaacaaccacuaccugugccugaacugccugacccugcugcugagcgugagcaacagaugccccaucugcaagaugccccugcccaccaagcugagacccagcaccacccccaccgccccccccaccggcgccgccgacagcaucagacccccccccuacagccccugaggacuaguaauaaggaaacuguaugaaugucugugggcaggaagugaagagauccuucuguaaagguuuuuggaauuaugucugcugaauaauaaacuuuuuugaaauaauaaaucugguagaaaaaugagaucuaaaaaaaaaaaaaaaaaaaaaaaaaaaaaaaaaaaaaaaaaaaaaaaaaaaaaaaaaaaaaaaaugcaucccccccccccccccccccccccccccccccaaaggcucuuuucagagccaccagaauu

SEQ ID NO: 13327 - RNA, 640 nt, Artificial Sequence
  mRNA product Design b-4 comprising derived and/or modified sequence from LASV(Mad39;Clade IV)__ANH09743__Z (opt4)
gggagagucccgcagucggcguccagcggcucugcuuguucgugugugugucguugcaggccuuauucaagcuuaccaugggcaacaagcaggccaaggccagcgagguggaggacggccccagagccagccugauccccgacgccacccaccugggcccccaguucugcaagagcugcugguucgagaacaagagccugguggagugcaacaaccacuaccugugccugaacugccugacccugcugcugagcgugagcaacagaugccccaucugcaagaugccccugcccaccagacugaagcccagcguggugcccaccgccccccccaccagagccggcgacggcaccagacccccccccuacagccccugaggacuaguaauaaggaaacuguaugaaugucugugggcaggaagugaagagauccuucuguaaagguuuuuggaauuaugucugcugaauaauaaacuuuuuugaaauaauaaaucugguagaaaaaugagaucuaaaaaaaaaaaaaaaaaaaaaaaaaaaaaaaaaaaaaaaaaaaaaaaaaaaaaaaaaaaaaaaaugcaucccccccccccccccccccccccccccccccaaaggcucuuuucagagccaccagaauu

SEQ ID NO: 13328 - RNA, 640 nt, Artificial Sequence
  mRNA product Design b-4 comprising derived and/or modified sequence from LASV(Z0947-SLE-2011;Clade IV)__AIT17838__Z (opt4)
gggagagucccgcagucggcguccagcggcucugcuuguucgugugugugucguugcaggccuuauucaagcuuaccaugggcaacaagcaggccaaggugcccgagagcaaggacagccccagagccagccugauccccgacgccacccaccugggcccccaguucugcaagagcugcugguucgagaacaagggccugguggagugcaacaaccacuaccugugccugaacugccugacccugcugcugagcgugagcaacagaugccccaucugcaagaugccccugcccaccaagcugaagcccagcgccgcccccaccgccccccccaccggcgccgccgacagcaucagacccccccccuacagccccugaggacuaguaauaaggaaacuguaugaaugucugugggcaggaagugaagagauccuucuguaaagguuuuuggaauuaugucugcugaauaauaaacuuuuuugaaauaauaaaucugguagaaaaaugagaucuaaaaaaaaaaaaaaaaaaaaaaaaaaaaaaaaaaaaaaaaaaaaaaaaaaaaaaaaaaaaaaaaugcaucccccccccccccccccccccccccccccccaaaggcucuuuucagagccaccagaauu

SEQ ID NO: 13329 - RNA, 640 nt, Artificial Sequence
  mRNA product Design b-4 comprising derived and/or modified sequence from LASV(Josiah;Clade IV)__ADY11072/NP_694871__Z (opt5)
gggagagucccgcagucggcguccagcggcucugcuuguucgugugugugucguugcaggccuuauucaagcuuaccaugggcaacaagcaggccaaagcucccgagagcaaggacuccccuagagccucucugaucccggaugcgacccaccucgggccccaauucugcaaaagcuguugguuugaaaauaagggacugguggagugcaacaaucauuaccuuugucugaacugccucacacugcuucuguccgucucuaaucgguguccuauuugcaaaaugccccucccuacgaagcugcgccccagcgcugccccuaccgccccgcccacaggcgcugccgacuccaucagaccucccccuuauucucccugaggacuaguaauaaggaaacuguaugaaugucugugggcaggaagugaagagauccuucuguaaagguuuuuggaauuaugucugcugaauaauaaacuuuuuugaaauaauaaaucugguagaaaaaugagaucuaaaaaaaaaaaaaaaaaaaaaaaaaaaaaaaaaaaaaaaaaaaaaaaaaaaaaaaaaaaaaaaaugcaucccccccccccccccccccccccccccccccaaaggcucuuuucagagccaccagaauu

SEQ ID NO: 13330 - RNA, 643 nt, Artificial Sequence
  mRNA product Design b-4 comprising derived and/or modified sequence from LASV(Pinneo-NIG-1969;Clade I)__AIT17834__Z (opt5)
gggagagucccgcagucggcguccagcggcucugcuuguucgugugugugucguugcaggccuuauucaagcuuaccaugggcaacaagcagaccagaagcccucccaaaccggagcacccccggccuacacugcuccccgacgccucccaucuggggccucaauucugcaagucuuguugguuugaaaauaaaggacuuguggagugcaacaaucacuaccugugucucaacugccugacgcuucugcucagcgucuccgaucgcugucccaucugcaagaugccucugccgaccaaacuggcuguuagaacacagcccucugccccuccccucaaucagggcaacacccagagcuccccucccccguauucuccuugaggacuaguaauaaggaaacuguaugaaugucugugggcaggaagugaagagauccuucuguaaagguuuuuggaauuaugucugcugaauaauaaacuuuuuugaaauaauaaaucugguagaaaaaugagaucuaaaaaaaaaaaaaaaaaaaaaaaaaaaaaaaaaaaaaaaaaaaaaaaaaaaaaaaaaaaaaaaaugcaucccccccccccccccccccccccccccccccaaaggcucuuuucagagccaccagaauu

SEQ ID NO: 13331 - RNA, 640 nt, Artificial Sequence
  mRNA product Design b-4 comprising derived and/or modified sequence from LASV(Nig08-04;Clade II)__ADU56612__Z (opt5)
gggagagucccgcagucggcguccagcggcucugcuuguucgugugugugucguugcaggccuuauucaagcuuaccaugggcaacagacagacccggcccacagaggccacggaacaaagccgcgcccaccuggugccugacgccucccaucucgggccgcaguucugcaagucuuguugguuugagaauagaggacuggucgaaugcaacaaucacuaccuuugucugaacugccucagccugcuucuguccguuucuagccggugucccaucugcaaaaugccucuccccacccgccugaaggcguccgcucagccuucugcucccccuacagaggccccgcagaauaccacacccccucccuauaccccuugaggacuaguaauaaggaaacuguaugaaugucugugggcaggaagugaagagauccuucuguaaagguuuuuggaauuaugucugcugaauaauaaacuuuuuugaaauaauaaaucugguagaaaaaugagaucuaaaaaaaaaaaaaaaaaaaaaaaaaaaaaaaaaaaaaaaaaaaaaaaaaaaaaaaaaaaaaaaaugcaucccccccccccccccccccccccccccccccaaaggcucuuuucagagccaccagaauu

SEQ ID NO: 13332 - RNA, 640 nt, Artificial Sequence
  mRNA product Design b-4 comprising derived and/or modified sequence from LASV(Nig08-A19;Clade III)__ADU56620__Z (opt5)
gggagagucccgcagucggcguccagcggcucugcuuguucgugugugugucguugcaggccuuauucaagcuuaccaugggcgggaagcacaccaaaccccagagagagagcaacuccccucgggccucucugaucccggacgcuacacaucucggaccccaauucugcaagagcuguugguuugaaaauaaaggccugguggagugcaacaaucacuaccuuugucugaacugccucacgcugcuucuguccgucucuaaucgcuguccuauuugcaagaugccccucccuaccagacugcgggccagcacaaaccccaccgcgccucagguugaacagguggggccgacaaaucccccucccuauuccccuugaggacuaguaauaaggaaacuguaugaaugucugugggcaggaagugaagagauccuucuguaaagguuuuuggaauuaugucugcugaauaauaaacuuuuuugaaauaauaaaucugguagaaaaaugagaucuaaaaaaaaaaaaaaaaaaaaaaaaaaaaaaaaaaaaaaaaaaaaaaaaaaaaaaaaaaaaaaaaugcaucccccccccccccccccccccccccccccccaaaggcucuuuucagagccaccagaauu

SEQ ID NO: 13333 - RNA, 640 nt, Artificial Sequence
  mRNA product Design b-4 comprising derived and/or modified sequence from LASV(AV;Clade V)__CCA30312__Z (opt5)
gggagagucccgcagucggcguccagcggcucugcuuguucgugugugugucguugcaggccuuauucaagcuuaccaugggcaacagacaggccaagaaucccgagguggaaaacagcccucgggcuucccugaucccggacgccacccaccucgggccccaauucugcaaaucuuguugguuugagaauaagggacuggucgaaugcaacaaucauuaccuuugucugaacugccucagccugcuucuguccguuucuaaucgcuguccuauuugcaaaaugccccucccuacaagacugcggcccacgaccacaccuaccgcgccgcagaucauuaaggagaacacaaccaaucccccucccuauacaccuugaggacuaguaauaaggaaacuguaugaaugucugugggcaggaagugaagagauccuucuguaaagguuuuuggaauuaugucugcugaauaauaaacuuuuuugaaauaauaaaucugguagaaaaaugagaucuaaaaaaaaaaaaaaaaaaaaaaaaaaaaaaaaaaaaaaaaaaaaaaaaaaaaaaaaaaaaaaaaugcaucccccccccccccccccccccccccccccccaaaggcucuuuucagagccaccagaauu

SEQ ID NO: 13334 - RNA, 640 nt, Artificial Sequence
  mRNA product Design b-4 comprising derived and/or modified sequence from LASV(Togo/2016/7082;Clade VI)__AMR44579__Z (opt5)
gggagagucccgcagucggcguccagcggcucugcuuguucgugugugugucguugcaggccuuauucaagcuuaccaugggcgccagacagaccaagcaaccccagaucgaggggagcccucgggcuucccuggugccggacgccucucaccucggaccccaguucugcaaaagcuguugguuugaaaacaagggccuggucgagugcaauaaccauuaccuuugucugaauugccucucccugcuucugucuguuagcaaccgcuguccuauuugcaaaaugccccucccuacaaagcugagaguguccucugcgcccagcgcuccuccggccgccacggcucagcccgggaccccucccccuuauucccccugaggacuaguaauaaggaaacuguaugaaugucugugggcaggaagugaagagauccuucuguaaagguuuuuggaauuaugucugcugaauaauaaacuuuuuugaaauaauaaaucugguagaaaaaugagaucuaaaaaaaaaaaaaaaaaaaaaaaaaaaaaaaaaaaaaaaaaaaaaaaaaaaaaaaaaaaaaaaaugcaucccccccccccccccccccccccccccccccaaaggcucuuuucagagccaccagaauu

SEQ ID NO: 13335 - RNA, 640 nt, Artificial Sequence
  mRNA product Design b-4 comprising derived and/or modified sequence from LASV(KAK-428;Clade n.d. (VII))__ANH09761__Z (opt5)
gggagagucccgcagucggcguccagcggcucugcuuguucgugugugugucguugcaggccuuauucaagcuuaccaugggcaacaaggggaccaaacccacacagaauagcgagccuuccagagccaaccuggugccggacgcuucuuaccucggaccccaauucugcaagagcuguugguuugaaaauaaaggccuggucgagugcaacaaucacuaucuuugucugaacugccucacgaugcugcuuuccguuuccaaucgguguccuaucugcaagaugccccugccuaccaaaauuaaggccagcgggucccccucugcgccuccgacagaagcuaacagcgccgugucucccccucccuacaccccuugaggacuaguaauaaggaaacuguaugaaugucugugggcaggaagugaagagauccuucuguaaagguuuuuggaauuaugucugcugaauaauaaacuuuuuugaaauaauaaaucugguagaaaaaugagaucuaaaaaaaaaaaaaaaaaaaaaaaaaaaaaaaaaaaaaaaaaaaaaaaaaaaaaaaaaaaaaaaaugcaucccccccccccccccccccccccccccccccaaaggcucuuuucagagccaccagaauu

SEQ ID NO: 13336 - RNA, 640 nt, Artificial Sequence
  mRNA product Design b-4 comprising derived and/or modified sequence from LASV(ISTH0009-NIG-2011;Clade II)__AIT17402__Z (opt5)
gggagagucccgcagucggcguccagcggcucugcuuguucgugugugugucguugcaggccuuauucaagcuuaccaugggcaacagacaggccaagagcaccaaaguggacgagcaccaacgggcucaucugguccccgaugccucccaccucgggccucaguucugcaagucuuguugguuugaaaaucgcggacugguugagugcaacaaucauuaccuuugucugaacugccucagccugcuucuguccgugucuagcagauguccgaucugcaaaaugccccucccuacaaagcugaaagcggcugcccagcccuccgccccuucuacggaaaccauucagaauacaacacccccuccguauacccccugaggacuaguaauaaggaaacuguaugaaugucugugggcaggaagugaagagauccuucuguaaagguuuuuggaauuaugucugcugaauaauaaacuuuuuugaaauaauaaaucugguagaaaaaugagaucuaaaaaaaaaaaaaaaaaaaaaaaaaaaaaaaaaaaaaaaaaaaaaaaaaaaaaaaaaaaaaaaaugcaucccccccccccccccccccccccccccccccaaaggcucuuuucagagccaccagaauu

SEQ ID NO: 13337 - RNA, 640 nt, Artificial Sequence
  mRNA product Design b-4 comprising derived and/or modified sequence from LASV(ISTH2010-NIG-2012;Clade II)__AIT17480__Z (opt5)
gggagagucccgcagucggcguccagcggcucugcuuguucgugugugugucguugcaggccuuauucaagcuuaccaugggcaacagacacgccaagagcaccaaaguggacgagcaucagcgggcucaccugguccccgaugccucccaucucgggccucaauucugcaagucuuguugguuugaaaaucgcggacugguugagugcaacaaucacuaccuuugucugaacugccucagccugcuucuguccgugucuagcagauguccgaucugcaaaaugccccucccuacaaagcugaaagcggcugcccagcccuccgccccuucuacggaagugauucagagcaccacacccccuccguauacccccugaggacuaguaauaaggaaacuguaugaaugucugugggcaggaagugaagagauccuucuguaaagguuuuuggaauuaugucugcugaauaauaaacuuuuuugaaauaauaaaucugguagaaaaaugagaucuaaaaaaaaaaaaaaaaaaaaaaaaaaaaaaaaaaaaaaaaaaaaaaaaaaaaaaaaaaaaaaaaugcaucccccccccccccccccccccccccccccccaaaggcucuuuucagagccaccagaauu

SEQ ID NO: 13338 - RNA, 640 nt, Artificial Sequence
  mRNA product Design b-4 comprising derived and/or modified sequence from LASV(Lassa virus/H.sapiens-wt/NGA/2016/ISTH_0017;Clade II)__AVO03713__Z (opt5)
gggagagucccgcagucggcguccagcggcucugcuuguucgugugugugucguugcaggccuuauucaagcuuaccaugggcaacagacaggccaagagcaccaaaguggacgagcaccaacgggcucaucugguccccgaugccucccaccucgggccucaguucugcaagucuuguugguuugaaaaucgcggacugguugagugcaacaaucauuaccuuugucugaacugccucagccugcuucuguccgugucuagcagauguccgaucugcaaaaugccccucccuacaaagcugaaagcggcuacgcagcccuccgccccuucuaccgaagugaaucagaacacaacacccccuccguauacccccugaggacuaguaauaaggaaacuguaugaaugucugugggcaggaagugaagagauccuucuguaaagguuuuuggaauuaugucugcugaauaauaaacuuuuuugaaauaauaaaucugguagaaaaaugagaucuaaaaaaaaaaaaaaaaaaaaaaaaaaaaaaaaaaaaaaaaaaaaaaaaaaaaaaaaaaaaaaaaugcaucccccccccccccccccccccccccccccccaaaggcucuuuucagagccaccagaauu

SEQ ID NO: 13339 - RNA, 640 nt, Artificial Sequence
  mRNA product Design b-4 comprising derived and/or modified sequence from LASV(Lassa virus/H.sapiens-wt/NGA/2018/ISTH_0959;Clade II)__AVV65084__Z (opt5)
gggagagucccgcagucggcguccagcggcucugcuuguucgugugugugucguugcaggccuuauucaagcuuaccaugggcaacaagcaggccaaaagcaccaagguggacgagcaccaaagagcucaucugguccccgaugccucccaccucgggccucaguucugcaaaucuuguugguuugaaaaucggggacugguugagugcaacaaucauuaccuuugucugaacugccucagccugcuucuguccgugucuagccgcuguccgaucugcaagaugccccucccuacaaaacugaaggcggcugcccagcccuccgccccuucuacggaagcuauucagagcaccacacccccuccguauacccccugaggacuaguaauaaggaaacuguaugaaugucugugggcaggaagugaagagauccuucuguaaagguuuuuggaauuaugucugcugaauaauaaacuuuuuugaaauaauaaaucugguagaaaaaugagaucuaaaaaaaaaaaaaaaaaaaaaaaaaaaaaaaaaaaaaaaaaaaaaaaaaaaaaaaaaaaaaaaaugcaucccccccccccccccccccccccccccccccaaaggcucuuuucagagccaccagaauu

SEQ ID NO: 13340 - RNA, 640 nt, Artificial Sequence
  mRNA product Design b-4 comprising derived and/or modified sequence from LASV(LASV003-NIG-2008;Clade II)__AIT17578__Z (opt5)
gggagagucccgcagucggcguccagcggcucugcuuguucgugugugugucguugcaggccuuauucaagcuuaccaugggcaacagacaggccaagagcaccaaaguggacgagcaccaacgggcucaucugguccccgaugccucccaccucgggccucaguucugcaagucuuguugguuugaaaauaaaggacugguugagugcaacaaucauuaccuuugucugaacugccucagccugcuucuguccgugucuagccgcuguccgaucugcaagaugccccucccuacaaaacugagagcggcugcccagcccuccgccccuucuacggaaagcgcucagaauaccgcucccccuccguaugcccccugaggacuaguaauaaggaaacuguaugaaugucugugggcaggaagugaagagauccuucuguaaagguuuuuggaauuaugucugcugaauaauaaacuuuuuugaaauaauaaaucugguagaaaaaugagaucuaaaaaaaaaaaaaaaaaaaaaaaaaaaaaaaaaaaaaaaaaaaaaaaaaaaaaaaaaaaaaaaaugcaucccccccccccccccccccccccccccccccaaaggcucuuuucagagccaccagaauu

SEQ ID NO: 13341 - RNA, 640 nt, Artificial Sequence
  mRNA product Design b-4 comprising derived and/or modified sequence from LASV(LASV035-NIG-2009;Clade II)__AIT17586__Z (opt5)
gggagagucccgcagucggcguccagcggcucugcuuguucgugugugugucguugcaggccuuauucaagcuuaccaugggcaacaagcaggccaaaagcaccaagguggacgagcaccaaagagcucaucugguccccgaugccucccaccucgggccucaguucugcaaaucuuguugguuugaaaaucggggacugguugagugcaacaaucauuaccuuugucugaacugccucagccugcuucuguccgugucuagccgcuguccgaucugcaagaugccccucccuacaagacugaaagcggcugcccagcccuccgccccuucuacggaagugacccagaauacaacacccccuccguauacccccugaggacuaguaauaaggaaacuguaugaaugucugugggcaggaagugaagagauccuucuguaaagguuuuuggaauuaugucugcugaauaauaaacuuuuuugaaauaauaaaucugguagaaaaaugagaucuaaaaaaaaaaaaaaaaaaaaaaaaaaaaaaaaaaaaaaaaaaaaaaaaaaaaaaaaaaaaaaaaugcaucccccccccccccccccccccccccccccccaaaggcucuuuucagagccaccagaauu

SEQ ID NO: 13342 - RNA, 640 nt, Artificial Sequence
  mRNA product Design b-4 comprising derived and/or modified sequence from LASV(LASV1000-NIG-2009;Clade II)__AIT17780__Z (opt5)
gggagagucccgcagucggcguccagcggcucugcuuguucgugugugugucguugcaggccuuauucaagcuuaccaugggcaacagacagaccaagagcacaaaaguggacgagcaccaacgggccuaccugguccccgaugcuucccuccuggggccucaguucugcaagucuuguugguuugaaaauaaaggacuuguugagugcaacaaucauuaucugugucucaacugccugagccuucugcucuccgugucuagccgcuguccgaucugcaagaugccccugccuacgagacugaaagccgcggcucagcccuccgccccucccaccgaagccauucagaauacaaccccuccgcccuacacaccuugaggacuaguaauaaggaaacuguaugaaugucugugggcaggaagugaagagauccuucuguaaagguuuuuggaauuaugucugcugaauaauaaacuuuuuugaaauaauaaaucugguagaaaaaugagaucuaaaaaaaaaaaaaaaaaaaaaaaaaaaaaaaaaaaaaaaaaaaaaaaaaaaaaaaaaaaaaaaaugcaucccccccccccccccccccccccccccccccaaaggcucuuuucagagccaccagaauu

SEQ ID NO: 13343 - RNA, 640 nt, Artificial Sequence
  mRNA product Design b-4 comprising derived and/or modified sequence from LASV(LASV221-NIG-2010;Clade II)__AIT17622__Z (opt5)
gggagagucccgcagucggcguccagcggcucugcuuguucgugugugugucguugcaggccuuauucaagcuuaccaugggcaacagacaggccaagagcaccaaaguggacgagcaccaacgggcucaucugguccccgaugccucccaccucgggccucaguucugcaagucuuguugguuugaaaaucgcggacugguugagugcaacaaucauuaccuuugucugaacugccucagccugcuucuguccgugucuagcagauguccgaucugcaaaaugccccucccuacaaagcugaaagcggcuacgcagcccuccgccccuucuaccgaagugacacagaauaccauucccccuccguauagccccugaggacuaguaauaaggaaacuguaugaaugucugugggcaggaagugaagagauccuucuguaaagguuuuuggaauuaugucugcugaauaauaaacuuuuuugaaauaauaaaucugguagaaaaaugagaucuaaaaaaaaaaaaaaaaaaaaaaaaaaaaaaaaaaaaaaaaaaaaaaaaaaaaaaaaaaaaaaaaugcaucccccccccccccccccccccccccccccccaaaggcucuuuucagagccaccagaauu

SEQ ID NO: 13344 - RNA, 640 nt, Artificial Sequence
  mRNA product Design b-4 comprising derived and/or modified sequence from LASV(LASV237-NIG-2010;Clade II)__AIT17636__Z (opt5)
gggagagucccgcagucggcguccagcggcucugcuuguucgugugugugucguugcaggccuuauucaagcuuaccaugggcaacagacaggccaagagcaccaaaguggacgagcaccaacgggcucaucugguccccgaugccucccaccucgggccucaguucugcaagucuuguugguuugaaaaucgcggacugguugagugcaacaaucauuaccuuugucugaacugccucagccugcuucuguccgugucuagcagauguccgaucugcaaaaugccccucccuacaaagcugaaagcggcugcccagcccuccgccccuucuauugaaacgauccagaauaccacacccccuccguauacccccugaggacuaguaauaaggaaacuguaugaaugucugugggcaggaagugaagagauccuucuguaaagguuuuuggaauuaugucugcugaauaauaaacuuuuuugaaauaauaaaucugguagaaaaaugagaucuaaaaaaaaaaaaaaaaaaaaaaaaaaaaaaaaaaaaaaaaaaaaaaaaaaaaaaaaaaaaaaaaugcaucccccccccccccccccccccccccccccccaaaggcucuuuucagagccaccagaauu

SEQ ID NO: 13345 - RNA, 640 nt, Artificial Sequence
  mRNA product Design b-4 comprising derived and/or modified sequence from LASV(LASV253-NIG-2011;Clade II)__AIT17668__Z (opt5)
gggagagucccgcagucggcguccagcggcucugcuuguucgugugugugucguugcaggccuuauucaagcuuaccaugggcaacagacaggccaagagcaccaaaguggacgagcaccaacgggcucaucugguccccgaugccucccaccucgggccucaguucugcaagucuuguugguuugaaaauaaaggacugguugagugcaacaaucauuaccuuugucugaacugccucagccugcuucuguccgugucuagccgcuguccgaucugcaagaugccccucccuacaaaacugaagacgaccgcgcagcccuccgcuccucccacagaagccgccaagaauaccgcuccuccgcccuaugccccuugaggacuaguaauaaggaaacuguaugaaugucugugggcaggaagugaagagauccuucuguaaagguuuuuggaauuaugucugcugaauaauaaacuuuuuugaaauaauaaaucugguagaaaaaugagaucuaaaaaaaaaaaaaaaaaaaaaaaaaaaaaaaaaaaaaaaaaaaaaaaaaaaaaaaaaaaaaaaaugcaucccccccccccccccccccccccccccccccaaaggcucuuuucagagccaccagaauu

SEQ ID NO: 13346 - RNA, 640 nt, Artificial Sequence
  mRNA product Design b-4 comprising derived and/or modified sequence from LASV(G1180-SLE-2010;Clade IV)__AIT17166__Z (opt5)
gggagagucccgcagucggcguccagcggcucugcuuguucgugugugugucguugcaggccuuauucaagcuuaccaugggcaacaagcaggccaaagcucccgaggccaaggacagcccuagagcgucccugaucccggaugcuacccaccucgggccccaauucugcaaaucuuguugguuugaaacaaagggacugguggagugcaauaaccauuaccuuugucugaauugccucacgcugcuucugagcgucuccaaccgguguccuauuugcaaaaugccccucccuaccaagcugcgccccucugccacaccuaccgccccgcccacagaagcugccgacagcaucggcccucccccuuauucccccugaggacuaguaauaaggaaacuguaugaaugucugugggcaggaagugaagagauccuucuguaaagguuuuuggaauuaugucugcugaauaauaaacuuuuuugaaauaauaaaucugguagaaaaaugagaucuaaaaaaaaaaaaaaaaaaaaaaaaaaaaaaaaaaaaaaaaaaaaaaaaaaaaaaaaaaaaaaaaugcaucccccccccccccccccccccccccccccccaaaggcucuuuucagagccaccagaauu

SEQ ID NO: 13347 - RNA, 640 nt, Artificial Sequence
  mRNA product Design b-4 comprising derived and/or modified sequence from LASV(G1442-SLE-2011;Clade IV)__AIT17178__Z (opt5)
gggagagucccgcagucggcguccagcggcucugcuuguucgugugugugucguugcaggccuuauucaagcuuaccaugggcaacaagcaggccaaagcuagcgaggccaaggacucccccagagcgucucugaucccugaugcuacccaccucgggccgcaauucugcaaaagcuguugguuugaaaauaagggacugguggagugcaacaaucauuaccuuugucugaacugccucucccugcuucugucugucagcucccggugucccauuugcaaaaugccucuccccacacgccugagaccuucuacggcccccaccgccccuccggcucgggccggcgacaauaucaagcccccucccuauagcccuugaggacuaguaauaaggaaacuguaugaaugucugugggcaggaagugaagagauccuucuguaaagguuuuuggaauuaugucugcugaauaauaaacuuuuuugaaauaauaaaucugguagaaaaaugagaucuaaaaaaaaaaaaaaaaaaaaaaaaaaaaaaaaaaaaaaaaaaaaaaaaaaaaaaaaaaaaaaaaugcaucccccccccccccccccccccccccccccccaaaggcucuuuucagagccaccagaauu

SEQ ID NO: 13348 - RNA, 640 nt, Artificial Sequence
  mRNA product Design b-4 comprising derived and/or modified sequence from LASV(G502-SLE-2009;Clade IV)__AIT17124__Z (opt5)
gggagagucccgcagucggcguccagcggcucugcuuguucgugugugugucguugcaggccuuauucaagcuuaccaugggcaacaaacaggugaagacccccgaggccaaggacagcccuagagcuucccugaucccggaugccacacaccucgggccccaauucugcaaaucuuguugguuugaaaauaagggacuggucgagugcaacaaucauuaccuuugucugaacugccucacgcugcuucugagcguuggcaaucgguguccuauuugcaaaaugccccucccuaccaagcugcgccccuccgugacaccuaccgcgccgcccacaagagcugccgacucuaucgggccucccccuuauagccccugaggacuaguaauaaggaaacuguaugaaugucugugggcaggaagugaagagauccuucuguaaagguuuuuggaauuaugucugcugaauaauaaacuuuuuugaaauaauaaaucugguagaaaaaugagaucuaaaaaaaaaaaaaaaaaaaaaaaaaaaaaaaaaaaaaaaaaaaaaaaaaaaaaaaaaaaaaaaaugcaucccccccccccccccccccccccccccccccaaaggcucuuuucagagccaccagaauu

SEQ ID NO: 13349 - RNA, 640 nt, Artificial Sequence
  mRNA product Design b-4 comprising derived and/or modified sequence from LASV(G733-SLE-2010;Clade IV)__AIT17152__Z (opt5)
gggagagucccgcagucggcguccagcggcucugcuuguucgugugugugucguugcaggccuuauucaagcuuaccaugggcaacaagcaggccaaaacccccgagacaaaggacagcccuagagcuucccugaucccggaugccacgcaccucgggccccaauucugcaaaucuuguugguuugaaaauaagggacugguggagugcaacaaucauuaccuuugucugaacugccucacccugcuucugagcgucuccaaucgguguccuauuugcaaaaugccccucccuacaaagcugcgccccucuaccgcgccuacagcuccgcccgccggcgccgcugacaacaccagaccucccccuuauagccccugaggacuaguaauaaggaaacuguaugaaugucugugggcaggaagugaagagauccuucuguaaagguuuuuggaauuaugucugcugaauaauaaacuuuuuugaaauaauaaaucugguagaaaaaugagaucuaaaaaaaaaaaaaaaaaaaaaaaaaaaaaaaaaaaaaaaaaaaaaaaaaaaaaaaaaaaaaaaaugcaucccccccccccccccccccccccccccccccaaaggcucuuuucagagccaccagaauu

SEQ ID NO: 13350 - RNA, 652 nt, Artificial Sequence
  mRNA product Design b-4 comprising derived and/or modified sequence from MOPV/LASV reassortant(IGS-1;Clade IV)__AFY05533__Z (opt5)
gggagagucccgcagucggcguccagcggcucugcuuguucgugugugugucguugcaggccuuauucaagcuuaccaugggcaagacccagagcaaagggcaacccuccacaaaccugcucaaggagacggaaccuagacacccggugauccccgacgcccggggaaccggcccugaguucugcaaaucuuguugguuugaacgcagagggcugguccggugcaaugaucauuaccuuugucugaacugccucacacugcuucacaccguuagcgaccgcugucccaucugcaagcauaaacugccuuucagacucgagcugcagacacagcccaccgcuccuccggaaauucccccuucccagaaucccccucccuauucuccgugaggacuaguaauaaggaaacuguaugaaugucugugggcaggaagugaagagauccuucuguaaagguuuuuggaauuaugucugcugaauaauaaacuuuuuugaaauaauaaaucugguagaaaaaugagaucuaaaaaaaaaaaaaaaaaaaaaaaaaaaaaaaaaaaaaaaaaaaaaaaaaaaaaaaaaaaaaaaaugcaucccccccccccccccccccccccccccccccaaaggcucuuuucagagccaccagaauu

SEQ ID NO: 13351 - RNA, 640 nt, Artificial Sequence
  mRNA product Design b-4 comprising derived and/or modified sequence from LASV(LM776-SLE-2012;Clade IV)__AIT17824__Z (opt5)
gggagagucccgcagucggcguccagcggcucugcuuguucgugugugugucguugcaggccuuauucaagcuuaccaugggcaacaagcaggccaaagcuagcgaggaaaagaacucccccagagccucucugaucccugacgcgacccaccucgggccgcaauucugcaaaagcuguugguuugagaauaagggacugguggaaugcaauaaccauuaccuuugucugaauugccucacacugcuucuguccgucucuaaccggugucccauuugcaaaaugccucuccccacgaagcugcgcccuagcaccacacccaccgcuccuccgacaggcgccgccgauuccaucagacccccucccuauucuccuugaggacuaguaauaaggaaacuguaugaaugucugugggcaggaagugaagagauccuucuguaaagguuuuuggaauuaugucugcugaauaauaaacuuuuuugaaauaauaaaucugguagaaaaaugagaucuaaaaaaaaaaaaaaaaaaaaaaaaaaaaaaaaaaaaaaaaaaaaaaaaaaaaaaaaaaaaaaaaugcaucccccccccccccccccccccccccccccccaaaggcucuuuucagagccaccagaauu

SEQ ID NO: 13352 - RNA, 640 nt, Artificial Sequence
  mRNA product Design b-4 comprising derived and/or modified sequence from LASV(Mad39;Clade IV)__ANH09743__Z (opt5)
gggagagucccgcagucggcguccagcggcucugcuuguucgugugugugucguugcaggccuuauucaagcuuaccaugggcaacaagcaggccaaagcuagcgagguggaagacgggcccagagccucccugaucccugaugcgacccaccucggaccgcaauucugcaagucuuguugguuugagaauaaaagccuggucgaaugcaacaaucauuaccuuugucugaacugccucacacugcuucuguccguuucuaaucggugucccauuugcaagaugccucuccccacgcgccugaaaccuagcguggugcccaccgcuccuccgacaagagccggcgacgggacccggcccccucccuauuccccuugaggacuaguaauaaggaaacuguaugaaugucugugggcaggaagugaagagauccuucuguaaagguuuuuggaauuaugucugcugaauaauaaacuuuuuugaaauaauaaaucugguagaaaaaugagaucuaaaaaaaaaaaaaaaaaaaaaaaaaaaaaaaaaaaaaaaaaaaaaaaaaaaaaaaaaaaaaaaaugcaucccccccccccccccccccccccccccccccaaaggcucuuuucagagccaccagaauu

SEQ ID NO: 13353 - RNA, 640 nt, Artificial Sequence
  mRNA product Design b-4 comprising derived and/or modified sequence from LASV(Z0947-SLE-2011;Clade IV)__AIT17838__Z (opt5)
gggagagucccgcagucggcguccagcggcucugcuuguucgugugugugucguugcaggccuuauucaagcuuaccaugggcaacaagcaggccaaagugcccgagagcaaggacuccccuagagcuucucugaucccggaugccacccaccucgggccccaauucugcaaaagcuguugguuugaaaauaagggacuggucgagugcaacaaucauuaccuuugucugaacugccucacacugcuucuguccguuucuaaucgguguccuauuugcaaaaugccccucccuacgaagcugaagcccagcgcggcuccuaccgccccgcccacaggcgccgcugacuccauccgcccucccccuuauucucccugaggacuaguaauaaggaaacuguaugaaugucugugggcaggaagugaagagauccuucuguaaagguuuuuggaauuaugucugcugaauaauaaacuuuuuugaaauaauaaaucugguagaaaaaugagaucuaaaaaaaaaaaaaaaaaaaaaaaaaaaaaaaaaaaaaaaaaaaaaaaaaaaaaaaaaaaaaaaaugcaucccccccccccccccccccccccccccccccaaaggcucuuuucagagccaccagaauu

SEQ ID NO: 13354 - RNA, 640 nt, Artificial Sequence
  mRNA product Design b-4 comprising derived and/or modified sequence from LASV(Josiah;Clade IV)__ADY11072/NP_694871__Z (opt6)
gggagagucccgcagucggcguccagcggcucugcuuguucgugugugugucguugcaggccuuauucaagcuuaccaugggaaacaaacaagcaaaagcaccagaaucaaaagacucaccaagagcaucacuaauaccagacgcaacacaccuaggaccacaauucugcaaaucaugcugguucgaaaacaaaggacuuguagaaugcaacaaccacuaccuaugccuaaacugccuaacacuacuacuaucaguaucaaacagaugcccaauaugcaaaaugccacuaccaacaaaacuaagaccaucagcagcaccaacagcaccaccaacaggagcagcagacucaauaagaccaccaccauacucaccauaaggacuaguaauaaggaaacuguaugaaugucugugggcaggaagugaagagauccuucuguaaagguuuuuggaauuaugucugcugaauaauaaacuuuuuugaaauaauaaaucugguagaaaaaugagaucuaaaaaaaaaaaaaaaaaaaaaaaaaaaaaaaaaaaaaaaaaaaaaaaaaaaaaaaaaaaaaaaaugcaucccccccccccccccccccccccccccccccaaaggcucuuuucagagccaccagaauu

SEQ ID NO: 13355 - RNA, 643 nt, Artificial Sequence
  mRNA product Design b-4 comprising derived and/or modified sequence from LASV(Pinneo-NIG-1969;Clade I)__AIT17834__Z (opt6)
gggagagucccgcagucggcguccagcggcucugcuuguucgugugugugucguugcaggccuuauucaagcuuaccaugggaaacaaacaaacaagaucaccaccaaaaccagaacacccaagaccaacacuacuaccagacgcaucacaccuaggaccacaauucugcaaaucaugcugguucgaaaacaaaggacuaguagaaugcaacaaccacuaccuaugccuaaacugccuaacacuacuacuaucaguaucagacagaugcccaauaugcaaaaugccacuaccaacaaaacuagcaguaagaacacaaccaucagcaccaccacuaaaccaaggaaacacacaaucaucaccaccaccauacucaccauaaggacuaguaauaaggaaacuguaugaaugucugugggcaggaagugaagagauccuucuguaaagguuuuuggaauuaugucugcugaauaauaaacuuuuuugaaauaauaaaucugguagaaaaaugagaucuaaaaaaaaaaaaaaaaaaaaaaaaaaaaaaaaaaaaaaaaaaaaaaaaaaaaaaaaaaaaaaaaugcaucccccccccccccccccccccccccccccccaaaggcucuuuucagagccaccagaauu

SEQ ID NO: 13356 - RNA, 640 nt, Artificial Sequence
  mRNA product Design b-4 comprising derived and/or modified sequence from LASV(Nig08-04;Clade II)__ADU56612__Z (opt6)
gggagagucccgcagucggcguccagcggcucugcuuguucgugugugugucguugcaggccuuauucaagcuuaccaugggaaacagacaaacaagaccaacagaagcaacagaacaaucaagagcacaccuaguaccagacgcaucacaccuaggaccacaauucugcaaaucaugcugguucgaaaacagaggacuaguagaaugcaacaaccacuaccuaugccuaaacugccuaucacuacuacuaucaguaucaucaagaugcccaauaugcaaaaugccacuaccaacaagacuaaaagcaucagcacaaccaucagcaccaccaacagaagcaccacaaaacacaacaccaccaccauacacaccauaaggacuaguaauaaggaaacuguaugaaugucugugggcaggaagugaagagauccuucuguaaagguuuuuggaauuaugucugcugaauaauaaacuuuuuugaaauaauaaaucugguagaaaaaugagaucuaaaaaaaaaaaaaaaaaaaaaaaaaaaaaaaaaaaaaaaaaaaaaaaaaaaaaaaaaaaaaaaaugcaucccccccccccccccccccccccccccccccaaaggcucuuuucagagccaccagaauu

SEQ ID NO: 13357 - RNA, 640 nt, Artificial Sequence
  mRNA product Design b-4 comprising derived and/or modified sequence from LASV(Nig08-A19;Clade III)__ADU56620__Z (opt6)
gggagagucccgcagucggcguccagcggcucugcuuguucgugugugugucguugcaggccuuauucaagcuuaccaugggaggaaaacacacaaaaccacaaagagaaucaaacucaccaagagcaucacuaauaccagacgcaacacaccuaggaccacaauucugcaaaucaugcugguucgaaaacaaaggauuaguagaaugcaacaaccacuaccuaugccuaaacugccuaacacuacuacuaucaguaucaaacagaugcccaauaugcaaaaugccacuaccaacaagacuaagagcaucaacaaacccaacagcaccacaaguagaacaaguaggaccaacaaacccaccaccauacucaccauaaggacuaguaauaaggaaacuguaugaaugucugugggcaggaagugaagagauccuucuguaaagguuuuuggaauuaugucugcugaauaauaaacuuuuuugaaauaauaaaucugguagaaaaaugagaucuaaaaaaaaaaaaaaaaaaaaaaaaaaaaaaaaaaaaaaaaaaaaaaaaaaaaaaaaaaaaaaaaugcaucccccccccccccccccccccccccccccccaaaggcucuuuucagagccaccagaauu

SEQ ID NO: 13358 - RNA, 640 nt, Artificial Sequence
  mRNA product Design b-4 comprising derived and/or modified sequence from LASV(AV;Clade V)__CCA30312__Z (opt6)
gggagagucccgcagucggcguccagcggcucugcuuguucgugugugugucguugcaggccuuauucaagcuuaccaugggaaacagacaagcaaaaaacccagaaguagaaaacucaccaagagcaucacuaauaccagacgcaacacaccuaggaccacaauucugcaaaucaugcugguucgaaaacaaaggacuaguagaaugcaacaaccacuaccuaugccuaaacugccuaucacuacuacuaucaguaucaaacagaugcccaauaugcaaaaugccacuaccaacaagacuaagaccaacaacaacaccaacagcaccacaaauaauaaaagaaaacacaacaaacccaccaccauacacaccauaaggacuaguaauaaggaaacuguaugaaugucugugggcaggaagugaagagauccuucuguaaagguuuuuggaauuaugucugcugaauaauaaacuuuuuugaaauaauaaaucugguagaaaaaugagaucuaaaaaaaaaaaaaaaaaaaaaaaaaaaaaaaaaaaaaaaaaaaaaaaaaaaaaaaaaaaaaaaaugcaucccccccccccccccccccccccccccccccaaaggcucuuuucagagccaccagaauu

SEQ ID NO: 13359 - RNA, 640 nt, Artificial Sequence
  mRNA product Design b-4 comprising derived and/or modified sequence from LASV(Togo/2016/7082;Clade VI)__AMR44579__Z (opt6)
gggagagucccgcagucggcguccagcggcucugcuuguucgugugugugucguugcaggccuuauucaagcuuaccaugggagcaagacaaacaaaacaaccacaaauagaaggaucaccaagagcaucacuaguaccagacgcaucacaccuaggaccacaauucugcaaaucaugcugguucgaaaacaaaggacuaguagaaugcaacaaccacuacuuaugccuaaacugccuaucacuacuacuaucaguaucaaacagaugcccaauaugcaaaaugccacuaccaacaaaacuaagaguaucaucagcaccaucagcaccaccagcagcaacagcacaaccaggaacaccaccaccauacucaccauaaggacuaguaauaaggaaacuguaugaaugucugugggcaggaagugaagagauccuucuguaaagguuuuuggaauuaugucugcugaauaauaaacuuuuuugaaauaauaaaucugguagaaaaaugagaucuaaaaaaaaaaaaaaaaaaaaaaaaaaaaaaaaaaaaaaaaaaaaaaaaaaaaaaaaaaaaaaaaugcaucccccccccccccccccccccccccccccccaaaggcucuuuucagagccaccagaauu

SEQ ID NO: 13360 - RNA, 640 nt, Artificial Sequence
  mRNA product Design b-4 comprising derived and/or modified sequence from LASV(KAK-428;Clade n.d. (VII))__ANH09761__Z (opt6)
gggagagucccgcagucggcguccagcggcucugcuuguucgugugugugucguugcaggccuuauucaagcuuaccaugggaaacaaaggaacaaaaccaacacaaaacucagaaccaucaagagcaaaccuaguaccagacgcaucauaccuaggaccacaauucugcaaaucaugcugguucgaaaacaaaggacuaguagaaugcaacaaccacuaccuaugccuaaacugccuaacaaugcuacuaucaguaucaaacagaugcccaauaugcaaaaugccacuaccaacaaaaauaaaagcaucaggaucaccaucagcaccaccaacagaagcaaacucagcaguaucaccaccaccauacacaccauaaggacuaguaauaaggaaacuguaugaaugucugugggcaggaagugaagagauccuucuguaaagguuuuuggaauuaugucugcugaauaauaaacuuuuuugaaauaauaaaucugguagaaaaaugagaucuaaaaaaaaaaaaaaaaaaaaaaaaaaaaaaaaaaaaaaaaaaaaaaaaaaaaaaaaaaaaaaaaugcaucccccccccccccccccccccccccccccccaaaggcucuuuucagagccaccagaauu

SEQ ID NO: 13361 - RNA, 640 nt, Artificial Sequence
  mRNA product Design b-4 comprising derived and/or modified sequence from LASV(ISTH0009-NIG-2011;Clade II)__AIT17402__Z (opt6)
gggagagucccgcagucggcguccagcggcucugcuuguucgugugugugucguugcaggccuuauucaagcuuaccaugggaaacagacaagcaaaaucaacaaaaguagacgaacaccaaagagcacaccuaguaccagacgcaucacaccuaggaccacaauucugcaaaucaugcugguucgaaaacagaggacuaguagaaugcaacaaccacuaccuaugccuaaacugccuaucacuacuacuaucaguaucaucaagaugcccaauaugcaaaaugccacuaccaacaaaacuaaaagcagcagcacaaccaucagcaccaucaacagaaacaauacaaaacacaacaccaccaccauacacaccauaaggacuaguaauaaggaaacuguaugaaugucugugggcaggaagugaagagauccuucuguaaagguuuuuggaauuaugucugcugaauaauaaacuuuuuugaaauaauaaaucugguagaaaaaugagaucuaaaaaaaaaaaaaaaaaaaaaaaaaaaaaaaaaaaaaaaaaaaaaaaaaaaaaaaaaaaaaaaaugcaucccccccccccccccccccccccccccccccaaaggcucuuuucagagccaccagaauu

SEQ ID NO: 13362 - RNA, 640 nt, Artificial Sequence
  mRNA product Design b-4 comprising derived and/or modified sequence from LASV(ISTH2010-NIG-2012;Clade II)__AIT17480__Z (opt6)
gggagagucccgcagucggcguccagcggcucugcuuguucgugugugugucguugcaggccuuauucaagcuuaccaugggaaacagacacgcaaaaucaacaaaaguagacgaacaccaaagagcacaccuaguaccagacgcaucacaccuaggaccacaauucugcaaaucaugcugguucgaaaacagaggacuaguagaaugcaacaaccacuaccuaugccuaaacugccuaucacuacuacuaucaguaucaucaagaugcccaauaugcaaaaugccacuaccaacaaaacuaaaagcagcagcacaaccaucagcaccaucaacagaaguaauacaaucaacaacacccccaccauacacaccauaaggacuaguaauaaggaaacuguaugaaugucugugggcaggaagugaagagauccuucuguaaagguuuuuggaauuaugucugcugaauaauaaacuuuuuugaaauaauaaaucugguagaaaaaugagaucuaaaaaaaaaaaaaaaaaaaaaaaaaaaaaaaaaaaaaaaaaaaaaaaaaaaaaaaaaaaaaaaaugcaucccccccccccccccccccccccccccccccaaaggcucuuuucagagccaccagaauu

SEQ ID NO: 13363 - RNA, 640 nt, Artificial Sequence
  mRNA product Design b-4 comprising derived and/or modified sequence from LASV(Lassa virus/H.sapiens-wt/NGA/2016/ISTH_0017;Clade II)__AVO03713__Z (opt6)
gggagagucccgcagucggcguccagcggcucugcuuguucgugugugugucguugcaggccuuauucaagcuuaccaugggaaacagacaagcaaaaucaacaaaaguagacgaacaccaaagagcacaccuaguaccagacgcaucacaccuaggaccacaauucugcaaaucaugcugguucgaaaacagaggacuaguagaaugcaacaaccacuaccuaugccuaaacugccuaucacuacuacuaucaguaucaucaagaugcccaauaugcaaaaugccacuaccaacaaaacuaaaagcagcaacacaaccaucagcaccaucaacagaaguaaaccaaaacacaacaccaccaccauacacaccauaaggacuaguaauaaggaaacuguaugaaugucugugggcaggaagugaagagauccuucuguaaagguuuuuggaauuaugucugcugaauaauaaacuuuuuugaaauaauaaaucugguagaaaaaugagaucuaaaaaaaaaaaaaaaaaaaaaaaaaaaaaaaaaaaaaaaaaaaaaaaaaaaaaaaaaaaaaaaaugcaucccccccccccccccccccccccccccccccaaaggcucuuuucagagccaccagaauu

SEQ ID NO: 13364 - RNA, 640 nt, Artificial Sequence
  mRNA product Design b-4 comprising derived and/or modified sequence from LASV(Lassa virus/H.sapiens-wt/NGA/2018/ISTH_0959;Clade II)__AVV65084__Z (opt6)
gggagagucccgcagucggcguccagcggcucugcuuguucgugugugugucguugcaggccuuauucaagcuuaccaugggaaacaaacaagcaaaaucaacaaaaguagacgaacaccaaagagcacaccuaguuccagacgcaucacaccuaggaccacaauucugcaaaucaugcugguucgaaaacagaggacuaguagaaugcaacaaccacuaccuaugccuaaacugccuaucacuacuacuaucaguaucaucaagaugcccaauaugcaaaaugccacuaccaacaaaacuaaaagcagcagcacaaccaucagcaccaucaacagaagcaauacaaucaacaacaccaccaccauacacaccauaaggacuaguaauaaggaaacuguaugaaugucugugggcaggaagugaagagauccuucuguaaagguuuuuggaauuaugucugcugaauaauaaacuuuuuugaaauaauaaaucugguagaaaaaugagaucuaaaaaaaaaaaaaaaaaaaaaaaaaaaaaaaaaaaaaaaaaaaaaaaaaaaaaaaaaaaaaaaaugcaucccccccccccccccccccccccccccccccaaaggcucuuuucagagccaccagaauu

SEQ ID NO: 13365 - RNA, 640 nt, Artificial Sequence
  mRNA product Design b-4 comprising derived and/or modified sequence from LASV(LASV003-NIG-2008;Clade II)__AIT17578__Z (opt6)
gggagagucccgcagucggcguccagcggcucugcuuguucgugugugugucguugcaggccuuauucaagcuuaccaugggaaacagacaagcaaaaucaacaaaaguagacgaacaccaaagagcacaccuaguaccagacgcaucacaccuaggaccacaauucugcaaaucaugcugguucgaaaacaaaggacuaguagaaugcaacaaccacuaccuaugccuaaacugccuaucacuacuacuaucaguaucaucaagaugcccaauaugcaaaaugccacuaccaacaaaacuaagagcagcagcacaaccaucagcaccaucaacagaaucagcacaaaacacagcaccaccaccauacgcaccauaaggacuaguaauaaggaaacuguaugaaugucugugggcaggaagugaagagauccuucuguaaagguuuuuggaauuaugucugcugaauaauaaacuuuuuugaaauaauaaaucugguagaaaaaugagaucuaaaaaaaaaaaaaaaaaaaaaaaaaaaaaaaaaaaaaaaaaaaaaaaaaaaaaaaaaaaaaaaaugcaucccccccccccccccccccccccccccccccaaaggcucuuuucagagccaccagaauu

SEQ ID NO: 13366 - RNA, 640 nt, Artificial Sequence
  mRNA product Design b-4 comprising derived and/or modified sequence from LASV(LASV035-NIG-2009;Clade II)__AIT17586__Z (opt6)
gggagagucccgcagucggcguccagcggcucugcuuguucgugugugugucguugcaggccuuauucaagcuuaccaugggaaacaaacaagcaaaaucaacaaaaguagacgaacaccaaagagcacaccuaguaccagacgcaucacaccuaggaccacaauucugcaaaucaugcugguucgaaaacagaggacuaguagaaugcaacaaccacuaccuaugccuaaacugccuaucacuacuacuaucaguaucaucaagaugcccaauaugcaaaaugccacuaccaacaagacuaaaagcagcagcacaaccaucagcaccaucaacagaaguaacacaaaacacaacaccaccaccauacacaccauaaggacuaguaauaaggaaacuguaugaaugucugugggcaggaagugaagagauccuucuguaaagguuuuuggaauuaugucugcugaauaauaaacuuuuuugaaauaauaaaucugguagaaaaaugagaucuaaaaaaaaaaaaaaaaaaaaaaaaaaaaaaaaaaaaaaaaaaaaaaaaaaaaaaaaaaaaaaaaugcaucccccccccccccccccccccccccccccccaaaggcucuuuucagagccaccagaauu

SEQ ID NO: 13367 - RNA, 640 nt, Artificial Sequence
  mRNA product Design b-4 comprising derived and/or modified sequence from LASV(LASV1000-NIG-2009;Clade II)__AIT17780__Z (opt6)
gggagagucccgcagucggcguccagcggcucugcuuguucgugugugugucguugcaggccuuauucaagcuuaccaugggaaacagacaaacaaaaucaacaaaaguagacgaacaccaaagagcauaccuaguaccagacgcaucacuacuaggaccacaauucugcaaaucaugcugguucgaaaacaaaggacuaguagaaugcaacaaccacuaccuaugccuaaacugccuaucacuacuacuaucaguaucaucaagaugcccaauaugcaaaaugccacuaccaacaagacuaaaagcagcagcacaaccaucagcaccaccaacagaagcaauacaaaacacaacaccaccaccauacacaccauaaggacuaguaauaaggaaacuguaugaaugucugugggcaggaagugaagagauccuucuguaaagguuuuuggaauuaugucugcugaauaauaaacuuuuuugaaauaauaaaucugguagaaaaaugagaucuaaaaaaaaaaaaaaaaaaaaaaaaaaaaaaaaaaaaaaaaaaaaaaaaaaaaaaaaaaaaaaaaugcaucccccccccccccccccccccccccccccccaaaggcucuuuucagagccaccagaauu

SEQ ID NO: 13368 - RNA, 640 nt, Artificial Sequence
  mRNA product Design b-4 comprising derived and/or modified sequence from LASV(LASV221-NIG-2010;Clade II)__AIT17622__Z (opt6)
gggagagucccgcagucggcguccagcggcucugcuuguucgugugugugucguugcaggccuuauucaagcuuaccaugggaaacagacaagccaaaucaacaaaaguagacgaacaccaaagagcacaccuaguaccagacgcaucacaccuaggaccacaauucugcaaaucaugcugguucgaaaacagaggauuaguagaaugcaacaaccacuaccuaugccuaaacugccuaucacuacuacuaucaguaucaucaagaugcccaauaugcaaaaugccacuaccaacaaaacuaaaagcagcaacacaaccaucagcaccaucaacagaaguaacacaaaacacaauaccaccaccauacucaccauaaggacuaguaauaaggaaacuguaugaaugucugugggcaggaagugaagagauccuucuguaaagguuuuuggaauuaugucugcugaauaauaaacuuuuuugaaauaauaaaucugguagaaaaaugagaucuaaaaaaaaaaaaaaaaaaaaaaaaaaaaaaaaaaaaaaaaaaaaaaaaaaaaaaaaaaaaaaaaugcaucccccccccccccccccccccccccccccccaaaggcucuuuucagagccaccagaauu

SEQ ID NO: 13369 - RNA, 640 nt, Artificial Sequence
  mRNA product Design b-4 comprising derived and/or modified sequence from LASV(LASV237-NIG-2010;Clade II)__AIT17636__Z (opt6)
gggagagucccgcagucggcguccagcggcucugcuuguucgugugugugucguugcaggccuuauucaagcuuaccaugggaaacagacaagcaaaaucaacaaaaguagacgaacaccaaagagcacaccuaguaccagacgcaucacaccuaggaccacaauucugcaaaucaugcugguucgaaaacagaggacucguagaaugcaacaaccacuaccuaugccuaaacugccuaucacuacuacuaucaguaucaucaagaugcccaauaugcaaaaugccacuaccaacaaaacuaaaagcagcagcacaaccaucagcaccaucaauagaaacaauacaaaacacaacaccaccaccauacacaccauaaggacuaguaauaaggaaacuguaugaaugucugugggcaggaagugaagagauccuucuguaaagguuuuuggaauuaugucugcugaauaauaaacuuuuuugaaauaauaaaucugguagaaaaaugagaucuaaaaaaaaaaaaaaaaaaaaaaaaaaaaaaaaaaaaaaaaaaaaaaaaaaaaaaaaaaaaaaaaugcaucccccccccccccccccccccccccccccccaaaggcucuuuucagagccaccagaauu

SEQ ID NO: 13370 - RNA, 640 nt, Artificial Sequence
  mRNA product Design b-4 comprising derived and/or modified sequence from LASV(LASV253-NIG-2011;Clade II)__AIT17668__Z (opt6)
gggagagucccgcagucggcguccagcggcucugcuuguucgugugugugucguugcaggccuuauucaagcuuaccaugggaaacagacaagcaaaaucaacaaaaguagacgaacaccaaagagcacaccuaguaccagacgcaucacaccuaggaccacaauucugcaaaucaugcugguucgaaaacaaaggacuaguagaaugcaacaaccacuaccuaugccuaaacugccuaucacuacuacuaucaguaucaucaagaugcccaauaugcaaaaugccauuaccaacaaaacuaaaaacaacagcacaaccaucagcaccaccaacagaagcagcaaaaaacacagcaccaccaccauacgcaccauaaggacuaguaauaaggaaacuguaugaaugucugugggcaggaagugaagagauccuucuguaaagguuuuuggaauuaugucugcugaauaauaaacuuuuuugaaauaauaaaucugguagaaaaaugagaucuaaaaaaaaaaaaaaaaaaaaaaaaaaaaaaaaaaaaaaaaaaaaaaaaaaaaaaaaaaaaaaaaugcaucccccccccccccccccccccccccccccccaaaggcucuuuucagagccaccagaauu

SEQ ID NO: 13371 - RNA, 640 nt, Artificial Sequence
  mRNA product Design b-4 comprising derived and/or modified sequence from LASV(G1180-SLE-2010;Clade IV)__AIT17166__Z (opt6)
gggagagucccgcagucggcguccagcggcucugcuuguucgugugugugucguugcaggccuuauucaagcuuaccaugggaaacaaacaagcaaaagcaccagaagcaaaagacucaccaagagcaucacuaauaccagacgcaacacaccuaggaccacaauucugcaaaucaugcugguucgaaacaaaaggacuaguagaaugcaacaaccacuaccuaugccuaaacugccuaacacuacuacuaucaguaucaaacagaugcccaauaugcaaaaugccacuaccaacaaaacuaagaccaucagcaacaccaacagcaccaccaacagaagcagcagacucaauaggaccaccaccauacucaccauaaggacuaguaauaaggaaacuguaugaaugucugugggcaggaagugaagagauccuucuguaaagguuuuuggaauuaugucugcugaauaauaaacuuuuuugaaauaauaaaucugguagaaaaaugagaucuaaaaaaaaaaaaaaaaaaaaaaaaaaaaaaaaaaaaaaaaaaaaaaaaaaaaaaaaaaaaaaaaugcaucccccccccccccccccccccccccccccccaaaggcucuuuucagagccaccagaauu

SEQ ID NO: 13372 - RNA, 640 nt, Artificial Sequence
  mRNA product Design b-4 comprising derived and/or modified sequence from LASV(G1442-SLE-2011;Clade IV)__AIT17178__Z (opt6)
gggagagucccgcagucggcguccagcggcucugcuuguucgugugugugucguugcaggccuuauucaagcuuaccaugggaaacaaacaagcaaaagcaucagaagcaaaagacucaccaagagcaucacuaauaccagacgcaacacaccuaggaccacaauucugcaaaucaugcugguucgaaaacaaaggauuaguagaaugcaacaaccacuaccuaugccuaaacugccuaucacuacuacuaucaguaucaucaagaugcccaauaugcaaaaugccacuaccaacaagacuaagaccaucaacagcaccaacagcaccaccagcaagagcaggagacaacauaaaaccaccaccauacucaccauaaggacuaguaauaaggaaacuguaugaaugucugugggcaggaagugaagagauccuucuguaaagguuuuuggaauuaugucugcugaauaauaaacuuuuuugaaauaauaaaucugguagaaaaaugagaucuaaaaaaaaaaaaaaaaaaaaaaaaaaaaaaaaaaaaaaaaaaaaaaaaaaaaaaaaaaaaaaaaugcaucccccccccccccccccccccccccccccccaaaggcucuuuucagagccaccagaauu

SEQ ID NO: 13373 - RNA, 640 nt, Artificial Sequence
  mRNA product Design b-4 comprising derived and/or modified sequence from LASV(G502-SLE-2009;Clade IV)__AIT17124__Z (opt6)
gggagagucccgcagucggcguccagcggcucugcuuguucgugugugugucguugcaggccuuauucaagcuuaccaugggaaacaaacaaguaaaaacaccagaagcaaaagacucaccaagagcaucacuaauaccagacgcaacacaccuaggaccacaauucugcaaaucaugcugguucgaaaacaaaggacuaguagaaugcaacaaccacuaccuaugccuaaacugccuaacacuacuacuaucaguaggaaacagaugcccaauaugcaaaaugccacuaccaacaaaacuaagaccaucagucacaccaacagcaccaccaacaagagcagcagacucaauaggaccaccaccauacucaccauaaggacuaguaauaaggaaacuguaugaaugucugugggcaggaagugaagagauccuucuguaaagguuuuuggaauuaugucugcugaauaauaaacuuuuuugaaauaauaaaucugguagaaaaaugagaucuaaaaaaaaaaaaaaaaaaaaaaaaaaaaaaaaaaaaaaaaaaaaaaaaaaaaaaaaaaaaaaaaugcaucccccccccccccccccccccccccccccccaaaggcucuuuucagagccaccagaauu

SEQ ID NO: 13374 - RNA, 640 nt, Artificial Sequence
  mRNA product Design b-4 comprising derived and/or modified sequence from LASV(G733-SLE-2010;Clade IV)__AIT17152__Z (opt6)
gggagagucccgcagucggcguccagcggcucugcuuguucgugugugugucguugcaggccuuauucaagcuuaccaugggaaacaaacaagcaaaaacaccagaaacaaaagacucaccaagagcaucauuaauaccagacgcaacacaccuaggaccacaauucugcaaaucaugcugguucgaaaacaaaggauuaguagaaugcaacaaccacuaccuaugccuaaacugccuaacacuacuacuaucaguaucaaacagaugcccaauaugcaaaaugccacuaccaacaaaacuaagaccaucaacagcaccaacagcaccaccagcaggagcagcagacaacacaagaccaccaccauacucaccauaaggacuaguaauaaggaaacuguaugaaugucugugggcaggaagugaagagauccuucuguaaagguuuuuggaauuaugucugcugaauaauaaacuuuuuugaaauaauaaaucugguagaaaaaugagaucuaaaaaaaaaaaaaaaaaaaaaaaaaaaaaaaaaaaaaaaaaaaaaaaaaaaaaaaaaaaaaaaaugcaucccccccccccccccccccccccccccccccaaaggcucuuuucagagccaccagaauu

SEQ ID NO: 13375 - RNA, 652 nt, Artificial Sequence
  mRNA product Design b-4 comprising derived and/or modified sequence from MOPV/LASV reassortant(IGS-1;Clade IV)__AFY05533__Z (opt6)
gggagagucccgcagucggcguccagcggcucugcuuguucgugugugugucguugcaggccuuauucaagcuuaccaugggaaaaacacaaucaaaaggacaaccauccacaaaccuacuaaaagaaacagaaccaagacacccaguaauaccagacgcaagaggaacaggaccagaauucugcaaaucaugcugguucgaaagaagaggacuaguaagaugcaacgaccacuaccuaugccuaaacugccuaacacuacuacacacaguaucagacagaugcccaauaugcaaacacaaacuaccauucagacuagaacuacaaacacaaccaacagcaccaccagaaauaccaccaucacaaaacccaccaccauacucaccauaaggacuaguaauaaggaaacuguaugaaugucugugggcaggaagugaagagauccuucuguaaagguuuuuggaauuaugucugcugaauaauaaacuuuuuugaaauaauaaaucugguagaaaaaugagaucuaaaaaaaaaaaaaaaaaaaaaaaaaaaaaaaaaaaaaaaaaaaaaaaaaaaaaaaaaaaaaaaaugcaucccccccccccccccccccccccccccccccaaaggcucuuuucagagccaccagaauu

SEQ ID NO: 13376 - RNA, 640 nt, Artificial Sequence
  mRNA product Design b-4 comprising derived and/or modified sequence from LASV(LM776-SLE-2012;Clade IV)__AIT17824__Z (opt6)
gggagagucccgcagucggcguccagcggcucugcuuguucgugugugugucguugcaggccuuauucaagcuuaccaugggaaacaaacaagcaaaagcaucagaagaaaaaaacucaccaagagcaucacuaauaccagacgcaacacaccuaggaccacaauucugcaaaucaugcugguucgaaaacaaaggacuaguagaaugcaacaaucacuaccuaugccuaaacugccuaacacuacuacuaucaguaucaaacagaugcccaauaugcaaaaugccacuaccaacaaaacuaagaccaucaacaacaccaacagcaccaccaacaggagcagcagacucaauaagaccaccaccauacucaccauaaggacuaguaauaaggaaacuguaugaaugucugugggcaggaagugaagagauccuucuguaaagguuuuuggaauuaugucugcugaauaauaaacuuuuuugaaauaauaaaucugguagaaaaaugagaucuaaaaaaaaaaaaaaaaaaaaaaaaaaaaaaaaaaaaaaaaaaaaaaaaaaaaaaaaaaaaaaaaugcaucccccccccccccccccccccccccccccccaaaggcucuuuucagagccaccagaauu

SEQ ID NO: 13377 - RNA, 640 nt, Artificial Sequence
  mRNA product Design b-4 comprising derived and/or modified sequence from LASV(Mad39;Clade IV)__ANH09743__Z (opt6)
gggagagucccgcagucggcguccagcggcucugcuuguucgugugugugucguugcaggccuuauucaagcuuaccaugggaaacaaacaagcaaaagcaucagaaguagaagacggaccaagagcaucacuaauaccagacgcaacacaccuaggaccacaauucugcaaaucaugcugguucgaaaacaaaucacuaguagaaugcaacaaccacuaccuaugccuaaacugccuaacacuacuacuaucaguaucaaacagaugcccaauaugcaaaaugccacuaccaacaagacuaaaaccaucaguaguaccaacagcaccaccaacacgagcaggagacggaacaagaccaccaccauacucaccauaaggacuaguaauaaggaaacuguaugaaugucugugggcaggaagugaagagauccuucuguaaagguuuuuggaauuaugucugcugaauaauaaacuuuuuugaaauaauaaaucugguagaaaaaugagaucuaaaaaaaaaaaaaaaaaaaaaaaaaaaaaaaaaaaaaaaaaaaaaaaaaaaaaaaaaaaaaaaaugcaucccccccccccccccccccccccccccccccaaaggcucuuuucagagccaccagaauu

SEQ ID NO: 13378 - RNA, 640 nt, Artificial Sequence
  mRNA product Design b-4 comprising derived and/or modified sequence from LASV(Z0947-SLE-2011;Clade IV)__AIT17838__Z (opt6)
gggagagucccgcagucggcguccagcggcucugcuuguucgugugugugucguugcaggccuuauucaagcuuaccaugggaaacaaacaagcaaaaguaccagaaucaaaagacucaccaagagcaucacuaauaccagacgcaacacaccuaggaccacaauucugcaaaucaugcugguucgaaaacaaaggacuaguagaaugcaacaaccacuaccuaugccuaaacugccuaacacuacuacuaucaguaucaaacagaugcccaauaugcaaaaugccacuaccaacaaaacuaaaaccaucagcagcaccaacagcaccaccaacaggagcagcagacucaauaagaccaccaccauacucaccauaaggacuaguaauaaggaaacuguaugaaugucugugggcaggaagugaagagauccuucuguaaagguuuuuggaauuaugucugcugaauaauaaacuuuuuugaaauaauaaaucugguagaaaaaugagaucuaaaaaaaaaaaaaaaaaaaaaaaaaaaaaaaaaaaaaaaaaaaaaaaaaaaaaaaaaaaaaaaaugcaucccccccccccccccccccccccccccccccaaaggcucuuuucagagccaccagaauu

SEQ ID NO: 13379 - RNA, 640 nt, Artificial Sequence
  mRNA product Design b-4 comprising derived and/or modified sequence from LASV(Josiah;Clade IV)__ADY11072/NP_694871__Z (opt11)
gggagagucccgcagucggcguccagcggcucugcuuguucgugugugugucguugcaggccuuauucaagcuuaccaugggcaacaaacaagccaaagcccccgaauccaaagacuccccccgcgccucccucauccccgacgccacccaccucggcccccaauucugcaaauccugcugguucgaaaacaaaggccucgucgaaugcaacaaccacuaccucugccucaacugccucacccuacuccucuccgucuccaaccgcugccccaucugcaaaaugccccuccccaccaaacuccgccccuccgccgcccccaccgccccccccaccggcgccgccgacuccauccgccccccccccuacucccccuaaggacuaguaauaaggaaacuguaugaaugucugugggcaggaagugaagagauccuucuguaaagguuuuuggaauuaugucugcugaauaauaaacuuuuuugaaauaauaaaucugguagaaaaaugagaucuaaaaaaaaaaaaaaaaaaaaaaaaaaaaaaaaaaaaaaaaaaaaaaaaaaaaaaaaaaaaaaaaugcaucccccccccccccccccccccccccccccccaaaggcucuuuucagagccaccagaauu

SEQ ID NO: 13380 - RNA, 643 nt, Artificial Sequence
  mRNA product Design b-4 comprising derived and/or modified sequence from LASV(Pinneo-NIG-1969;Clade I)__AIT17834__Z (opt11)
gggagagucccgcagucggcguccagcggcucugcuuguucgugugugugucguugcaggccuuauucaagcuuaccaugggcaacaaacaaacccgcuccccccccaaacccgaacacccccgccccacccuccucccagacgccucccaccucggcccccaauucugcaaauccugcugguucgaaaacaaaggccuagucgaaugcaacaaccacuaccucugccucaacugccucacccuccuccucuccgucuccgaccgcugccccaucugcaaaaugccccuccccaccaaacuugccguccgcacccaacccuccgcccccccccucaaccaaggcaacacccaauccucccccccccccuacucccccuaaggacuaguaauaaggaaacuguaugaaugucugugggcaggaagugaagagauccuucuguaaagguuuuuggaauuaugucugcugaauaauaaacuuuuuugaaauaauaaaucugguagaaaaaugagaucuaaaaaaaaaaaaaaaaaaaaaaaaaaaaaaaaaaaaaaaaaaaaaaaaaaaaaaaaaaaaaaaaugcaucccccccccccccccccccccccccccccccaaaggcucuuuucagagccaccagaauu

SEQ ID NO: 13381 - RNA, 640 nt, Artificial Sequence
  mRNA product Design b-4 comprising derived and/or modified sequence from LASV(Nig08-04;Clade II)__ADU56612__Z (opt11)
gggagagucccgcagucggcguccagcggcucugcuuguucgugugugugucguugcaggccuuauucaagcuuaccaugggcaaccgccaaacccgccccaccgaagcaaccgaacaaucccgcgcccaccucguccccgacgccucccaccucggcccccaauucugcaaauccugcugguucgaaaaccgcggccucgucgaaugcaacaaccacuaccucugccucaacugccucucccuccuccucuccgucuccucccgcugccccaucugcaaaaugccccuccccacccgccucaaagccuccgcccaacccuccgccccccccaccgaagccccccaaaacaccacccccccccccuacacccccuaaggacuaguaauaaggaaacuguaugaaugucugugggcaggaagugaagagauccuucuguaaagguuuuuggaauuaugucugcugaauaauaaacuuuuuugaaauaauaaaucugguagaaaaaugagaucuaaaaaaaaaaaaaaaaaaaaaaaaaaaaaaaaaaaaaaaaaaaaaaaaaaaaaaaaaaaaaaaaugcaucccccccccccccccccccccccccccccccaaaggcucuuuucagagccaccagaauu

SEQ ID NO: 13382 - RNA, 640 nt, Artificial Sequence
  mRNA product Design b-4 comprising derived and/or modified sequence from LASV(Nig08-A19;Clade III)__ADU56620__Z (opt11)
gggagagucccgcagucggcguccagcggcucugcuuguucgugugugugucguugcaggccuuauucaagcuuaccaugggcggcaaacacaccaaaccccaacgcgaauccaacuccccccgcgccucccucauccccgacgccacccaccucggcccccaauucugcaaauccugcugguucgaaaacaaaggccucgucgaaugcaacaaccacuaccucugccucaacugccucacccuccuccucuccgucuccaaccgcugccccaucugcaaaaugccccuccccacccgccuccgcgccuccaccaaccccaccgccccccaagucgaacaagucggccccaccaaccccccccccuacucccccuaaggacuaguaauaaggaaacuguaugaaugucugugggcaggaagugaagagauccuucuguaaagguuuuuggaauuaugucugcugaauaauaaacuuuuuugaaauaauaaaucugguagaaaaaugagaucuaaaaaaaaaaaaaaaaaaaaaaaaaaaaaaaaaaaaaaaaaaaaaaaaaaaaaaaaaaaaaaaaugcaucccccccccccccccccccccccccccccccaaaggcucuuuucagagccaccagaauu

SEQ ID NO: 13383 - RNA, 640 nt, Artificial Sequence
  mRNA product Design b-4 comprising derived and/or modified sequence from LASV(AV;Clade V)__CCA30312__Z (opt11)
gggagagucccgcagucggcguccagcggcucugcuuguucgugugugugucguugcaggccuuauucaagcuuaccaugggcaaccgccaagccaaaaaccccgaagucgaaaacuccccccgcgccucccucauccccgacgccacccaccucggcccccaauucugcaaauccugcugguucgaaaacaaaggccucgucgaaugcaacaaccacuaccucugccucaacugccucucccuccuccucuccgucuccaaccgcugccccaucugcaaaaugccccuccccacccgccuccgccccaccaccacccccaccgccccccaaaucaucaaagaaaacaccaccaaccccccccccuacacccccuaaggacuaguaauaaggaaacuguaugaaugucugugggcaggaagugaagagauccuucuguaaagguuuuuggaauuaugucugcugaauaauaaacuuuuuugaaauaauaaaucugguagaaaaaugagaucuaaaaaaaaaaaaaaaaaaaaaaaaaaaaaaaaaaaaaaaaaaaaaaaaaaaaaaaaaaaaaaaaugcaucccccccccccccccccccccccccccccccaaaggcucuuuucagagccaccagaauu

SEQ ID NO: 13384 - RNA, 640 nt, Artificial Sequence
  mRNA product Design b-4 comprising derived and/or modified sequence from LASV(Togo/2016/7082;Clade VI)__AMR44579__Z (opt11)
gggagagucccgcagucggcguccagcggcucugcuuguucgugugugugucguugcaggccuuauucaagcuuaccaugggcgcccgccaaaccaaacaaccccaaaucgaaggcuccccccgcgccucccucguccccgacgccucccaccucggcccccaauucugcaaauccugcugguucgaaaacaaaggccucgucgaaugcaacaaccacuaccucugccucaacugccucucccuccuccuauccgucucaaaccgcugccccaucugcaaaaugccccuccccaccaaacuccgcgucuccuccgcccccuccgccccccccgccgccaccgcccaacccggcacccccccccccuacucccccuaaggacuaguaauaaggaaacuguaugaaugucugugggcaggaagugaagagauccuucuguaaagguuuuuggaauuaugucugcugaauaauaaacuuuuuugaaauaauaaaucugguagaaaaaugagaucuaaaaaaaaaaaaaaaaaaaaaaaaaaaaaaaaaaaaaaaaaaaaaaaaaaaaaaaaaaaaaaaaugcaucccccccccccccccccccccccccccccccaaaggcucuuuucagagccaccagaauu

SEQ ID NO: 13385 - RNA, 640 nt, Artificial Sequence
  mRNA product Design b-4 comprising derived and/or modified sequence from LASV(KAK-428;Clade n.d. (VII))__ANH09761__Z (opt11)
gggagagucccgcagucggcguccagcggcucugcuuguucgugugugugucguugcaggccuuauucaagcuuaccaugggcaacaaaggcaccaaacccacccaaaacuccgaacccucccgcgccaaccucguccccgacgccuccuaccucggcccccaauucugcaaauccugcugguucgaaaacaaaggccucgucgaaugcaacaaccacuaccucugccucaacugccucaccaugcuccucuccgucuccaaccgcugccccaucugcaaaaugccccuccccaccaaaaucaaagccuccggcucccccuccgccccccccaccgaagccaacuccgccgucucccccccccccuacacccccuaaggacuaguaauaaggaaacuguaugaaugucugugggcaggaagugaagagauccuucuguaaagguuuuuggaauuaugucugcugaauaauaaacuuuuuugaaauaauaaaucugguagaaaaaugagaucuaaaaaaaaaaaaaaaaaaaaaaaaaaaaaaaaaaaaaaaaaaaaaaaaaaaaaaaaaaaaaaaaugcaucccccccccccccccccccccccccccccccaaaggcucuuuucagagccaccagaauu

SEQ ID NO: 13386 - RNA, 640 nt, Artificial Sequence
  mRNA product Design b-4 comprising derived and/or modified sequence from LASV(ISTH0009-NIG-2011;Clade II)__AIT17402__Z (opt11)
gggagagucccgcagucggcguccagcggcucugcuuguucgugugugugucguugcaggccuuauucaagcuuaccaugggcaaccgccaagccaaauccaccaaagucgacgaacaccaacgcgcccaccucguccccgacgccucccaccucggcccccaauucugcaaauccugcugguucgaaaaccgcggccuagucgaaugcaacaaccacuaccucugccucaacugccucucccuccuccucuccgucuccucccgcugccccaucugcaaaaugccccuccccaccaaacucaaagccgccgcccaacccuccgcccccuccaccgaaaccauccaaaacaccacccccccccccuacacccccuaaggacuaguaauaaggaaacuguaugaaugucugugggcaggaagugaagagauccuucuguaaagguuuuuggaauuaugucugcugaauaauaaacuuuuuugaaauaauaaaucugguagaaaaaugagaucuaaaaaaaaaaaaaaaaaaaaaaaaaaaaaaaaaaaaaaaaaaaaaaaaaaaaaaaaaaaaaaaaugcaucccccccccccccccccccccccccccccccaaaggcucuuuucagagccaccagaauu

SEQ ID NO: 13387 - RNA, 640 nt, Artificial Sequence
  mRNA product Design b-4 comprising derived and/or modified sequence from LASV(ISTH2010-NIG-2012;Clade II)__AIT17480__Z (opt11)
gggagagucccgcagucggcguccagcggcucugcuuguucgugugugugucguugcaggccuuauucaagcuuaccaugggcaaccgccacgccaaauccaccaaagucgacgaacaccaacgcgcccaccucguccccgacgccucccaccuaggcccccaauucugcaaauccugcugguucgaaaaccgcggccucgucgaaugcaacaaccacuaccucugccucaacugccucucccuccuccucuccgucuccucccgcugccccaucugcaaaaugccccuccccaccaaacucaaagccgccgcccaaccauccgcccccuccaccgaagucauccaauccaccacccccccccccuacacccccuaaggacuaguaauaaggaaacuguaugaaugucugugggcaggaagugaagagauccuucuguaaagguuuuuggaauuaugucugcugaauaauaaacuuuuuugaaauaauaaaucugguagaaaaaugagaucuaaaaaaaaaaaaaaaaaaaaaaaaaaaaaaaaaaaaaaaaaaaaaaaaaaaaaaaaaaaaaaaaugcaucccccccccccccccccccccccccccccccaaaggcucuuuucagagccaccagaauu

SEQ ID NO: 13388 - RNA, 640 nt, Artificial Sequence
  mRNA product Design b-4 comprising derived and/or modified sequence from LASV(Lassa virus/H.sapiens-wt/NGA/2016/ISTH_0017;Clade II)__AVO03713__Z (opt11)
gggagagucccgcagucggcguccagcggcucugcuuguucgugugugugucguugcaggccuuauucaagcuuaccaugggcaaccgccaagccaaauccaccaaagucgacgaacaccaacgcgcccaccucguccccgacgccucccaccucggcccccaauucugcaaauccugcugguucgaaaaccgcggccucgucgaaugcaacaaccacuaccucugccucaacugccucucccuccuccucuccgucuccucccgcugccccaucugcaaaaugccccuccccaccaaacucaaagccgccacccaacccuccgcccccuccaccgaagucaaccaaaacaccacccccccccccuacacccccuaaggacuaguaauaaggaaacuguaugaaugucugugggcaggaagugaagagauccuucuguaaagguuuuuggaauuaugucugcugaauaauaaacuuuuuugaaauaauaaaucugguagaaaaaugagaucuaaaaaaaaaaaaaaaaaaaaaaaaaaaaaaaaaaaaaaaaaaaaaaaaaaaaaaaaaaaaaaaaugcaucccccccccccccccccccccccccccccccaaaggcucuuuucagagccaccagaauu

SEQ ID NO: 13389 - RNA, 640 nt, Artificial Sequence
  mRNA product Design b-4 comprising derived and/or modified sequence from LASV(Lassa virus/H.sapiens-wt/NGA/2018/ISTH_0959;Clade II)__AVV65084__Z (opt11)
gggagagucccgcagucggcguccagcggcucugcuuguucgugugugugucguugcaggccuuauucaagcuuaccaugggcaacaaacaagccaaauccaccaaagucgacgaacaccaacgcgcccaccucguccccgacgccucccaccucggcccccaauucugcaaauccugcugguucgaaaaccgcggccucgucgaaugcaacaaccacuaccucugccucaacugccucucccuccuccucuccgucuccucccgcugccccaucugcaaaaugccccuccccaccaaacucaaagccgccgcccaacccuccgcccccuccaccgaagccauccaauccaccacccccccccccuacacccccuaaggacuaguaauaaggaaacuguaugaaugucugugggcaggaagugaagagauccuucuguaaagguuuuuggaauuaugucugcugaauaauaaacuuuuuugaaauaauaaaucugguagaaaaaugagaucuaaaaaaaaaaaaaaaaaaaaaaaaaaaaaaaaaaaaaaaaaaaaaaaaaaaaaaaaaaaaaaaaugcaucccccccccccccccccccccccccccccccaaaggcucuuuucagagccaccagaauu

SEQ ID NO: 13390 - RNA, 640 nt, Artificial Sequence
  mRNA product Design b-4 comprising derived and/or modified sequence from LASV(LASV003-NIG-2008;Clade II)__AIT17578__Z (opt11)
gggagagucccgcagucggcguccagcggcucugcuuguucgugugugugucguugcaggccuuauucaagcuuaccaugggcaaccgccaagccaaauccaccaaagucgacgaacaccaacgcgcccaccucguccccgacgccucccaccucggcccccaauucugcaaaucaugcugguucgaaaacaaaggccucgucgaaugcaacaaccacuaccucugccucaacugccucucacuccuccucuccgucuccucccgcugccccaucugcaaaaugccccuccccaccaaacuccgcgccgccgcccaacccuccgcccccuccaccgaauccgcccaaaacaccgcccccccccccuacgcccccuaaggacuaguaauaaggaaacuguaugaaugucugugggcaggaagugaagagauccuucuguaaagguuuuuggaauuaugucugcugaauaauaaacuuuuuugaaauaauaaaucugguagaaaaaugagaucuaaaaaaaaaaaaaaaaaaaaaaaaaaaaaaaaaaaaaaaaaaaaaaaaaaaaaaaaaaaaaaaaugcaucccccccccccccccccccccccccccccccaaaggcucuuuucagagccaccagaauu

SEQ ID NO: 13391 - RNA, 640 nt, Artificial Sequence
  mRNA product Design b-4 comprising derived and/or modified sequence from LASV(LASV035-NIG-2009;Clade II)__AIT17586__Z (opt11)
gggagagucccgcagucggcguccagcggcucugcuuguucgugugugugucguugcaggccuuauucaagcuuaccaugggcaacaaacaagccaaauccaccaaagucgacgaacaccaacgcgcccaccucguccccgacgccucccaccucggcccccaauucugcaaauccugcugguucgaaaaccgcggccucgucgaaugcaacaaccacuaccucugccucaacugccucucccuccuccucuccgucuccucccgcugccccaucugcaaaaugccccuccccacccgccucaaagccgccgcccaacccuccgcccccuccaccgaagucacccaaaacaccacccccccccccuacacccccuaaggacuaguaauaaggaaacuguaugaaugucugugggcaggaagugaagagauccuucuguaaagguuuuuggaauuaugucugcugaauaauaaacuuuuuugaaauaauaaaucugguagaaaaaugagaucuaaaaaaaaaaaaaaaaaaaaaaaaaaaaaaaaaaaaaaaaaaaaaaaaaaaaaaaaaaaaaaaaugcaucccccccccccccccccccccccccccccccaaaggcucuuuucagagccaccagaauu

SEQ ID NO: 13392 - RNA, 640 nt, Artificial Sequence
  mRNA product Design b-4 comprising derived and/or modified sequence from LASV(LASV1000-NIG-2009;Clade II)__AIT17780__Z (opt11)
gggagagucccgcagucggcguccagcggcucugcuuguucgugugugugucguugcaggccuuauucaagcuuaccaugggcaaccgccaaaccaaauccaccaaagucgacgaacaccaacgcgcauaccucguccccgacgccucccuccucggcccccaauucugcaaauccugcugguucgaaaacaaaggccucgucgaaugcaacaaccacuaccucugccucaacugccucucccuccuccucuccgucuccucccgcugccccaucugcaaaaugccccuccccacccgccucaaagccgccgcccaacccuccgccccccccacagaagccauccaaaacaccacccccccccccuacacccccuaaggacuaguaauaaggaaacuguaugaaugucugugggcaggaagugaagagauccuucuguaaagguuuuuggaauuaugucugcugaauaauaaacuuuuuugaaauaauaaaucugguagaaaaaugagaucuaaaaaaaaaaaaaaaaaaaaaaaaaaaaaaaaaaaaaaaaaaaaaaaaaaaaaaaaaaaaaaaaugcaucccccccccccccccccccccccccccccccaaaggcucuuuucagagccaccagaauu

SEQ ID NO: 13393 - RNA, 640 nt, Artificial Sequence
  mRNA product Design b-4 comprising derived and/or modified sequence from LASV(LASV221-NIG-2010;Clade II)__AIT17622__Z (opt11)
gggagagucccgcagucggcguccagcggcucugcuuguucgugugugugucguugcaggccuuauucaagcuuaccaugggcaaccgccaagccaaauccaccaaagucgacgaacaccaacgcgcccaccucguccccgacgccucccaccucggcccccaauucugcaaauccugcugguucgaaaaccgcggccucgucgaaugcaacaaccacuaccucugccucaacugccuaucccuccuccucuccgucuccucccgcugccccaucugcaaaaugccccuccccaccaaacucaaagccgccacccaacccuccgcccccuccaccgaagucacccaaaacaccauccccccccccuacucccccuaaggacuaguaauaaggaaacuguaugaaugucugugggcaggaagugaagagauccuucuguaaagguuuuuggaauuaugucugcugaauaauaaacuuuuuugaaauaauaaaucugguagaaaaaugagaucuaaaaaaaaaaaaaaaaaaaaaaaaaaaaaaaaaaaaaaaaaaaaaaaaaaaaaaaaaaaaaaaaugcaucccccccccccccccccccccccccccccccaaaggcucuuuucagagccaccagaauu

SEQ ID NO: 13394 - RNA, 640 nt, Artificial Sequence
  mRNA product Design b-4 comprising derived and/or modified sequence from LASV(LASV237-NIG-2010;Clade II)__AIT17636__Z (opt11)
gggagagucccgcagucggcguccagcggcucugcuuguucgugugugugucguugcaggccuuauucaagcuuaccaugggcaaccgccaagccaaauccaccaaagucgacgaacaccaacgcgcccaccuaguccccgacgccucacaccucggcccccaauucugcaaauccugcugguucgaaaaccgcggccucgucgaaugcaacaaccacuaccucugccucaacugccucucccuccuccucuccgucuccucccgcugccccaucugcaaaaugccccuccccaccaaacucaaagccgcagcccaacccuccgcccccucaaucgaaaccauccaaaacaccacacccccccccuacacccccuaaggacuaguaauaaggaaacuguaugaaugucugugggcaggaagugaagagauccuucuguaaagguuuuuggaauuaugucugcugaauaauaaacuuuuuugaaauaauaaaucugguagaaaaaugagaucuaaaaaaaaaaaaaaaaaaaaaaaaaaaaaaaaaaaaaaaaaaaaaaaaaaaaaaaaaaaaaaaaugcaucccccccccccccccccccccccccccccccaaaggcucuuuucagagccaccagaauu

SEQ ID NO: 13395 - RNA, 640 nt, Artificial Sequence
  mRNA product Design b-4 comprising derived and/or modified sequence from LASV(LASV253-NIG-2011;Clade II)__AIT17668__Z (opt11)
gggagagucccgcagucggcguccagcggcucugcuuguucgugugugugucguugcaggccuuauucaagcuuaccaugggcaaccgccaagccaaauccacaaaagucgacgaacaccaacgcgcccaccucguccccgacgccucccaccucggcccccaauucugcaaauccugcugguucgaaaacaaaggccucgucgaaugcaacaaccacuaccucugccucaacugccucucccuccuccucuccgucuccucccgcugccccaucugcaaaaugccccuccccaccaaacucaaaaccaccgcccaacccuccgccccccccaccgaagccgccaaaaacaccgcccccccccccuacgcccccuaaggacuaguaauaaggaaacuguaugaaugucugugggcaggaagugaagagauccuucuguaaagguuuuuggaauuaugucugcugaauaauaaacuuuuuugaaauaauaaaucugguagaaaaaugagaucuaaaaaaaaaaaaaaaaaaaaaaaaaaaaaaaaaaaaaaaaaaaaaaaaaaaaaaaaaaaaaaaaugcaucccccccccccccccccccccccccccccccaaaggcucuuuucagagccaccagaauu

SEQ ID NO: 13396 - RNA, 640 nt, Artificial Sequence
  mRNA product Design b-4 comprising derived and/or modified sequence from LASV(G1180-SLE-2010;Clade IV)__AIT17166__Z (opt11)
gggagagucccgcagucggcguccagcggcucugcuuguucgugugugugucguugcaggccuuauucaagcuuaccaugggcaacaaacaagccaaagcccccgaagccaaagacuccccccgcgccucccucauccccgacgccacccaccucggcccccaauucugcaaauccugcugguucgaaaccaaaggccucgucgaaugcaacaaccacuaccucugccucaacugccucacccuccuccucuccgucuccaaccgcugccccaucugcaaaaugccccuccccaccaaacuccgccccuccgccacccccaccgccccccccaccgaagccgccgacuccaucggccccccccccuacucccccuaaggacuaguaauaaggaaacuguaugaaugucugugggcaggaagugaagagauccuucuguaaagguuuuuggaauuaugucugcugaauaauaaacuuuuuugaaauaauaaaucugguagaaaaaugagaucuaaaaaaaaaaaaaaaaaaaaaaaaaaaaaaaaaaaaaaaaaaaaaaaaaaaaaaaaaaaaaaaaugcaucccccccccccccccccccccccccccccccaaaggcucuuuucagagccaccagaauu

SEQ ID NO: 13397 - RNA, 640 nt, Artificial Sequence
  mRNA product Design b-4 comprising derived and/or modified sequence from LASV(G1442-SLE-2011;Clade IV)__AIT17178__Z (opt11)
gggagagucccgcagucggcguccagcggcucugcuuguucgugugugugucguugcaggccuuauucaagcuuaccaugggcaacaaacaagccaaagccuccgaagccaaagacuccccccgcgccucccucauccccgacgccacccaccucggcccccaauucugcaaauccugcugguucgaaaacaaaggccucgucgaaugcaacaaccacuaccucugccucaacugccucucccuccuccucuccgucuccucccgcugccccaucugcaaaaugccccuccccacccgccuccgccccuccaccgcccccaccgcaccccccgcccgcgccggcgacaacaucaaacccccccccuacucccccuaaggacuaguaauaaggaaacuguaugaaugucugugggcaggaagugaagagauccuucuguaaagguuuuuggaauuaugucugcugaauaauaaacuuuuuugaaauaauaaaucugguagaaaaaugagaucuaaaaaaaaaaaaaaaaaaaaaaaaaaaaaaaaaaaaaaaaaaaaaaaaaaaaaaaaaaaaaaaaugcaucccccccccccccccccccccccccccccccaaaggcucuuuucagagccaccagaauu

SEQ ID NO: 13398 - RNA, 640 nt, Artificial Sequence
  mRNA product Design b-4 comprising derived and/or modified sequence from LASV(G502-SLE-2009;Clade IV)__AIT17124__Z (opt11)
gggagagucccgcagucggcguccagcggcucugcuuguucgugugugugucguugcaggccuuauucaagcuuaccaugggcaacaaacaagucaaaacccccgaagccaaagacuccccccgcgccucccucauccccgacgccacccaccucggcccccaauucugcaaauccugcugguucgaaaacaaaggccucgucgaaugcaacaaccacuaccucugccucaacugccucacccuccuccucuccgucggcaaccgcugccccaucugcaaaaugccccuccccaccaaacuccgccccuccgucacccccaccgccccccccacccgcgccgccgacuccaucggccccccccccuacucccccuaaggacuaguaauaaggaaacuguaugaaugucugugggcaggaagugaagagauccuucuguaaagguuuuuggaauuaugucugcugaauaauaaacuuuuuugaaauaauaaaucugguagaaaaaugagaucuaaaaaaaaaaaaaaaaaaaaaaaaaaaaaaaaaaaaaaaaaaaaaaaaaaaaaaaaaaaaaaaaugcaucccccccccccccccccccccccccccccccaaaggcucuuuucagagccaccagaauu

SEQ ID NO: 13399 - RNA, 640 nt, Artificial Sequence
  mRNA product Design b-4 comprising derived and/or modified sequence from LASV(G733-SLE-2010;Clade IV)__AIT17152__Z (opt11)
gggagagucccgcagucggcguccagcggcucugcuuguucgugugugugucguugcaggccuuauucaagcuuaccaugggcaacaaacaagccaaaacccccgaaaccaaagacuccccccgcgccucacucauccccgacgccacccaccucggcccccaauucugcaaauccugcugguucgaaaacaaaggccucgucgaaugcaacaaccacuaccucugccucaacugccucacccuccuccucuccgucuccaaccgcugccccaucugcaaaaugccccuccccaccaaacuccgccccuccaccgcccccaccgccccccccgccggcgccgccgacaacacccgccccccccccuacucccccuaaggacuaguaauaaggaaacuguaugaaugucugugggcaggaagugaagagauccuucuguaaagguuuuuggaauuaugucugcugaauaauaaacuuuuuugaaauaauaaaucugguagaaaaaugagaucuaaaaaaaaaaaaaaaaaaaaaaaaaaaaaaaaaaaaaaaaaaaaaaaaaaaaaaaaaaaaaaaaugcaucccccccccccccccccccccccccccccccaaaggcucuuuucagagccaccagaauu

SEQ ID NO: 13400 - RNA, 652 nt, Artificial Sequence
  mRNA product Design b-4 comprising derived and/or modified sequence from MOPV/LASV reassortant(IGS-1;Clade IV)__AFY05533__Z (opt11)
gggagagucccgcagucggcguccagcggcucugcuuguucgugugugugucguugcaggccuuauucaagcuuaccaugggcaaaacccaauccaaaggccaacccuccaccaaccuacucaaagaaaccgaaccccgccaccccgucauccccgacgcccgcggcaccggccccgaauucugcaaauccugcugguucgaacgccgcggccucguccgcugcaacgaccacuaccucugccucaacugccucacccuccuccacaccgucuccgaccgcugccccaucugcaaacacaaacuccccuuccgccucgaacuccaaacccaacccaccgccccccccgaaaucccccccucccaaaaccccccccccuacucccccuaaggacuaguaauaaggaaacuguaugaaugucugugggcaggaagugaagagauccuucuguaaagguuuuuggaauuaugucugcugaauaauaaacuuuuuugaaauaauaaaucugguagaaaaaugagaucuaaaaaaaaaaaaaaaaaaaaaaaaaaaaaaaaaaaaaaaaaaaaaaaaaaaaaaaaaaaaaaaaugcaucccccccccccccccccccccccccccccccaaaggcucuuuucagagccaccagaauu

SEQ ID NO: 13401 - RNA, 640 nt, Artificial Sequence
  mRNA product Design b-4 comprising derived and/or modified sequence from LASV(LM776-SLE-2012;Clade IV)__AIT17824__Z (opt11)
gggagagucccgcagucggcguccagcggcucugcuuguucgugugugugucguugcaggccuuauucaagcuuaccaugggcaacaaacaagccaaagccuccgaagaaaaaaacuccccccgcgccucccucauccccgacgccacccaccucggcccccaauucugcaaauccugcugguucgaaaacaaaggccuagucgaaugcaacaaccacuaccucugccucaacugccucacccuccuccucucagucuccaaccgcugccccaucugcaaaaugccccuccccaccaaacuccgccccuccaccacccccaccgccccccccaccggcgccgccgacuccauccgccccccccccuacucccccuaaggacuaguaauaaggaaacuguaugaaugucugugggcaggaagugaagagauccuucuguaaagguuuuuggaauuaugucugcugaauaauaaacuuuuuugaaauaauaaaucugguagaaaaaugagaucuaaaaaaaaaaaaaaaaaaaaaaaaaaaaaaaaaaaaaaaaaaaaaaaaaaaaaaaaaaaaaaaaugcaucccccccccccccccccccccccccccccccaaaggcucuuuucagagccaccagaauu

SEQ ID NO: 13402 - RNA, 640 nt, Artificial Sequence
  mRNA product Design b-4 comprising derived and/or modified sequence from LASV(Mad39;Clade IV)__ANH09743__Z (opt11)
gggagagucccgcagucggcguccagcggcucugcuuguucgugugugugucguugcaggccuuauucaagcuuaccaugggcaacaaacaagccaaagccuccgaagucgaagacggcccccgcgccucccucauccccgacgccacccaccucggcccccaauucugcaaauccugcugguucgaaaacaaaucccucgucgaaugcaacaaccacuaccucugccuaaacugccucacccuccuccucuccgucuccaaccgcugccccaucugcaaaaugccccuccccacccgccucaaacccuccgucguccccaccgccccccccacccgcgccggcgacggcacccgccccccccccuacucccccuaaggacuaguaauaaggaaacuguaugaaugucugugggcaggaagugaagagauccuucuguaaagguuuuuggaauuaugucugcugaauaauaaacuuuuuugaaauaauaaaucugguagaaaaaugagaucuaaaaaaaaaaaaaaaaaaaaaaaaaaaaaaaaaaaaaaaaaaaaaaaaaaaaaaaaaaaaaaaaugcaucccccccccccccccccccccccccccccccaaaggcucuuuucagagccaccagaauu

SEQ ID NO: 13403 - RNA, 640 nt, Artificial Sequence
  mRNA product Design b-4 comprising derived and/or modified sequence from LASV(Z0947-SLE-2011;Clade IV)__AIT17838__Z (opt11)
gggagagucccgcagucggcguccagcggcucugcuuguucgugugugugucguugcaggccuuauucaagcuuaccaugggcaacaaacaagccaaaguccccgaauccaaagacuccccccgcgccucccucauccccgacgccacccaccucggcccccaauucugcaaauccugcugguucgaaaacaaaggccucgucgaaugcaacaaccacuaccucugccucaacugccucacccuccuccucuccgucuccaaccgcugccccaucugcaaaaugccccuccccaccaaacucaaacccuccgccgcccccaccgccccccccaccggcgccgccgacuccauccgccccccccccuacuccccauaaggacuaguaauaaggaaacuguaugaaugucugugggcaggaagugaagagauccuucuguaaagguuuuuggaauuaugucugcugaauaauaaacuuuuuugaaauaauaaaucugguagaaaaaugagaucuaaaaaaaaaaaaaaaaaaaaaaaaaaaaaaaaaaaaaaaaaaaaaaaaaaaaaaaaaaaaaaaaugcaucccccccccccccccccccccccccccccccaaaggcucuuuucagagccaccagaauu

SEQ ID NO: 13404 - RNA, 682 nt, Artificial Sequence
  mRNA product Design i-2 comprising derived and/or modified sequence from LASV(Josiah;Clade IV)__ADY11072/NP_694871__Z (wt)
ggggcgcugccuacggagguggcagccaucuccuucucggcaucaagcuuaccaugggaaacaagcaagccaaagccccagaaucaaaagacaguccgagagccagccugaucccagaugccacacaucuagggccacaguucuguaagagcugcugguucgaaaacaagggccugguugagugcaacaaccacuaucugugucucaacugccucaccuuacuucuaagugucagcaacaggugucccauuugcaagaugccucuccccacaaaacugagaccaucagccgcuccaacagcaccuccaaccggagcagcggacagcaucagacccccacccuacagucccugaggacuagugcaucacauuuaaaagcaucucagccuaccaugagaauaagagaaagaaaaugaagaucaauagcuuauucaucucuuuuucuuuuucguugguguaaagccaacacccugucuaaaaaacauaaauuucuuuaaucauuuugccucuuuucucugugcuucaauuaauaaaaaauggaaagaaccuagaucuaaaaaaaaaaaaaaaaaaaaaaaaaaaaaaaaaaaaaaaaaaaaaaaaaaaaaaaaaaaaaaaaugcaucccccccccccccccccccccccccccccccaaaggcucuuuucagagccaccagaauu

SEQ ID NO: 13405 - RNA, 685 nt, Artificial Sequence
  mRNA product Design i-2 comprising derived and/or modified sequence from LASV(Pinneo-NIG-1969;Clade I)__AIT17834__Z (wt)
ggggcgcugccuacggagguggcagccaucuccuucucggcaucaagcuuaccaugggcaacaagcagaccagguccccacccaaaccagagcaccccagaccaacccugcuacccgacgcaucccaccugggcccccaauucugcaagagcugcugguuugagaacaagggacugguggaguguaauaaccauuaccucugucuaaacugucucacacugcuucucagcgugagcgacagauguccuauuuguaagaugccccuccccaccaagcuggcaguccgaacccaaccaagugcacccccacucaaccagggcaacacucaauccuccccgccccccuacagccccuaaggacuagugcaucacauuuaaaagcaucucagccuaccaugagaauaagagaaagaaaaugaagaucaauagcuuauucaucucuuuuucuuuuucguugguguaaagccaacacccugucuaaaaaacauaaauuucuuuaaucauuuugccucuuuucucugugcuucaauuaauaaaaaauggaaagaaccuagaucuaaaaaaaaaaaaaaaaaaaaaaaaaaaaaaaaaaaaaaaaaaaaaaaaaaaaaaaaaaaaaaaaugcaucccccccccccccccccccccccccccccccaaaggcucuuuucagagccaccagaauu

SEQ ID NO: 13406 - RNA, 682 nt, Artificial Sequence
  mRNA product Design i-2 comprising derived and/or modified sequence from LASV(Nig08-04;Clade II)__ADU56612__Z (wt)
ggggcgcugccuacggagguggcagccaucuccuucucggcaucaagcuuaccaugggcaacaggcaaaccaggccaacugaagccacugaacagagcagggcucacuugguaccagacgcaucccaccugggaccccaauucugcaagagcuguugguuugaaaacagaggucuaguggagugcaacaaccacuaccugugucucaacugucucaguuugcuccucagugucagcagcagauguccaaucugcaagaugccccuucccaccaggcugaaggcaucagcacagcccagcgcacccccaaccgaagcaccccagaacacaacacccccaccauacaccccauaaggacuagugcaucacauuuaaaagcaucucagccuaccaugagaauaagagaaagaaaaugaagaucaauagcuuauucaucucuuuuucuuuuucguugguguaaagccaacacccugucuaaaaaacauaaauuucuuuaaucauuuugccucuuuucucugugcuucaauuaauaaaaaauggaaagaaccuagaucuaaaaaaaaaaaaaaaaaaaaaaaaaaaaaaaaaaaaaaaaaaaaaaaaaaaaaaaaaaaaaaaaugcaucccccccccccccccccccccccccccccccaaaggcucuuuucagagccaccagaauu

SEQ ID NO: 13407 - RNA, 682 nt, Artificial Sequence
  mRNA product Design i-2 comprising derived and/or modified sequence from LASV(Nig08-A19;Clade III)__ADU56620__Z (wt)
ggggcgcugccuacggagguggcagccaucuccuucucggcaucaagcuuaccauggguggcaaacacaccaaaccacagagagaauccaacagucccagagccucucuaauucccgaugcaacacaccugggcccucaauuuugcaagaguuguugguuugagaacaaaggucugguggagugcaacaaccauuacuuaugccucaacugccuuacuuuacuccugucugucagcaacagaugccccaucuguaagaugccccuccccacgaggcugagagcaucaaccaacccaacagcaccccaggucgaacaagucggcccuacaaauccuccaccauacagucccuaaggacuagugcaucacauuuaaaagcaucucagccuaccaugagaauaagagaaagaaaaugaagaucaauagcuuauucaucucuuuuucuuuuucguugguguaaagccaacacccugucuaaaaaacauaaauuucuuuaaucauuuugccucuuuucucugugcuucaauuaauaaaaaauggaaagaaccuagaucuaaaaaaaaaaaaaaaaaaaaaaaaaaaaaaaaaaaaaaaaaaaaaaaaaaaaaaaaaaaaaaaaugcaucccccccccccccccccccccccccccccccaaaggcucuuuucagagccaccagaauu

SEQ ID NO: 13408 - RNA, 682 nt, Artificial Sequence
  mRNA product Design i-2 comprising derived and/or modified sequence from LASV(AV;Clade V)__CCA30312__Z (wt)
ggggcgcugccuacggagguggcagccaucuccuucucggcaucaagcuuaccauggggaacagacaagccaaaaauccagagguggagaacagcccaagggcuagucuaauuccggaugccacgcaccuugggccacaguucugcaagagcugcugguucgaaaacaaagguuuaguugaguguaauaaccacuaucuuugccucaacugccucuccuugcuuuuaagcgucagcaacaggugcccuaucugcaagaugccccuucccacgaggcugagaccgacaaccacaccaacagcgccacagaucaucaaggaaaacaccaccaaccccccgccauacacacccuaaggacuagugcaucacauuuaaaagcaucucagccuaccaugagaauaagagaaagaaaaugaagaucaauagcuuauucaucucuuuuucuuuuucguugguguaaagccaacacccugucuaaaaaacauaaauuucuuuaaucauuuugccucuuuucucugugcuucaauuaauaaaaaauggaaagaaccuagaucuaaaaaaaaaaaaaaaaaaaaaaaaaaaaaaaaaaaaaaaaaaaaaaaaaaaaaaaaaaaaaaaaugcaucccccccccccccccccccccccccccccccaaaggcucuuuucagagccaccagaauu

SEQ ID NO: 13409 - RNA, 682 nt, Artificial Sequence
  mRNA product Design i-2 comprising derived and/or modified sequence from LASV(Togo/2016/7082;Clade VI)__AMR44579__Z (wt)
ggggcgcugccuacggagguggcagccaucuccuucucggcaucaagcuuaccaugggagccagacagaccaagcaaccucagauugagggaucuccuagagccucucuggugcccgaugcaagccaucuaggaccccaguucugcaagagcugcugguuugagaacaaagggcuuguggaguguaacaaucauuaccuuugccucaauugccucagccuccuacucagugucagcaacaggugcccuaucugcaagaugccccuccccaccaagcugagagugucaagcgcucccagugcacccccagcggccacggcccaacccggaacuccuccaccauacagccccuagggacuagugcaucacauuuaaaagcaucucagccuaccaugagaauaagagaaagaaaaugaagaucaauagcuuauucaucucuuuuucuuuuucguugguguaaagccaacacccugucuaaaaaacauaaauuucuuuaaucauuuugccucuuuucucugugcuucaauuaauaaaaaauggaaagaaccuagaucuaaaaaaaaaaaaaaaaaaaaaaaaaaaaaaaaaaaaaaaaaaaaaaaaaaaaaaaaaaaaaaaaugcaucccccccccccccccccccccccccccccccaaaggcucuuuucagagccaccagaauu

SEQ ID NO: 13410 - RNA, 682 nt, Artificial Sequence
  mRNA product Design i-2 comprising derived and/or modified sequence from LASV(KAK-428;Clade n.d. (VII))__ANH09761__Z (wt)
ggggcgcugccuacggagguggcagccaucuccuucucggcaucaagcuuaccaugggcaacaaagggaccaaacccacccagaacucagaacccagcagggccaaccuagugccugaugcaagcuacuuaggaccccaguucugcaagaguugcugguuugaaaacaaagggcugguggaguguaacaaucauuaucucugccucaacugucucacaaugcuucucucugucagcaacaggugcccaaucugcaaaaugccgcuucccaccaaaauaaaggccucaggaagccccagcgcuccuccgaccgaggccaacuccgcagucagccccccuccauacacccccuaaggacuagugcaucacauuuaaaagcaucucagccuaccaugagaauaagagaaagaaaaugaagaucaauagcuuauucaucucuuuuucuuuuucguugguguaaagccaacacccugucuaaaaaacauaaauuucuuuaaucauuuugccucuuuucucugugcuucaauuaauaaaaaauggaaagaaccuagaucuaaaaaaaaaaaaaaaaaaaaaaaaaaaaaaaaaaaaaaaaaaaaaaaaaaaaaaaaaaaaaaaaugcaucccccccccccccccccccccccccccccccaaaggcucuuuucagagccaccagaauu

SEQ ID NO: 13411 - RNA, 682 nt, Artificial Sequence
  mRNA product Design i-2 comprising derived and/or modified sequence from LASV(ISTH0009-NIG-2011;Clade II)__AIT17402__Z (wt)
ggggcgcugccuacggagguggcagccaucuccuucucggcaucaagcuuaccaugggcaacagacaggcuaaaucgacaaaagucgaugaacaucaaagagcucaucuagugccagaugcaucccaucuaggcccccaguucugcaagaguugcugguuugagaacagaggguugguagaguguaacaaucacuaccugugucucaacugucucagccugcuucucagcgucagcaguagaugcccgaucugcaagaugccccuucccaccaagcuaaaggcagcagcacagccgagcgcaccaucaaccgagacgauccagaacacaacaccuccaccguacaccccauaaggacuagugcaucacauuuaaaagcaucucagccuaccaugagaauaagagaaagaaaaugaagaucaauagcuuauucaucucuuuuucuuuuucguugguguaaagccaacacccugucuaaaaaacauaaauuucuuuaaucauuuugccucuuuucucugugcuucaauuaauaaaaaauggaaagaaccuagaucuaaaaaaaaaaaaaaaaaaaaaaaaaaaaaaaaaaaaaaaaaaaaaaaaaaaaaaaaaaaaaaaaugcaucccccccccccccccccccccccccccccccaaaggcucuuuucagagccaccagaauu

SEQ ID NO: 13412 - RNA, 682 nt, Artificial Sequence
  mRNA product Design i-2 comprising derived and/or modified sequence from LASV(ISTH2010-NIG-2012;Clade II)__AIT17480__Z (wt)
ggggcgcugccuacggagguggcagccaucuccuucucggcaucaagcuuaccauggguaacagacaugccaaaucgacaaaagucgaugaacaucaaagagcucaucuagugccagaugcaucccaucuaggcccccaguucugcaagaguugcugguuugagaauagaggguugguagagugcaacaaucacuaccugugucucaacugucucagccugcuccucagugucagcagcagaugcccgaucugcaagaugccccuucccaccaagcuaaaggcagcagcacagccgagcgcaccauccaccgaggugauccagagcacaacaccuccaccauacaccccauaaggacuagugcaucacauuuaaaagcaucucagccuaccaugagaauaagagaaagaaaaugaagaucaauagcuuauucaucucuuuuucuuuuucguugguguaaagccaacacccugucuaaaaaacauaaauuucuuuaaucauuuugccucuuuucucugugcuucaauuaauaaaaaauggaaagaaccuagaucuaaaaaaaaaaaaaaaaaaaaaaaaaaaaaaaaaaaaaaaaaaaaaaaaaaaaaaaaaaaaaaaaugcaucccccccccccccccccccccccccccccccaaaggcucuuuucagagccaccagaauu

SEQ ID NO: 13413 - RNA, 682 nt, Artificial Sequence
  mRNA product Design i-2 comprising derived and/or modified sequence from LASV(Lassa virus/H.sapiens-wt/NGA/2016/ISTH_0017;Clade II)__AVO03713__Z (wt)
ggggcgcugccuacggagguggcagccaucuccuucucggcaucaagcuuaccaugggcaauagacaggccaagucgacaaaagucgaugaacaucaaagagcucaucuagugccagaugcaucccaucuaggcccccaguucugcaaaaguugcugguuugagaacaggggguuaguagagugcaacaaucacuaccugugucucaacugucucagccuacuccucagcgucaguagcagaugcccgaucugcaagaugccccuucccaccaagcuaaaggcggcaacacagccgagcgcaccaucaaccgaggugaaccagaauacaacaccuccaccguacacuccaugaggacuagugcaucacauuuaaaagcaucucagccuaccaugagaauaagagaaagaaaaugaagaucaauagcuuauucaucucuuuuucuuuuucguugguguaaagccaacacccugucuaaaaaacauaaauuucuuuaaucauuuugccucuuuucucugugcuucaauuaauaaaaaauggaaagaaccuagaucuaaaaaaaaaaaaaaaaaaaaaaaaaaaaaaaaaaaaaaaaaaaaaaaaaaaaaaaaaaaaaaaaugcaucccccccccccccccccccccccccccccccaaaggcucuuuucagagccaccagaauu

SEQ ID NO: 13414 - RNA, 682 nt, Artificial Sequence
  mRNA product Design i-2 comprising derived and/or modified sequence from LASV(Lassa virus/H.sapiens-wt/NGA/2018/ISTH_0959;Clade II)__AVV65084__Z (wt)
ggggcgcugccuacggagguggcagccaucuccuucucggcaucaagcuuaccaugggcaacaaacaggccaaaucgacaaaagucgacgaacaucaaagggcucaucuaguaccggaugcaucccaucuaggcccccaguucugcaagaguugcugguuugagaacagaggguugguagagugcaacaaucacuaccugugucucaacugucucagccugcuucucagugucagcagcagaugcccgaucugcaagaugccccuucccaccaagcuaaaggcagcagcacagccgagcgcaccaucaacagaggcgauccagagcacaacaccuccaccguacacuccauaaggacuagugcaucacauuuaaaagcaucucagccuaccaugagaauaagagaaagaaaaugaagaucaauagcuuauucaucucuuuuucuuuuucguugguguaaagccaacacccugucuaaaaaacauaaauuucuuuaaucauuuugccucuuuucucugugcuucaauuaauaaaaaauggaaagaaccuagaucuaaaaaaaaaaaaaaaaaaaaaaaaaaaaaaaaaaaaaaaaaaaaaaaaaaaaaaaaaaaaaaaaugcaucccccccccccccccccccccccccccccccaaaggcucuuuucagagccaccagaauu

SEQ ID NO: 13415 - RNA, 682 nt, Artificial Sequence
  mRNA product Design i-2 comprising derived and/or modified sequence from LASV(LASV003-NIG-2008;Clade II)__AIT17578__Z (wt)
ggggcgcugccuacggagguggcagccaucuccuucucggcaucaagcuuaccaugggcaacagacaggcuaaaucaacaaaagucgaugaacaucaaagagcucaucuagugccagaugcaucccaucuaggcccccaguuuugcaaaaguugcugguuugagaacaagggguugguggagugcaacaaccacuaccugugucucaacugucucagccugcuccucagcgucagcaguagaugcccgaucugcaagaugccccuucccaccaagcugagggcagcagcacagccgagcgcacccucaacugagucggcucagaacacagcaccuccaccguaugccccaugaggacuagugcaucacauuuaaaagcaucucagccuaccaugagaauaagagaaagaaaaugaagaucaauagcuuauucaucucuuuuucuuuuucguugguguaaagccaacacccugucuaaaaaacauaaauuucuuuaaucauuuugccucuuuucucugugcuucaauuaauaaaaaauggaaagaaccuagaucuaaaaaaaaaaaaaaaaaaaaaaaaaaaaaaaaaaaaaaaaaaaaaaaaaaaaaaaaaaaaaaaaugcaucccccccccccccccccccccccccccccccaaaggcucuuuucagagccaccagaauu

SEQ ID NO: 13416 - RNA, 682 nt, Artificial Sequence
  mRNA product Design i-2 comprising derived and/or modified sequence from LASV(LASV035-NIG-2009;Clade II)__AIT17586__Z (wt)
ggggcgcugccuacggagguggcagccaucuccuucucggcaucaagcuuaccaugggcaacaaacaggccaaaucgacaaaagucgaugaacaucaaagagcucaucuagugccagaugcaucucaucuaggcccccaguucuguaagagcugcugguuugagaacagagggcugguagagugcaacaaccacuaccugugucucaacugucucagccugcuucucagcgucagcagcagguguccgaucugcaaaaugccccuucccaccaggcugaaggcagcagcacagccgagcgcacccucaaccgaggugacccagaacacaacaccuccaccguacaccccgugaggacuagugcaucacauuuaaaagcaucucagccuaccaugagaauaagagaaagaaaaugaagaucaauagcuuauucaucucuuuuucuuuuucguugguguaaagccaacacccugucuaaaaaacauaaauuucuuuaaucauuuugccucuuuucucugugcuucaauuaauaaaaaauggaaagaaccuagaucuaaaaaaaaaaaaaaaaaaaaaaaaaaaaaaaaaaaaaaaaaaaaaaaaaaaaaaaaaaaaaaaaugcaucccccccccccccccccccccccccccccccaaaggcucuuuucagagccaccagaauu

SEQ ID NO: 13417 - RNA, 682 nt, Artificial Sequence
  mRNA product Design i-2 comprising derived and/or modified sequence from LASV(LASV1000-NIG-2009;Clade II)__AIT17780__Z (wt)
ggggcgcugccuacggagguggcagccaucuccuucucggcaucaagcuuaccaugggcaacagacagaccaaaucgacaaaagucgaugaacaucaaagagcuuaucuagugccagaugcaucccuucuaggcccccaguucugcaagaguugcugguuugagaacaaaggguugguagaaugcaacaaucacuaccugugucuuaacugucucagccugcuccucagcgucagcagcagaugcccgaucugcaagaugccucuucccaccaggcuaaaggcagcagcacagccgagugcaccaccaacugaggcgauccagaacacaacaccuccaccguacaccccauaaggacuagugcaucacauuuaaaagcaucucagccuaccaugagaauaagagaaagaaaaugaagaucaauagcuuauucaucucuuuuucuuuuucguugguguaaagccaacacccugucuaaaaaacauaaauuucuuuaaucauuuugccucuuuucucugugcuucaauuaauaaaaaauggaaagaaccuagaucuaaaaaaaaaaaaaaaaaaaaaaaaaaaaaaaaaaaaaaaaaaaaaaaaaaaaaaaaaaaaaaaaugcaucccccccccccccccccccccccccccccccaaaggcucuuuucagagccaccagaauu

SEQ ID NO: 13418 - RNA, 682 nt, Artificial Sequence
  mRNA product Design i-2 comprising derived and/or modified sequence from LASV(LASV221-NIG-2010;Clade II)__AIT17622__Z (wt)
ggggcgcugccuacggagguggcagccaucuccuucucggcaucaagcuuaccaugggcaacagacaggccaaaucgacaaaagucgaugaacaucaaagagcucaucuagugccagaugcaucccaucucggcccucaauucugcaagaguugcugguuugagaacagagggcugguagagugcaacaaucacuaccugugucucaacugucucagccugcuccucagcgucagcagcagaugcccgaucugcaagaugccccuucccaccaagcuaaaagcagcaacacagccgagcgcaccaucaaccgaagugacccagaacacaauaccuccaccauacuccccaugaggacuagugcaucacauuuaaaagcaucucagccuaccaugagaauaagagaaagaaaaugaagaucaauagcuuauucaucucuuuuucuuuuucguugguguaaagccaacacccugucuaaaaaacauaaauuucuuuaaucauuuugccucuuuucucugugcuucaauuaauaaaaaauggaaagaaccuagaucuaaaaaaaaaaaaaaaaaaaaaaaaaaaaaaaaaaaaaaaaaaaaaaaaaaaaaaaaaaaaaaaaugcaucccccccccccccccccccccccccccccccaaaggcucuuuucagagccaccagaauu

SEQ ID NO: 13419 - RNA, 682 nt, Artificial Sequence
  mRNA product Design i-2 comprising derived and/or modified sequence from LASV(LASV237-NIG-2010;Clade II)__AIT17636__Z (wt)
ggggcgcugccuacggagguggcagccaucuccuucucggcaucaagcuuaccaugggcaacagacaggcuaaaucgacaaaagucgaugaacaucaaagagcucaucuagugccagaugcaucccaucuaggcccccaguucugcaagaguuguugguuugagaacagaggguugguagaguguaacaaucacuaccugugucucaacugucucagccugcuucucagcgucagcaguagaugcccgaucugcaagaugccccuucccaccaagcuaaaggcagcagcacagccgagcgcaccaucaaucgagacgauccagaacacaacaccuccuccguacaccccauaaggacuagugcaucacauuuaaaagcaucucagccuaccaugagaauaagagaaagaaaaugaagaucaauagcuuauucaucucuuuuucuuuuucguugguguaaagccaacacccugucuaaaaaacauaaauuucuuuaaucauuuugccucuuuucucugugcuucaauuaauaaaaaauggaaagaaccuagaucuaaaaaaaaaaaaaaaaaaaaaaaaaaaaaaaaaaaaaaaaaaaaaaaaaaaaaaaaaaaaaaaaugcaucccccccccccccccccccccccccccccccaaaggcucuuuucagagccaccagaauu

SEQ ID NO: 13420 - RNA, 682 nt, Artificial Sequence
  mRNA product Design i-2 comprising derived and/or modified sequence from LASV(LASV253-NIG-2011;Clade II)__AIT17668__Z (wt)
ggggcgcugccuacggagguggcagccaucuccuucucggcaucaagcuuaccauggguaacagacaggccaaaucaacaaaagucgaugaacaucaaagagcucaucuagugccagaugcaucccaucuaggcccccaguuuugcaaaaguugcugguuugagaacaagggguugguugagugcaacaaccacuaccugugucucaacugucucagccugcuccuuagcguuagcagcagaugcccgauuugcaagaugccccuccccaccaagcuaaagacaacagcacagccaagugcacccccgacugaggcggccaagaacacagcaccuccaccguaugccccaugaggacuagugcaucacauuuaaaagcaucucagccuaccaugagaauaagagaaagaaaaugaagaucaauagcuuauucaucucuuuuucuuuuucguugguguaaagccaacacccugucuaaaaaacauaaauuucuuuaaucauuuugccucuuuucucugugcuucaauuaauaaaaaauggaaagaaccuagaucuaaaaaaaaaaaaaaaaaaaaaaaaaaaaaaaaaaaaaaaaaaaaaaaaaaaaaaaaaaaaaaaaugcaucccccccccccccccccccccccccccccccaaaggcucuuuucagagccaccagaauu

SEQ ID NO: 13421 - RNA, 682 nt, Artificial Sequence
  mRNA product Design i-2 comprising derived and/or modified sequence from LASV(G1180-SLE-2010;Clade IV)__AIT17166__Z (wt)
ggggcgcugccuacggagguggcagccaucuccuucucggcaucaagcuuaccaugggaaacaagcaagccaaagccccggaagcaaaagacaguccgagagccagccugaucccagaugccacacaccuagggccacaguuuugcaagagcugcugguucgaaaccaagggccugguugagugcaacaaccacuaucuaugucucaauugccucacuuuacuucuaagugucagcaauaggugccccauuugcaagaugccccuucccacaaaacugagaccgucagccacuccaacggcacccccaaccgaagcugcggacagcaucggacccccacccuacagucccugaggacuagugcaucacauuuaaaagcaucucagccuaccaugagaauaagagaaagaaaaugaagaucaauagcuuauucaucucuuuuucuuuuucguugguguaaagccaacacccugucuaaaaaacauaaauuucuuuaaucauuuugccucuuuucucugugcuucaauuaauaaaaaauggaaagaaccuagaucuaaaaaaaaaaaaaaaaaaaaaaaaaaaaaaaaaaaaaaaaaaaaaaaaaaaaaaaaaaaaaaaaugcaucccccccccccccccccccccccccccccccaaaggcucuuuucagagccaccagaauu

SEQ ID NO: 13422 - RNA, 682 nt, Artificial Sequence
  mRNA product Design i-2 comprising derived and/or modified sequence from LASV(G1442-SLE-2011;Clade IV)__AIT17178__Z (wt)
ggggcgcugccuacggagguggcagccaucuccuucucggcaucaagcuuaccauggggaacaagcaagccaaagcuucagaagcaaaagacagcccgagggcuagucugauuccagaugccacacaccuaggaccacaguucuguaagagcuguugguuugagaacaagggccugguugaaugcaacaaucacuaucugugucucaacugccucagucugcuucugagugucagcagcaggugccccaucugcaaaaugccccucccgacaagacugaggccaucaacagccccaacagcacccccagccagagcaggggauaacaucaaacccccacccuacagucccugaggacuagugcaucacauuuaaaagcaucucagccuaccaugagaauaagagaaagaaaaugaagaucaauagcuuauucaucucuuuuucuuuuucguugguguaaagccaacacccugucuaaaaaacauaaauuucuuuaaucauuuugccucuuuucucugugcuucaauuaauaaaaaauggaaagaaccuagaucuaaaaaaaaaaaaaaaaaaaaaaaaaaaaaaaaaaaaaaaaaaaaaaaaaaaaaaaaaaaaaaaaugcaucccccccccccccccccccccccccccccccaaaggcucuuuucagagccaccagaauu

SEQ ID NO: 13423 - RNA, 682 nt, Artificial Sequence
  mRNA product Design i-2 comprising derived and/or modified sequence from LASV(G502-SLE-2009;Clade IV)__AIT17124__Z (wt)
ggggcgcugccuacggagguggcagccaucuccuucucggcaucaagcuuaccaugggaaacaagcaagucaaaaccccggaagcaaaagacaguccgagagccagccugaucccagaugccacacaccuagggccacaguucugcaagagcugcugguucgaaaacaagggccugguugagugcaacaaccacuaucugugucucaacugccucacuuuacuucuaaguguuggcaacaggugccccauuugcaagaugccccuucccacaaaacugagaccaucagucacuccaacagcacccccaaccagagcagcggacagcaucggacccccacccuacagucccugaggacuagugcaucacauuuaaaagcaucucagccuaccaugagaauaagagaaagaaaaugaagaucaauagcuuauucaucucuuuuucuuuuucguugguguaaagccaacacccugucuaaaaaacauaaauuucuuuaaucauuuugccucuuuucucugugcuucaauuaauaaaaaauggaaagaaccuagaucuaaaaaaaaaaaaaaaaaaaaaaaaaaaaaaaaaaaaaaaaaaaaaaaaaaaaaaaaaaaaaaaaugcaucccccccccccccccccccccccccccccccaaaggcucuuuucagagccaccagaauu

SEQ ID NO: 13424 - RNA, 682 nt, Artificial Sequence
  mRNA product Design i-2 comprising derived and/or modified sequence from LASV(G733-SLE-2010;Clade IV)__AIT17152__Z (wt)
ggggcgcugccuacggagguggcagccaucuccuucucggcaucaagcuuaccaugggaaacaagcaagccaagaccccagaaacaaaagacaguccgagagccagccugaucccagaugccacacaccuagggccacaguuuugcaagagcugcugguucgaaaacaagggccugguugagugcaauaaccacuaucugugccucaauugucuuacccuacuucuaagugucagcaacaggugucccauuugcaagaugccucuccccacaaaacugagaccaucaaccgccccaacagcacccccagccggagcagcggacaacaccagacccccacccuauagccccugaggacuagugcaucacauuuaaaagcaucucagccuaccaugagaauaagagaaagaaaaugaagaucaauagcuuauucaucucuuuuucuuuuucguugguguaaagccaacacccugucuaaaaaacauaaauuucuuuaaucauuuugccucuuuucucugugcuucaauuaauaaaaaauggaaagaaccuagaucuaaaaaaaaaaaaaaaaaaaaaaaaaaaaaaaaaaaaaaaaaaaaaaaaaaaaaaaaaaaaaaaaugcaucccccccccccccccccccccccccccccccaaaggcucuuuucagagccaccagaauu

SEQ ID NO: 13425 - RNA, 694 nt, Artificial Sequence
  mRNA product Design i-2 comprising derived and/or modified sequence from MOPV/LASV reassortant(IGS-1;Clade IV)__AFY05533__Z (wt)
ggggcgcugccuacggagguggcagccaucuccuucucggcaucaagcuuaccauggggaaaacgcaguccaagggacagcccagcacaaaucuccucaaggagacagaaccaaggcauccaguaauaccagaugccaggggaacuggcccugaauucugcaagagcugcugguucgaaaggaggggguuagucaggugcaacgaucacuaccuauguuugaacugucuuacacuuuuacacacagugucagauaggugccccaucugcaaacacaaacuacccuucagacuagagcuccagacccagccgacagcaccaccagaaaucccaccaucccaaaaucccccacccuacagccccugaggacuagugcaucacauuuaaaagcaucucagccuaccaugagaauaagagaaagaaaaugaagaucaauagcuuauucaucucuuuuucuuuuucguugguguaaagccaacacccugucuaaaaaacauaaauuucuuuaaucauuuugccucuuuucucugugcuucaauuaauaaaaaauggaaagaaccuagaucuaaaaaaaaaaaaaaaaaaaaaaaaaaaaaaaaaaaaaaaaaaaaaaaaaaaaaaaaaaaaaaaaugcaucccccccccccccccccccccccccccccccaaaggcucuuuucagagccaccagaauu

SEQ ID NO: 13426 - RNA, 682 nt, Artificial Sequence
  mRNA product Design i-2 comprising derived and/or modified sequence from LASV(LM776-SLE-2012;Clade IV)__AIT17824__Z (wt)
ggggcgcugccuacggagguggcagccaucuccuucucggcaucaagcuuaccaugggaaacaagcaagccaaagccucagaagaaaaaaacaguccgagagccagccugauuccagaugccacacaccuagggccacaauuuugcaagagcugcugguucgaaaacaagggccugguugagugcaacaaccacuaucugugucucaacugccucaccuuacuuuuaagugucagcaacaggugccccaucugcaagaugccucuucccacaaaacugagaccaucaaccacuccaacagcaccuccaaccggagcagcagacagcaucagacccccaccuuacagucccugaggacuagugcaucacauuuaaaagcaucucagccuaccaugagaauaagagaaagaaaaugaagaucaauagcuuauucaucucuuuuucuuuuucguugguguaaagccaacacccugucuaaaaaacauaaauuucuuuaaucauuuugccucuuuucucugugcuucaauuaauaaaaaauggaaagaaccuagaucuaaaaaaaaaaaaaaaaaaaaaaaaaaaaaaaaaaaaaaaaaaaaaaaaaaaaaaaaaaaaaaaaugcaucccccccccccccccccccccccccccccccaaaggcucuuuucagagccaccagaauu

SEQ ID NO: 13427 - RNA, 682 nt, Artificial Sequence
  mRNA product Design i-2 comprising derived and/or modified sequence from LASV(Mad39;Clade IV)__ANH09743__Z (wt)
ggggcgcugccuacggagguggcagccaucuccuucucggcaucaagcuuaccaugggaaacaagcaggccaaagccucagaaguggaggaugguccaagggccagucugaucccagaugccacacaccuggggccacaguucugcaagagcugcugguucgaaaauaagagcuugguugagugcaacaaccauuaucugugccucaacugccucacucugcuucugagcgucagcaacaggugccccaucugcaaaaugccucucccaacaagacugaaaccaucagucgucccaacagcaccccccaccagagcaggagacggcaccaggcccccacccuacagucccuaaggacuagugcaucacauuuaaaagcaucucagccuaccaugagaauaagagaaagaaaaugaagaucaauagcuuauucaucucuuuuucuuuuucguugguguaaagccaacacccugucuaaaaaacauaaauuucuuuaaucauuuugccucuuuucucugugcuucaauuaauaaaaaauggaaagaaccuagaucuaaaaaaaaaaaaaaaaaaaaaaaaaaaaaaaaaaaaaaaaaaaaaaaaaaaaaaaaaaaaaaaaugcaucccccccccccccccccccccccccccccccaaaggcucuuuucagagccaccagaauu

SEQ ID NO: 13428 - RNA, 682 nt, Artificial Sequence
  mRNA product Design i-2 comprising derived and/or modified sequence from LASV(Z0947-SLE-2011;Clade IV)__AIT17838__Z (wt)
ggggcgcugccuacggagguggcagccaucuccuucucggcaucaagcuuaccaugggaaacaaacaagccaaggucccagaaucaaaagacagcccgagagccagccuaaucccagaugccacacaucuagggccgcaauucuguaagaguugcugguucgaaaacaagggccugguugaguguaacaaccacuaucugugucucaacugccucaccuuacuuuugagugucagcaacaggugccccauuugcaagaugccucuccccacaaaacugaaaccaucagccgcuccaacagcacccccaacuggagcagcggacagcaucagacccccaccuuacagucccugaggacuagugcaucacauuuaaaagcaucucagccuaccaugagaauaagagaaagaaaaugaagaucaauagcuuauucaucucuuuuucuuuuucguugguguaaagccaacacccugucuaaaaaacauaaauuucuuuaaucauuuugccucuuuucucugugcuucaauuaauaaaaaauggaaagaaccuagaucuaaaaaaaaaaaaaaaaaaaaaaaaaaaaaaaaaaaaaaaaaaaaaaaaaaaaaaaaaaaaaaaaugcaucccccccccccccccccccccccccccccccaaaggcucuuuucagagccaccagaauu

SEQ ID NO: 13429 - RNA, 682 nt, Artificial Sequence
  mRNA product Design i-2 comprising derived and/or modified sequence from LASV(Josiah;Clade IV)__ADY11072/NP_694871__Z (opt1) R6025
ggggcgcugccuacggagguggcagccaucuccuucucggcaucaagcuuaccaugggcaacaagcaggccaaggcccccgagagcaaggacuccccgcgcgcgagccugauccccgacgccacccaccucgggccccaguucugcaaguccugcugguucgagaacaagggccugguggagugcaacaaccacuaccugugccucaacugccugacccugcuccugagcgucuccaaccggugccccaucugcaagaugccgcugcccacgaagcuccgccccagcgccgcccccaccgccccgcccaccggggcggccgacuccauccggcccccgcccuacagccccugaggacuagugcaucacauuuaaaagcaucucagccuaccaugagaauaagagaaagaaaaugaagaucaauagcuuauucaucucuuuuucuuuuucguugguguaaagccaacacccugucuaaaaaacauaaauuucuuuaaucauuuugccucuuuucucugugcuucaauuaauaaaaaauggaaagaaccuagaucuaaaaaaaaaaaaaaaaaaaaaaaaaaaaaaaaaaaaaaaaaaaaaaaaaaaaaaaaaaaaaaaaugcaucccccccccccccccccccccccccccccccaaaggcucuuuucagagccaccagaauu

SEQ ID NO: 13430 - RNA, 685 nt, Artificial Sequence
  mRNA product Design i-2 comprising derived and/or modified sequence from LASV(Pinneo-NIG-1969;Clade I)__AIT17834__Z (opt1)
ggggcgcugccuacggagguggcagccaucuccuucucggcaucaagcuuaccaugggcaacaagcagacccgcagcccgcccaagcccgagcacccccggcccacccugcuccccgacgccucccaccuggggccccaguucugcaagagcugcugguucgagaacaagggccugguggagugcaacaaccacuaccucugccugaacugccugacgcuccugcuguccgucagcgaccgcugccccaucugcaagaugccccuccccaccaagcuggccgugcggacccagcccuccgcgccgccccugaaccaggggaacacccagagcagcccgccgcccuacucccccugaggacuagugcaucacauuuaaaagcaucucagccuaccaugagaauaagagaaagaaaaugaagaucaauagcuuauucaucucuuuuucuuuuucguugguguaaagccaacacccugucuaaaaaacauaaauuucuuuaaucauuuugccucuuuucucugugcuucaauuaauaaaaaauggaaagaaccuagaucuaaaaaaaaaaaaaaaaaaaaaaaaaaaaaaaaaaaaaaaaaaaaaaaaaaaaaaaaaaaaaaaaugcaucccccccccccccccccccccccccccccccaaaggcucuuuucagagccaccagaauu

SEQ ID NO: 13431 - RNA, 682 nt, Artificial Sequence
  mRNA product Design i-2 comprising derived and/or modified sequence from LASV(Nig08-04;Clade II)__ADU56612__Z (opt1)
ggggcgcugccuacggagguggcagccaucuccuucucggcaucaagcuuaccaugggcaaccgccagacccggcccaccgaggccacggagcagagccgcgcccaccuggugccggacgccucccaccucgggccccaguucugcaagagcugcugguucgagaaccggggccuggucgagugcaacaaccacuaccugugccucaacugccugucccugcuccugagcguguccagccgcugccccaucugcaagaugccccugccgacccggcucaaggccuccgcccagcccagcgccccgcccaccgaggcgccccagaacaccacgcccccgcccuacacccccugaggacuagugcaucacauuuaaaagcaucucagccuaccaugagaauaagagaaagaaaaugaagaucaauagcuuauucaucucuuuuucuuuuucguugguguaaagccaacacccugucuaaaaaacauaaauuucuuuaaucauuuugccucuuuucucugugcuucaauuaauaaaaaauggaaagaaccuagaucuaaaaaaaaaaaaaaaaaaaaaaaaaaaaaaaaaaaaaaaaaaaaaaaaaaaaaaaaaaaaaaaaugcaucccccccccccccccccccccccccccccccaaaggcucuuuucagagccaccagaauu

SEQ ID NO: 13432 - RNA, 682 nt, Artificial Sequence
  mRNA product Design i-2 comprising derived and/or modified sequence from LASV(Nig08-A19;Clade III)__ADU56620__Z (opt1)
ggggcgcugccuacggagguggcagccaucuccuucucggcaucaagcuuaccaugggcgggaagcacaccaagccccagcgcgagagcaacuccccgcgggccagccugauccccgacgccacccaccucggcccccaguucugcaaguccugcugguucgagaacaaggggcugguggagugcaacaaccacuaccugugccucaacugccugacgcugcuccugagcguguccaaccgcugccccaucugcaagaugccccugcccacccggcuccgcgccagcaccaaccccaccgcgccccagguggagcaggucggcccgacgaacccgccgcccuacucccccugaggacuagugcaucacauuuaaaagcaucucagccuaccaugagaauaagagaaagaaaaugaagaucaauagcuuauucaucucuuuuucuuuuucguugguguaaagccaacacccugucuaaaaaacauaaauuucuuuaaucauuuugccucuuuucucugugcuucaauuaauaaaaaauggaaagaaccuagaucuaaaaaaaaaaaaaaaaaaaaaaaaaaaaaaaaaaaaaaaaaaaaaaaaaaaaaaaaaaaaaaaaugcaucccccccccccccccccccccccccccccccaaaggcucuuuucagagccaccagaauu

SEQ ID NO: 13433 - RNA, 682 nt, Artificial Sequence
  mRNA product Design i-2 comprising derived and/or modified sequence from LASV(AV;Clade V)__CCA30312__Z (opt1)
ggggcgcugccuacggagguggcagccaucuccuucucggcaucaagcuuaccaugggcaaccgccaggccaagaaccccgagguggagaacagcccccgggccucccugauccccgacgcgacccaccucgggccccaguucugcaagagcugcugguucgagaacaagggccuggucgagugcaacaaccacuaccugugccucaacugccugucccugcuccugagcguguccaaccgcugccccaucugcaagaugccgcugcccacccggcuccgccccacgaccacccccaccgccccgcagaucaucaaggagaacacgaccaacccgccgcccuacacccccugaggacuagugcaucacauuuaaaagcaucucagccuaccaugagaauaagagaaagaaaaugaagaucaauagcuuauucaucucuuuuucuuuuucguugguguaaagccaacacccugucuaaaaaacauaaauuucuuuaaucauuuugccucuuuucucugugcuucaauuaauaaaaaauggaaagaaccuagaucuaaaaaaaaaaaaaaaaaaaaaaaaaaaaaaaaaaaaaaaaaaaaaaaaaaaaaaaaaaaaaaaaugcaucccccccccccccccccccccccccccccccaaaggcucuuuucagagccaccagaauu

SEQ ID NO: 13434 - RNA, 682 nt, Artificial Sequence
  mRNA product Design i-2 comprising derived and/or modified sequence from LASV(Togo/2016/7082;Clade VI)__AMR44579__Z (opt1)
ggggcgcugccuacggagguggcagccaucuccuucucggcaucaagcuuaccaugggcgcccgccagaccaagcagccccagaucgaggggagcccccgggccucccuggugcccgacgcgagccaccucggcccccaguucugcaaguccugcugguucgagaacaaggggcuggucgagugcaacaaccacuaccugugccucaacugccugagccugcuccuguccgugagcaaccgcugccccaucugcaagaugccgcugcccaccaagcuccggguguccagcgcccccuccgcgcccccggccgccacggcccagcccggcaccccgccgcccuacagccccugaggacuagugcaucacauuuaaaagcaucucagccuaccaugagaauaagagaaagaaaaugaagaucaauagcuuauucaucucuuuuucuuuuucguugguguaaagccaacacccugucuaaaaaacauaaauuucuuuaaucauuuugccucuuuucucugugcuucaauuaauaaaaaauggaaagaaccuagaucuaaaaaaaaaaaaaaaaaaaaaaaaaaaaaaaaaaaaaaaaaaaaaaaaaaaaaaaaaaaaaaaaugcaucccccccccccccccccccccccccccccccaaaggcucuuuucagagccaccagaauu

SEQ ID NO: 13435 - RNA, 682 nt, Artificial Sequence
  mRNA product Design i-2 comprising derived and/or modified sequence from LASV(KAK-428;Clade n.d. (VII))__ANH09761__Z (opt1)
ggggcgcugccuacggagguggcagccaucuccuucucggcaucaagcuuaccaugggcaacaaggggaccaagcccacccagaacagcgagcccucccgcgccaaccuggugcccgacgccagcuaccucggcccccaguucugcaaguccugcugguucgagaacaaggggcuggucgagugcaacaaccacuaccugugccucaacugccugacgaugcugcucagcguguccaaccggugccccaucugcaagaugccgcugcccaccaagaucaaggccagcggcucccccagcgcgcccccgaccgaggccaacuccgccgugagcccgccgcccuacacccccugaggacuagugcaucacauuuaaaagcaucucagccuaccaugagaauaagagaaagaaaaugaagaucaauagcuuauucaucucuuuuucuuuuucguugguguaaagccaacacccugucuaaaaaacauaaauuucuuuaaucauuuugccucuuuucucugugcuucaauuaauaaaaaauggaaagaaccuagaucuaaaaaaaaaaaaaaaaaaaaaaaaaaaaaaaaaaaaaaaaaaaaaaaaaaaaaaaaaaaaaaaaugcaucccccccccccccccccccccccccccccccaaaggcucuuuucagagccaccagaauu

SEQ ID NO: 13436 - RNA, 682 nt, Artificial Sequence
  mRNA product Design i-2 comprising derived and/or modified sequence from LASV(ISTH0009-NIG-2011;Clade II)__AIT17402__Z (opt1)
ggggcgcugccuacggagguggcagccaucuccuucucggcaucaagcuuaccaugggcaaccgccaggccaagagcaccaagguggacgagcaccagcgggcccaccugguccccgacgcgucccaccucgggccccaguucugcaagagcugcugguucgagaaccgcggccugguggagugcaacaaccacuaccugugccucaacugccugucccugcuccugagcguguccagccggugccccaucugcaagaugccccugcccaccaagcucaaggccgccgcccagccguccgcccccagcacggagaccauccagaacaccaccccgccgcccuacacgcccugaggacuagugcaucacauuuaaaagcaucucagccuaccaugagaauaagagaaagaaaaugaagaucaauagcuuauucaucucuuuuucuuuuucguugguguaaagccaacacccugucuaaaaaacauaaauuucuuuaaucauuuugccucuuuucucugugcuucaauuaauaaaaaauggaaagaaccuagaucuaaaaaaaaaaaaaaaaaaaaaaaaaaaaaaaaaaaaaaaaaaaaaaaaaaaaaaaaaaaaaaaaugcaucccccccccccccccccccccccccccccccaaaggcucuuuucagagccaccagaauu

SEQ ID NO: 13437 - RNA, 682 nt, Artificial Sequence
  mRNA product Design i-2 comprising derived and/or modified sequence from LASV(ISTH2010-NIG-2012;Clade II)__AIT17480__Z (opt1)
ggggcgcugccuacggagguggcagccaucuccuucucggcaucaagcuuaccaugggcaaccgccacgccaagagcaccaagguggacgagcaccagcgggcccaccugguccccgacgcgucccaccucgggccccaguucugcaagagcugcugguucgagaaccgcggccugguggagugcaacaaccacuaccugugccucaacugccugucccugcuccugagcguguccagccggugccccaucugcaagaugccccugcccaccaagcucaaggccgccgcccagccguccgcccccagcacggaggucauccaguccaccaccccgccgcccuacacccccugaggacuagugcaucacauuuaaaagcaucucagccuaccaugagaauaagagaaagaaaaugaagaucaauagcuuauucaucucuuuuucuuuuucguugguguaaagccaacacccugucuaaaaaacauaaauuucuuuaaucauuuugccucuuuucucugugcuucaauuaauaaaaaauggaaagaaccuagaucuaaaaaaaaaaaaaaaaaaaaaaaaaaaaaaaaaaaaaaaaaaaaaaaaaaaaaaaaaaaaaaaaugcaucccccccccccccccccccccccccccccccaaaggcucuuuucagagccaccagaauu

SEQ ID NO: 13438 - RNA, 682 nt, Artificial Sequence
  mRNA product Design i-2 comprising derived and/or modified sequence from LASV(Lassa virus/H.sapiens-wt/NGA/2016/ISTH_0017;Clade II)__AVO03713__Z (opt1)
ggggcgcugccuacggagguggcagccaucuccuucucggcaucaagcuuaccaugggcaaccgccaggccaagagcaccaagguggacgagcaccagcgggcccaccugguccccgacgcgucccaccucgggccccaguucugcaagagcugcugguucgagaaccgcggccugguggagugcaacaaccacuaccugugccucaacugccugucccugcuccugagcguguccagccggugccccaucugcaagaugccccugcccaccaagcucaaggccgccacgcagccguccgcccccagcaccgaggucaaccagaacaccaccccgccgcccuacacgcccugaggacuagugcaucacauuuaaaagcaucucagccuaccaugagaauaagagaaagaaaaugaagaucaauagcuuauucaucucuuuuucuuuuucguugguguaaagccaacacccugucuaaaaaacauaaauuucuuuaaucauuuugccucuuuucucugugcuucaauuaauaaaaaauggaaagaaccuagaucuaaaaaaaaaaaaaaaaaaaaaaaaaaaaaaaaaaaaaaaaaaaaaaaaaaaaaaaaaaaaaaaaugcaucccccccccccccccccccccccccccccccaaaggcucuuuucagagccaccagaauu

SEQ ID NO: 13439 - RNA, 682 nt, Artificial Sequence
  mRNA product Design i-2 comprising derived and/or modified sequence from LASV(Lassa virus/H.sapiens-wt/NGA/2018/ISTH_0959;Clade II)__AVV65084__Z (opt1)
ggggcgcugccuacggagguggcagccaucuccuucucggcaucaagcuuaccaugggcaacaagcaggccaagagcaccaagguggacgagcaccagcgcgcccaccugguccccgacgcgucccaccucgggccccaguucugcaagagcugcugguucgagaaccggggccugguggagugcaacaaccacuaccugugccucaacugccugucccugcuccugagcguguccagccgcugccccaucugcaagaugccccugcccaccaagcucaaggccgccgcccagccguccgcccccagcacggaggcgauccaguccaccaccccgccgcccuacacccccugaggacuagugcaucacauuuaaaagcaucucagccuaccaugagaauaagagaaagaaaaugaagaucaauagcuuauucaucucuuuuucuuuuucguugguguaaagccaacacccugucuaaaaaacauaaauuucuuuaaucauuuugccucuuuucucugugcuucaauuaauaaaaaauggaaagaaccuagaucuaaaaaaaaaaaaaaaaaaaaaaaaaaaaaaaaaaaaaaaaaaaaaaaaaaaaaaaaaaaaaaaaugcaucccccccccccccccccccccccccccccccaaaggcucuuuucagagccaccagaauu

SEQ ID NO: 13440 - RNA, 682 nt, Artificial Sequence
  mRNA product Design i-2 comprising derived and/or modified sequence from LASV(LASV003-NIG-2008;Clade II)__AIT17578__Z (opt1)
ggggcgcugccuacggagguggcagccaucuccuucucggcaucaagcuuaccaugggcaaccgccaggccaagagcaccaagguggacgagcaccagcgggcccaccugguccccgacgcgucccaccucgggccccaguucugcaagagcugcugguucgagaacaagggccugguggagugcaacaaccacuaccugugccucaacugccugucccugcuccugagcguguccagccgcugccccaucugcaagaugccccugcccaccaagcuccgggccgccgcccagccguccgcccccagcacggaguccgcgcagaacaccgccccgccgcccuacgcccccugaggacuagugcaucacauuuaaaagcaucucagccuaccaugagaauaagagaaagaaaaugaagaucaauagcuuauucaucucuuuuucuuuuucguugguguaaagccaacacccugucuaaaaaacauaaauuucuuuaaucauuuugccucuuuucucugugcuucaauuaauaaaaaauggaaagaaccuagaucuaaaaaaaaaaaaaaaaaaaaaaaaaaaaaaaaaaaaaaaaaaaaaaaaaaaaaaaaaaaaaaaaugcaucccccccccccccccccccccccccccccccaaaggcucuuuucagagccaccagaauu

SEQ ID NO: 13441 - RNA, 682 nt, Artificial Sequence
  mRNA product Design i-2 comprising derived and/or modified sequence from LASV(LASV035-NIG-2009;Clade II)__AIT17586__Z (opt1)
ggggcgcugccuacggagguggcagccaucuccuucucggcaucaagcuuaccaugggcaacaagcaggccaagagcaccaagguggacgagcaccagcgcgcccaccugguccccgacgcgucccaccucgggccccaguucugcaagagcugcugguucgagaaccggggccugguggagugcaacaaccacuaccugugccucaacugccugucccugcuccugagcguguccagccgcugccccaucugcaagaugccccugcccacccggcucaaggccgccgcccagccguccgcccccagcacggaggucacccagaacaccaccccgccgcccuacacgcccugaggacuagugcaucacauuuaaaagcaucucagccuaccaugagaauaagagaaagaaaaugaagaucaauagcuuauucaucucuuuuucuuuuucguugguguaaagccaacacccugucuaaaaaacauaaauuucuuuaaucauuuugccucuuuucucugugcuucaauuaauaaaaaauggaaagaaccuagaucuaaaaaaaaaaaaaaaaaaaaaaaaaaaaaaaaaaaaaaaaaaaaaaaaaaaaaaaaaaaaaaaaugcaucccccccccccccccccccccccccccccccaaaggcucuuuucagagccaccagaauu

SEQ ID NO: 13442 - RNA, 682 nt, Artificial Sequence
  mRNA product Design i-2 comprising derived and/or modified sequence from LASV(LASV1000-NIG-2009;Clade II)__AIT17780__Z (opt1)
ggggcgcugccuacggagguggcagccaucuccuucucggcaucaagcuuaccaugggcaaccgccagaccaagagcaccaagguggacgagcaccagcgggccuaccugguccccgacgccucccuccuggggccccaguucugcaagagcugcugguucgagaacaagggccugguggagugcaacaaccacuaccucugccugaacugccugucccuccugcugagcguguccagccgcugccccaucugcaagaugccccuccccacgcggcugaaggcggccgcccagcccuccgccccgcccaccgaggccauccagaacaccacgccgccgcccuacacccccugaggacuagugcaucacauuuaaaagcaucucagccuaccaugagaauaagagaaagaaaaugaagaucaauagcuuauucaucucuuuuucuuuuucguugguguaaagccaacacccugucuaaaaaacauaaauuucuuuaaucauuuugccucuuuucucugugcuucaauuaauaaaaaauggaaagaaccuagaucuaaaaaaaaaaaaaaaaaaaaaaaaaaaaaaaaaaaaaaaaaaaaaaaaaaaaaaaaaaaaaaaaugcaucccccccccccccccccccccccccccccccaaaggcucuuuucagagccaccagaauu

SEQ ID NO: 13443 - RNA, 682 nt, Artificial Sequence
  mRNA product Design i-2 comprising derived and/or modified sequence from LASV(LASV221-NIG-2010;Clade II)__AIT17622__Z (opt1)
ggggcgcugccuacggagguggcagccaucuccuucucggcaucaagcuuaccaugggcaaccgccaggccaagagcaccaagguggacgagcaccagcgggcccaccugguccccgacgcgucccaccucgggccccaguucugcaagagcugcugguucgagaaccgcggccugguggagugcaacaaccacuaccugugccucaacugccugucccugcuccugagcguguccagccggugccccaucugcaagaugccccugcccaccaagcucaaggccgccacgcagccguccgcccccagcaccgaggucacccagaacaccaucccgccgcccuacucccccugaggacuagugcaucacauuuaaaagcaucucagccuaccaugagaauaagagaaagaaaaugaagaucaauagcuuauucaucucuuuuucuuuuucguugguguaaagccaacacccugucuaaaaaacauaaauuucuuuaaucauuuugccucuuuucucugugcuucaauuaauaaaaaauggaaagaaccuagaucuaaaaaaaaaaaaaaaaaaaaaaaaaaaaaaaaaaaaaaaaaaaaaaaaaaaaaaaaaaaaaaaaugcaucccccccccccccccccccccccccccccccaaaggcucuuuucagagccaccagaauu

SEQ ID NO: 13444 - RNA, 682 nt, Artificial Sequence
  mRNA product Design i-2 comprising derived and/or modified sequence from LASV(LASV237-NIG-2010;Clade II)__AIT17636__Z (opt1)
ggggcgcugccuacggagguggcagccaucuccuucucggcaucaagcuuaccaugggcaaccgccaggccaagagcaccaagguggacgagcaccagcgggcccaccugguccccgacgcgucccaccucgggccccaguucugcaagagcugcugguucgagaaccgcggccugguggagugcaacaaccacuaccugugccucaacugccugucccugcuccugagcguguccagccggugccccaucugcaagaugccccugcccaccaagcucaaggccgccgcccagccguccgcccccagcaucgagacgauccagaacaccaccccgccgcccuacacccccugaggacuagugcaucacauuuaaaagcaucucagccuaccaugagaauaagagaaagaaaaugaagaucaauagcuuauucaucucuuuuucuuuuucguugguguaaagccaacacccugucuaaaaaacauaaauuucuuuaaucauuuugccucuuuucucugugcuucaauuaauaaaaaauggaaagaaccuagaucuaaaaaaaaaaaaaaaaaaaaaaaaaaaaaaaaaaaaaaaaaaaaaaaaaaaaaaaaaaaaaaaaugcaucccccccccccccccccccccccccccccccaaaggcucuuuucagagccaccagaauu

SEQ ID NO: 13445 - RNA, 682 nt, Artificial Sequence
  mRNA product Design i-2 comprising derived and/or modified sequence from LASV(LASV253-NIG-2011;Clade II)__AIT17668__Z (opt1)
ggggcgcugccuacggagguggcagccaucuccuucucggcaucaagcuuaccaugggcaaccgccaggccaagagcaccaagguggacgagcaccagcgggcccaccugguccccgacgcgucccaccucgggccccaguucugcaagagcugcugguucgagaacaagggccugguggagugcaacaaccacuaccugugccucaacugccugucccugcuccugagcguguccagccgcugccccaucugcaagaugccccugcccaccaagcucaagacgaccgcccagccguccgccccgcccaccgaggccgccaagaacaccgcgcccccgcccuacgcccccugaggacuagugcaucacauuuaaaagcaucucagccuaccaugagaauaagagaaagaaaaugaagaucaauagcuuauucaucucuuuuucuuuuucguugguguaaagccaacacccugucuaaaaaacauaaauuucuuuaaucauuuugccucuuuucucugugcuucaauuaauaaaaaauggaaagaaccuagaucuaaaaaaaaaaaaaaaaaaaaaaaaaaaaaaaaaaaaaaaaaaaaaaaaaaaaaaaaaaaaaaaaugcaucccccccccccccccccccccccccccccccaaaggcucuuuucagagccaccagaauu

SEQ ID NO: 13446 - RNA, 682 nt, Artificial Sequence
  mRNA product Design i-2 comprising derived and/or modified sequence from LASV(G1180-SLE-2010;Clade IV)__AIT17166__Z (opt1)
ggggcgcugccuacggagguggcagccaucuccuucucggcaucaagcuuaccaugggcaacaagcaggccaaggcccccgaggcgaaggacagcccgcgcgccucccugauccccgacgccacccaccucgggccccaguucugcaagagcugcugguucgagaccaagggccugguggagugcaacaaccacuaccugugccucaacugccugacgcugcuccuguccgucagcaaccggugccccaucugcaagaugccgcugcccaccaagcuccgccccuccgccacccccaccgccccgcccacggaggcggccgacagcaucgggcccccgcccuacucccccugaggacuagugcaucacauuuaaaagcaucucagccuaccaugagaauaagagaaagaaaaugaagaucaauagcuuauucaucucuuuuucuuuuucguugguguaaagccaacacccugucuaaaaaacauaaauuucuuuaaucauuuugccucuuuucucugugcuucaauuaauaaaaaauggaaagaaccuagaucuaaaaaaaaaaaaaaaaaaaaaaaaaaaaaaaaaaaaaaaaaaaaaaaaaaaaaaaaaaaaaaaaugcaucccccccccccccccccccccccccccccccaaaggcucuuuucagagccaccagaauu

SEQ ID NO: 13447 - RNA, 682 nt, Artificial Sequence
  mRNA product Design i-2 comprising derived and/or modified sequence from LASV(G1442-SLE-2011;Clade IV)__AIT17178__Z (opt1)
ggggcgcugccuacggagguggcagccaucuccuucucggcaucaagcuuaccaugggcaacaagcaggccaaggccagcgaggcgaaggacagcccccgcgccucccugaucccggacgccacccaccucgggccccaguucugcaaguccugcugguucgagaacaagggccugguggagugcaacaaccacuaccugugccucaacugccugagccugcuccuguccgucagcucccggugccccaucugcaagaugccccugccgacccgccuccggcccagcacggcccccaccgcgcccccggcccgcgccggggacaacaucaagcccccgcccuacucccccugaggacuagugcaucacauuuaaaagcaucucagccuaccaugagaauaagagaaagaaaaugaagaucaauagcuuauucaucucuuuuucuuuuucguugguguaaagccaacacccugucuaaaaaacauaaauuucuuuaaucauuuugccucuuuucucugugcuucaauuaauaaaaaauggaaagaaccuagaucuaaaaaaaaaaaaaaaaaaaaaaaaaaaaaaaaaaaaaaaaaaaaaaaaaaaaaaaaaaaaaaaaugcaucccccccccccccccccccccccccccccccaaaggcucuuuucagagccaccagaauu

SEQ ID NO: 13448 - RNA, 682 nt, Artificial Sequence
  mRNA product Design i-2 comprising derived and/or modified sequence from LASV(G502-SLE-2009;Clade IV)__AIT17124__Z (opt1)
ggggcgcugccuacggagguggcagccaucuccuucucggcaucaagcuuaccaugggcaacaagcaggucaagacccccgaggccaaggacagcccccgcgccucccugauccccgacgcgacccaccucgggccccaguucugcaagagcugcugguucgagaacaagggccugguggagugcaacaaccacuaccugugccucaacugccugacgcugcuccuguccguggggaaccggugccccaucugcaagaugccgcugcccaccaagcuccgccccagcgugacccccaccgccccgcccacgcgggccgccgacuccaucggcccgccgcccuacagccccugaggacuagugcaucacauuuaaaagcaucucagccuaccaugagaauaagagaaagaaaaugaagaucaauagcuuauucaucucuuuuucuuuuucguugguguaaagccaacacccugucuaaaaaacauaaauuucuuuaaucauuuugccucuuuucucugugcuucaauuaauaaaaaauggaaagaaccuagaucuaaaaaaaaaaaaaaaaaaaaaaaaaaaaaaaaaaaaaaaaaaaaaaaaaaaaaaaaaaaaaaaaugcaucccccccccccccccccccccccccccccccaaaggcucuuuucagagccaccagaauu

SEQ ID NO: 13449 - RNA, 682 nt, Artificial Sequence
  mRNA product Design i-2 comprising derived and/or modified sequence from LASV(G733-SLE-2010;Clade IV)__AIT17152__Z (opt1)
ggggcgcugccuacggagguggcagccaucuccuucucggcaucaagcuuaccaugggcaacaagcaggccaagacccccgagaccaaggacagcccgcgcgccucccugauccccgacgcgacgcaccucgggccccaguucugcaagagcugcugguucgagaacaagggccugguggagugcaacaaccacuaccugugccucaacugccugacccugcuccuguccgucagcaaccggugccccaucugcaagaugccgcugcccaccaagcuccgccccuccaccgcccccacggccccgcccgccggggccgcggacaacacccggcccccgcccuacagccccugaggacuagugcaucacauuuaaaagcaucucagccuaccaugagaauaagagaaagaaaaugaagaucaauagcuuauucaucucuuuuucuuuuucguugguguaaagccaacacccugucuaaaaaacauaaauuucuuuaaucauuuugccucuuuucucugugcuucaauuaauaaaaaauggaaagaaccuagaucuaaaaaaaaaaaaaaaaaaaaaaaaaaaaaaaaaaaaaaaaaaaaaaaaaaaaaaaaaaaaaaaaugcaucccccccccccccccccccccccccccccccaaaggcucuuuucagagccaccagaauu

SEQ ID NO: 13450 - RNA, 694 nt, Artificial Sequence
  mRNA product Design i-2 comprising derived and/or modified sequence from MOPV/LASV reassortant(IGS-1;Clade IV)__AFY05533__Z (opt1)
ggggcgcugccuacggagguggcagccaucuccuucucggcaucaagcuuaccaugggcaagacccagagcaaggggcagcccuccaccaaccugcucaaggagacggagccccgccaccccgugauccccgacgcccggggcaccgggcccgaguucugcaagagcugcugguucgagcgccggggccugguccgcugcaacgaccacuaccugugccucaacugccugacccugcuccacaccguguccgaccggugccccaucugcaagcacaagcugcccuuccgccuggagcuccagacgcagcccaccgccccgcccgagaucccgcccagccagaacccgccgcccuacucccccugaggacuagugcaucacauuuaaaagcaucucagccuaccaugagaauaagagaaagaaaaugaagaucaauagcuuauucaucucuuuuucuuuuucguugguguaaagccaacacccugucuaaaaaacauaaauuucuuuaaucauuuugccucuuuucucugugcuucaauuaauaaaaaauggaaagaaccuagaucuaaaaaaaaaaaaaaaaaaaaaaaaaaaaaaaaaaaaaaaaaaaaaaaaaaaaaaaaaaaaaaaaugcaucccccccccccccccccccccccccccccccaaaggcucuuuucagagccaccagaauu

SEQ ID NO: 13451 - RNA, 682 nt, Artificial Sequence
  mRNA product Design i-2 comprising derived and/or modified sequence from LASV(LM776-SLE-2012;Clade IV)__AIT17824__Z (opt1)
ggggcgcugccuacggagguggcagccaucuccuucucggcaucaagcuuaccaugggcaacaagcaggccaaggccagcgaggagaagaacagcccccgcgccucccugaucccggacgccacccaccucgggccccaguucugcaaguccugcugguucgagaacaagggccugguggagugcaacaaccacuaccugugccucaacugccugacccugcuccugagcgucuccaaccggugccccaucugcaagaugccccugccgacgaagcuccgccccagcaccacccccaccgcgcccccgacgggggccgccgacuccauccggcccccgcccuacagccccugaggacuagugcaucacauuuaaaagcaucucagccuaccaugagaauaagagaaagaaaaugaagaucaauagcuuauucaucucuuuuucuuuuucguugguguaaagccaacacccugucuaaaaaacauaaauuucuuuaaucauuuugccucuuuucucugugcuucaauuaauaaaaaauggaaagaaccuagaucuaaaaaaaaaaaaaaaaaaaaaaaaaaaaaaaaaaaaaaaaaaaaaaaaaaaaaaaaaaaaaaaaugcaucccccccccccccccccccccccccccccccaaaggcucuuuucagagccaccagaauu

SEQ ID NO: 13452 - RNA, 682 nt, Artificial Sequence
  mRNA product Design i-2 comprising derived and/or modified sequence from LASV(Mad39;Clade IV)__ANH09743__Z (opt1)
ggggcgcugccuacggagguggcagccaucuccuucucggcaucaagcuuaccaugggcaacaagcaggccaaggccagcgagguggaggacgggccccgcgccucccugauccccgacgccacccaccucggcccccaguucugcaagagcugcugguucgagaacaagucccuggucgagugcaacaaccacuaccugugccucaacugccugacccugcuccugagcguguccaaccggugccccaucugcaagaugccccugccgacgcgccucaagcccagcgugguccccaccgcgcccccgacccgggccggggacggcacccgcccgccgcccuacucccccugaggacuagugcaucacauuuaaaagcaucucagccuaccaugagaauaagagaaagaaaaugaagaucaauagcuuauucaucucuuuuucuuuuucguugguguaaagccaacacccugucuaaaaaacauaaauuucuuuaaucauuuugccucuuuucucugugcuucaauuaauaaaaaauggaaagaaccuagaucuaaaaaaaaaaaaaaaaaaaaaaaaaaaaaaaaaaaaaaaaaaaaaaaaaaaaaaaaaaaaaaaaugcaucccccccccccccccccccccccccccccccaaaggcucuuuucagagccaccagaauu

SEQ ID NO: 13453 - RNA, 682 nt, Artificial Sequence
  mRNA product Design i-2 comprising derived and/or modified sequence from LASV(Z0947-SLE-2011;Clade IV)__AIT17838__Z (opt1)
ggggcgcugccuacggagguggcagccaucuccuucucggcaucaagcuuaccaugggcaacaagcaggccaaggugcccgagagcaaggacuccccgcgcgccagccugauccccgacgcgacccaccucgggccccaguucugcaaguccugcugguucgagaacaagggccuggucgagugcaacaaccacuaccugugccucaacugccugacccugcuccugagcguguccaaccgcugccccaucugcaagaugccgcugcccacgaagcucaagcccagcgccgcccccaccgccccgcccaccggggccgcggacuccauccggcccccgcccuacagccccugaggacuagugcaucacauuuaaaagcaucucagccuaccaugagaauaagagaaagaaaaugaagaucaauagcuuauucaucucuuuuucuuuuucguugguguaaagccaacacccugucuaaaaaacauaaauuucuuuaaucauuuugccucuuuucucugugcuucaauuaauaaaaaauggaaagaaccuagaucuaaaaaaaaaaaaaaaaaaaaaaaaaaaaaaaaaaaaaaaaaaaaaaaaaaaaaaaaaaaaaaaaugcaucccccccccccccccccccccccccccccccaaaggcucuuuucagagccaccagaauu

SEQ ID NO: 13454 - RNA, 682 nt, Artificial Sequence
  mRNA product Design i-2 comprising derived and/or modified sequence from LASV(Josiah;Clade IV)__ADY11072/NP_694871__Z (opt2)
ggggcgcugccuacggagguggcagccaucuccuucucggcaucaagcuuaccaugggcaacaagcaggccaaggcccccgaguccaaggacuccccccgcgccucccucauccccgacgccacccaccucggcccccaguucugcaaguccugcugguucgagaacaagggccucgucgagugcaacaaccacuaccucugccucaacugccucacccuccuccucuccgucuccaaccgcugccccaucugcaagaugccccuccccaccaagcuccgccccuccgccgcccccaccgccccccccaccggcgccgccgacuccauccgccccccccccuacucccccugaggacuagugcaucacauuuaaaagcaucucagccuaccaugagaauaagagaaagaaaaugaagaucaauagcuuauucaucucuuuuucuuuuucguugguguaaagccaacacccugucuaaaaaacauaaauuucuuuaaucauuuugccucuuuucucugugcuucaauuaauaaaaaauggaaagaaccuagaucuaaaaaaaaaaaaaaaaaaaaaaaaaaaaaaaaaaaaaaaaaaaaaaaaaaaaaaaaaaaaaaaaugcaucccccccccccccccccccccccccccccccaaaggcucuuuucagagccaccagaauu

SEQ ID NO: 13455 - RNA, 685 nt, Artificial Sequence
  mRNA product Design i-2 comprising derived and/or modified sequence from LASV(Pinneo-NIG-1969;Clade I)__AIT17834__Z (opt2)
ggggcgcugccuacggagguggcagccaucuccuucucggcaucaagcuuaccaugggcaacaagcagacccgcuccccccccaagcccgagcacccccgccccacccuccuccccgacgccucccaccucggcccccaguucugcaaguccugcugguucgagaacaagggccucgucgagugcaacaaccacuaccucugccucaacugccucacccuccuccucuccgucuccgaccgcugccccaucugcaagaugccccuccccaccaagcucgccguccgcacccagcccuccgcccccccccucaaccagggcaacacccaguccucccccccccccuacucccccugaggacuagugcaucacauuuaaaagcaucucagccuaccaugagaauaagagaaagaaaaugaagaucaauagcuuauucaucucuuuuucuuuuucguugguguaaagccaacacccugucuaaaaaacauaaauuucuuuaaucauuuugccucuuuucucugugcuucaauuaauaaaaaauggaaagaaccuagaucuaaaaaaaaaaaaaaaaaaaaaaaaaaaaaaaaaaaaaaaaaaaaaaaaaaaaaaaaaaaaaaaaugcaucccccccccccccccccccccccccccccccaaaggcucuuuucagagccaccagaauu

SEQ ID NO: 13456 - RNA, 682 nt, Artificial Sequence
  mRNA product Design i-2 comprising derived and/or modified sequence from LASV(Nig08-04;Clade II)__ADU56612__Z (opt2)
ggggcgcugccuacggagguggcagccaucuccuucucggcaucaagcuuaccaugggcaaccgccagacccgccccaccgaggccaccgagcagucccgcgcccaccucguccccgacgccucccaccucggcccccaguucugcaaguccugcugguucgagaaccgcggccucgucgagugcaacaaccacuaccucugccucaacugccucucccuccuccucuccgucuccucccgcugccccaucugcaagaugccccuccccacccgccucaaggccuccgcccagcccuccgccccccccaccgaggccccccagaacaccacccccccccccuacacccccugaggacuagugcaucacauuuaaaagcaucucagccuaccaugagaauaagagaaagaaaaugaagaucaauagcuuauucaucucuuuuucuuuuucguugguguaaagccaacacccugucuaaaaaacauaaauuucuuuaaucauuuugccucuuuucucugugcuucaauuaauaaaaaauggaaagaaccuagaucuaaaaaaaaaaaaaaaaaaaaaaaaaaaaaaaaaaaaaaaaaaaaaaaaaaaaaaaaaaaaaaaaugcaucccccccccccccccccccccccccccccccaaaggcucuuuucagagccaccagaauu

SEQ ID NO: 13457 - RNA, 682 nt, Artificial Sequence
  mRNA product Design i-2 comprising derived and/or modified sequence from LASV(Nig08-A19;Clade III)__ADU56620__Z (opt2)
ggggcgcugccuacggagguggcagccaucuccuucucggcaucaagcuuaccaugggcggcaagcacaccaagccccagcgcgaguccaacuccccccgcgccucccucauccccgacgccacccaccucggcccccaguucugcaaguccugcugguucgagaacaagggccucgucgagugcaacaaccacuaccucugccucaacugccucacccuccuccucuccgucuccaaccgcugccccaucugcaagaugccccuccccacccgccuccgcgccuccaccaaccccaccgccccccaggucgagcaggucggccccaccaaccccccccccuacucccccugaggacuagugcaucacauuuaaaagcaucucagccuaccaugagaauaagagaaagaaaaugaagaucaauagcuuauucaucucuuuuucuuuuucguugguguaaagccaacacccugucuaaaaaacauaaauuucuuuaaucauuuugccucuuuucucugugcuucaauuaauaaaaaauggaaagaaccuagaucuaaaaaaaaaaaaaaaaaaaaaaaaaaaaaaaaaaaaaaaaaaaaaaaaaaaaaaaaaaaaaaaaugcaucccccccccccccccccccccccccccccccaaaggcucuuuucagagccaccagaauu

SEQ ID NO: 13458 - RNA, 682 nt, Artificial Sequence
  mRNA product Design i-2 comprising derived and/or modified sequence from LASV(AV;Clade V)__CCA30312__Z (opt2)
ggggcgcugccuacggagguggcagccaucuccuucucggcaucaagcuuaccaugggcaaccgccaggccaagaaccccgaggucgagaacuccccccgcgccucccucauccccgacgccacccaccucggcccccaguucugcaaguccugcugguucgagaacaagggccucgucgagugcaacaaccacuaccucugccucaacugccucucccuccuccucuccgucuccaaccgcugccccaucugcaagaugccccuccccacccgccuccgccccaccaccacccccaccgccccccagaucaucaaggagaacaccaccaaccccccccccuacacccccugaggacuagugcaucacauuuaaaagcaucucagccuaccaugagaauaagagaaagaaaaugaagaucaauagcuuauucaucucuuuuucuuuuucguugguguaaagccaacacccugucuaaaaaacauaaauuucuuuaaucauuuugccucuuuucucugugcuucaauuaauaaaaaauggaaagaaccuagaucuaaaaaaaaaaaaaaaaaaaaaaaaaaaaaaaaaaaaaaaaaaaaaaaaaaaaaaaaaaaaaaaaugcaucccccccccccccccccccccccccccccccaaaggcucuuuucagagccaccagaauu

SEQ ID NO: 13459 - RNA, 682 nt, Artificial Sequence
  mRNA product Design i-2 comprising derived and/or modified sequence from LASV(Togo/2016/7082;Clade VI)__AMR44579__Z (opt2)
ggggcgcugccuacggagguggcagccaucuccuucucggcaucaagcuuaccaugggcgcccgccagaccaagcagccccagaucgagggcuccccccgcgccucccucguccccgacgccucccaccucggcccccaguucugcaaguccugcugguucgagaacaagggccucgucgagugcaacaaccacuaccucugccucaacugccucucccuccuccucuccgucuccaaccgcugccccaucugcaagaugccccuccccaccaagcuccgcgucuccuccgcccccuccgccccccccgccgccaccgcccagcccggcacccccccccccuacucccccugaggacuagugcaucacauuuaaaagcaucucagccuaccaugagaauaagagaaagaaaaugaagaucaauagcuuauucaucucuuuuucuuuuucguugguguaaagccaacacccugucuaaaaaacauaaauuucuuuaaucauuuugccucuuuucucugugcuucaauuaauaaaaaauggaaagaaccuagaucuaaaaaaaaaaaaaaaaaaaaaaaaaaaaaaaaaaaaaaaaaaaaaaaaaaaaaaaaaaaaaaaaugcaucccccccccccccccccccccccccccccccaaaggcucuuuucagagccaccagaauu

SEQ ID NO: 13460 - RNA, 682 nt, Artificial Sequence
  mRNA product Design i-2 comprising derived and/or modified sequence from LASV(KAK-428;Clade n.d. (VII))__ANH09761__Z (opt2)
ggggcgcugccuacggagguggcagccaucuccuucucggcaucaagcuuaccaugggcaacaagggcaccaagcccacccagaacuccgagcccucccgcgccaaccucguccccgacgccuccuaccucggcccccaguucugcaaguccugcugguucgagaacaagggccucgucgagugcaacaaccacuaccucugccucaacugccucaccaugcuccucuccgucuccaaccgcugccccaucugcaagaugccccuccccaccaagaucaaggccuccggcucccccuccgccccccccaccgaggccaacuccgccgucucccccccccccuacacccccugaggacuagugcaucacauuuaaaagcaucucagccuaccaugagaauaagagaaagaaaaugaagaucaauagcuuauucaucucuuuuucuuuuucguugguguaaagccaacacccugucuaaaaaacauaaauuucuuuaaucauuuugccucuuuucucugugcuucaauuaauaaaaaauggaaagaaccuagaucuaaaaaaaaaaaaaaaaaaaaaaaaaaaaaaaaaaaaaaaaaaaaaaaaaaaaaaaaaaaaaaaaugcaucccccccccccccccccccccccccccccccaaaggcucuuuucagagccaccagaauu

SEQ ID NO: 13461 - RNA, 682 nt, Artificial Sequence
  mRNA product Design i-2 comprising derived and/or modified sequence from LASV(ISTH0009-NIG-2011;Clade II)__AIT17402__Z (opt2)
ggggcgcugccuacggagguggcagccaucuccuucucggcaucaagcuuaccaugggcaaccgccaggccaaguccaccaaggucgacgagcaccagcgcgcccaccucguccccgacgccucccaccucggcccccaguucugcaaguccugcugguucgagaaccgcggccucgucgagugcaacaaccacuaccucugccucaacugccucucccuccuccucuccgucuccucccgcugccccaucugcaagaugccccuccccaccaagcucaaggccgccgcccagcccuccgcccccuccaccgagaccauccagaacaccacccccccccccuacacccccugaggacuagugcaucacauuuaaaagcaucucagccuaccaugagaauaagagaaagaaaaugaagaucaauagcuuauucaucucuuuuucuuuuucguugguguaaagccaacacccugucuaaaaaacauaaauuucuuuaaucauuuugccucuuuucucugugcuucaauuaauaaaaaauggaaagaaccuagaucuaaaaaaaaaaaaaaaaaaaaaaaaaaaaaaaaaaaaaaaaaaaaaaaaaaaaaaaaaaaaaaaaugcaucccccccccccccccccccccccccccccccaaaggcucuuuucagagccaccagaauu

SEQ ID NO: 13462 - RNA, 682 nt, Artificial Sequence
  mRNA product Design i-2 comprising derived and/or modified sequence from LASV(ISTH2010-NIG-2012;Clade II)__AIT17480__Z (opt2)
ggggcgcugccuacggagguggcagccaucuccuucucggcaucaagcuuaccaugggcaaccgccacgccaaguccaccaaggucgacgagcaccagcgcgcccaccucguccccgacgccucccaccucggcccccaguucugcaaguccugcugguucgagaaccgcggccucgucgagugcaacaaccacuaccucugccucaacugccucucccuccuccucuccgucuccucccgcugccccaucugcaagaugccccuccccaccaagcucaaggccgccgcccagcccuccgcccccuccaccgaggucauccaguccaccacccccccccccuacacccccugaggacuagugcaucacauuuaaaagcaucucagccuaccaugagaauaagagaaagaaaaugaagaucaauagcuuauucaucucuuuuucuuuuucguugguguaaagccaacacccugucuaaaaaacauaaauuucuuuaaucauuuugccucuuuucucugugcuucaauuaauaaaaaauggaaagaaccuagaucuaaaaaaaaaaaaaaaaaaaaaaaaaaaaaaaaaaaaaaaaaaaaaaaaaaaaaaaaaaaaaaaaugcaucccccccccccccccccccccccccccccccaaaggcucuuuucagagccaccagaauu

SEQ ID NO: 13463 - RNA, 682 nt, Artificial Sequence
  mRNA product Design i-2 comprising derived and/or modified sequence from LASV(Lassa virus/H.sapiens-wt/NGA/2016/ISTH_0017;Clade II)__AVO03713__Z (opt2)
ggggcgcugccuacggagguggcagccaucuccuucucggcaucaagcuuaccaugggcaaccgccaggccaaguccaccaaggucgacgagcaccagcgcgcccaccucguccccgacgccucccaccucggcccccaguucugcaaguccugcugguucgagaaccgcggccucgucgagugcaacaaccacuaccucugccucaacugccucucccuccuccucuccgucuccucccgcugccccaucugcaagaugccccuccccaccaagcucaaggccgccacccagcccuccgcccccuccaccgaggucaaccagaacaccacccccccccccuacacccccugaggacuagugcaucacauuuaaaagcaucucagccuaccaugagaauaagagaaagaaaaugaagaucaauagcuuauucaucucuuuuucuuuuucguugguguaaagccaacacccugucuaaaaaacauaaauuucuuuaaucauuuugccucuuuucucugugcuucaauuaauaaaaaauggaaagaaccuagaucuaaaaaaaaaaaaaaaaaaaaaaaaaaaaaaaaaaaaaaaaaaaaaaaaaaaaaaaaaaaaaaaaugcaucccccccccccccccccccccccccccccccaaaggcucuuuucagagccaccagaauu

SEQ ID NO: 13464 - RNA, 682 nt, Artificial Sequence
  mRNA product Design i-2 comprising derived and/or modified sequence from LASV(Lassa virus/H.sapiens-wt/NGA/2018/ISTH_0959;Clade II)__AVV65084__Z (opt2)
ggggcgcugccuacggagguggcagccaucuccuucucggcaucaagcuuaccaugggcaacaagcaggccaaguccaccaaggucgacgagcaccagcgcgcccaccucguccccgacgccucccaccucggcccccaguucugcaaguccugcugguucgagaaccgcggccucgucgagugcaacaaccacuaccucugccucaacugccucucccuccuccucuccgucuccucccgcugccccaucugcaagaugccccuccccaccaagcucaaggccgccgcccagcccuccgcccccuccaccgaggccauccaguccaccacccccccccccuacacccccugaggacuagugcaucacauuuaaaagcaucucagccuaccaugagaauaagagaaagaaaaugaagaucaauagcuuauucaucucuuuuucuuuuucguugguguaaagccaacacccugucuaaaaaacauaaauuucuuuaaucauuuugccucuuuucucugugcuucaauuaauaaaaaauggaaagaaccuagaucuaaaaaaaaaaaaaaaaaaaaaaaaaaaaaaaaaaaaaaaaaaaaaaaaaaaaaaaaaaaaaaaaugcaucccccccccccccccccccccccccccccccaaaggcucuuuucagagccaccagaauu

SEQ ID NO: 13465 - RNA, 682 nt, Artificial Sequence
  mRNA product Design i-2 comprising derived and/or modified sequence from LASV(LASV003-NIG-2008;Clade II)__AIT17578__Z (opt2)
ggggcgcugccuacggagguggcagccaucuccuucucggcaucaagcuuaccaugggcaaccgccaggccaaguccaccaaggucgacgagcaccagcgcgcccaccucguccccgacgccucccaccucggcccccaguucugcaaguccugcugguucgagaacaagggccucgucgagugcaacaaccacuaccucugccucaacugccucucccuccuccucuccgucuccucccgcugccccaucugcaagaugccccuccccaccaagcuccgcgccgccgcccagcccuccgcccccuccaccgaguccgcccagaacaccgcccccccccccuacgcccccugaggacuagugcaucacauuuaaaagcaucucagccuaccaugagaauaagagaaagaaaaugaagaucaauagcuuauucaucucuuuuucuuuuucguugguguaaagccaacacccugucuaaaaaacauaaauuucuuuaaucauuuugccucuuuucucugugcuucaauuaauaaaaaauggaaagaaccuagaucuaaaaaaaaaaaaaaaaaaaaaaaaaaaaaaaaaaaaaaaaaaaaaaaaaaaaaaaaaaaaaaaaugcaucccccccccccccccccccccccccccccccaaaggcucuuuucagagccaccagaauu

SEQ ID NO: 13466 - RNA, 682 nt, Artificial Sequence
  mRNA product Design i-2 comprising derived and/or modified sequence from LASV(LASV035-NIG-2009;Clade II)__AIT17586__Z (opt2)
ggggcgcugccuacggagguggcagccaucuccuucucggcaucaagcuuaccaugggcaacaagcaggccaaguccaccaaggucgacgagcaccagcgcgcccaccucguccccgacgccucccaccucggcccccaguucugcaaguccugcugguucgagaaccgcggccucgucgagugcaacaaccacuaccucugccucaacugccucucccuccuccucuccgucuccucccgcugccccaucugcaagaugccccuccccacccgccucaaggccgccgcccagcccuccgcccccuccaccgaggucacccagaacaccacccccccccccuacacccccugaggacuagugcaucacauuuaaaagcaucucagccuaccaugagaauaagagaaagaaaaugaagaucaauagcuuauucaucucuuuuucuuuuucguugguguaaagccaacacccugucuaaaaaacauaaauuucuuuaaucauuuugccucuuuucucugugcuucaauuaauaaaaaauggaaagaaccuagaucuaaaaaaaaaaaaaaaaaaaaaaaaaaaaaaaaaaaaaaaaaaaaaaaaaaaaaaaaaaaaaaaaugcaucccccccccccccccccccccccccccccccaaaggcucuuuucagagccaccagaauu

SEQ ID NO: 13467 - RNA, 682 nt, Artificial Sequence
  mRNA product Design i-2 comprising derived and/or modified sequence from LASV(LASV1000-NIG-2009;Clade II)__AIT17780__Z (opt2)
ggggcgcugccuacggagguggcagccaucuccuucucggcaucaagcuuaccaugggcaaccgccagaccaaguccaccaaggucgacgagcaccagcgcgccuaccucguccccgacgccucccuccucggcccccaguucugcaaguccugcugguucgagaacaagggccucgucgagugcaacaaccacuaccucugccucaacugccucucccuccuccucuccgucuccucccgcugccccaucugcaagaugccccuccccacccgccucaaggccgccgcccagcccuccgccccccccaccgaggccauccagaacaccacccccccccccuacacccccugaggacuagugcaucacauuuaaaagcaucucagccuaccaugagaauaagagaaagaaaaugaagaucaauagcuuauucaucucuuuuucuuuuucguugguguaaagccaacacccugucuaaaaaacauaaauuucuuuaaucauuuugccucuuuucucugugcuucaauuaauaaaaaauggaaagaaccuagaucuaaaaaaaaaaaaaaaaaaaaaaaaaaaaaaaaaaaaaaaaaaaaaaaaaaaaaaaaaaaaaaaaugcaucccccccccccccccccccccccccccccccaaaggcucuuuucagagccaccagaauu

SEQ ID NO: 13468 - RNA, 682 nt, Artificial Sequence
  mRNA product Design i-2 comprising derived and/or modified sequence from LASV(LASV221-NIG-2010;Clade II)__AIT17622__Z (opt2)
ggggcgcugccuacggagguggcagccaucuccuucucggcaucaagcuuaccaugggcaaccgccaggccaaguccaccaaggucgacgagcaccagcgcgcccaccucguccccgacgccucccaccucggcccccaguucugcaaguccugcugguucgagaaccgcggccucgucgagugcaacaaccacuaccucugccucaacugccucucccuccuccucuccgucuccucccgcugccccaucugcaagaugccccuccccaccaagcucaaggccgccacccagcccuccgcccccuccaccgaggucacccagaacaccauccccccccccuacucccccugaggacuagugcaucacauuuaaaagcaucucagccuaccaugagaauaagagaaagaaaaugaagaucaauagcuuauucaucucuuuuucuuuuucguugguguaaagccaacacccugucuaaaaaacauaaauuucuuuaaucauuuugccucuuuucucugugcuucaauuaauaaaaaauggaaagaaccuagaucuaaaaaaaaaaaaaaaaaaaaaaaaaaaaaaaaaaaaaaaaaaaaaaaaaaaaaaaaaaaaaaaaugcaucccccccccccccccccccccccccccccccaaaggcucuuuucagagccaccagaauu

SEQ ID NO: 13469 - RNA, 682 nt, Artificial Sequence
  mRNA product Design i-2 comprising derived and/or modified sequence from LASV(LASV237-NIG-2010;Clade II)__AIT17636__Z (opt2)
ggggcgcugccuacggagguggcagccaucuccuucucggcaucaagcuuaccaugggcaaccgccaggccaaguccaccaaggucgacgagcaccagcgcgcccaccucguccccgacgccucccaccucggcccccaguucugcaaguccugcugguucgagaaccgcggccucgucgagugcaacaaccacuaccucugccucaacugccucucccuccuccucuccgucuccucccgcugccccaucugcaagaugccccuccccaccaagcucaaggccgccgcccagcccuccgcccccuccaucgagaccauccagaacaccacccccccccccuacacccccugaggacuagugcaucacauuuaaaagcaucucagccuaccaugagaauaagagaaagaaaaugaagaucaauagcuuauucaucucuuuuucuuuuucguugguguaaagccaacacccugucuaaaaaacauaaauuucuuuaaucauuuugccucuuuucucugugcuucaauuaauaaaaaauggaaagaaccuagaucuaaaaaaaaaaaaaaaaaaaaaaaaaaaaaaaaaaaaaaaaaaaaaaaaaaaaaaaaaaaaaaaaugcaucccccccccccccccccccccccccccccccaaaggcucuuuucagagccaccagaauu

SEQ ID NO: 13470 - RNA, 682 nt, Artificial Sequence
  mRNA product Design i-2 comprising derived and/or modified sequence from LASV(LASV253-NIG-2011;Clade II)__AIT17668__Z (opt2)
ggggcgcugccuacggagguggcagccaucuccuucucggcaucaagcuuaccaugggcaaccgccaggccaaguccaccaaggucgacgagcaccagcgcgcccaccucguccccgacgccucccaccucggcccccaguucugcaaguccugcugguucgagaacaagggccucgucgagugcaacaaccacuaccucugccucaacugccucucccuccuccucuccgucuccucccgcugccccaucugcaagaugccccuccccaccaagcucaagaccaccgcccagcccuccgccccccccaccgaggccgccaagaacaccgcccccccccccuacgcccccugaggacuagugcaucacauuuaaaagcaucucagccuaccaugagaauaagagaaagaaaaugaagaucaauagcuuauucaucucuuuuucuuuuucguugguguaaagccaacacccugucuaaaaaacauaaauuucuuuaaucauuuugccucuuuucucugugcuucaauuaauaaaaaauggaaagaaccuagaucuaaaaaaaaaaaaaaaaaaaaaaaaaaaaaaaaaaaaaaaaaaaaaaaaaaaaaaaaaaaaaaaaugcaucccccccccccccccccccccccccccccccaaaggcucuuuucagagccaccagaauu

SEQ ID NO: 13471 - RNA, 682 nt, Artificial Sequence
  mRNA product Design i-2 comprising derived and/or modified sequence from LASV(G1180-SLE-2010;Clade IV)__AIT17166__Z (opt2)
ggggcgcugccuacggagguggcagccaucuccuucucggcaucaagcuuaccaugggcaacaagcaggccaaggcccccgaggccaaggacuccccccgcgccucccucauccccgacgccacccaccucggcccccaguucugcaaguccugcugguucgagaccaagggccucgucgagugcaacaaccacuaccucugccucaacugccucacccuccuccucuccgucuccaaccgcugccccaucugcaagaugccccuccccaccaagcuccgccccuccgccacccccaccgccccccccaccgaggccgccgacuccaucggccccccccccuacucccccugaggacuagugcaucacauuuaaaagcaucucagccuaccaugagaauaagagaaagaaaaugaagaucaauagcuuauucaucucuuuuucuuuuucguugguguaaagccaacacccugucuaaaaaacauaaauuucuuuaaucauuuugccucuuuucucugugcuucaauuaauaaaaaauggaaagaaccuagaucuaaaaaaaaaaaaaaaaaaaaaaaaaaaaaaaaaaaaaaaaaaaaaaaaaaaaaaaaaaaaaaaaugcaucccccccccccccccccccccccccccccccaaaggcucuuuucagagccaccagaauu

SEQ ID NO: 13472 - RNA, 682 nt, Artificial Sequence
  mRNA product Design i-2 comprising derived and/or modified sequence from LASV(G1442-SLE-2011;Clade IV)__AIT17178__Z (opt2)
ggggcgcugccuacggagguggcagccaucuccuucucggcaucaagcuuaccaugggcaacaagcaggccaaggccuccgaggccaaggacuccccccgcgccucccucauccccgacgccacccaccucggcccccaguucugcaaguccugcugguucgagaacaagggccucgucgagugcaacaaccacuaccucugccucaacugccucucccuccuccucuccgucuccucccgcugccccaucugcaagaugccccuccccacccgccuccgccccuccaccgcccccaccgccccccccgcccgcgccggcgacaacaucaagcccccccccuacucccccugaggacuagugcaucacauuuaaaagcaucucagccuaccaugagaauaagagaaagaaaaugaagaucaauagcuuauucaucucuuuuucuuuuucguugguguaaagccaacacccugucuaaaaaacauaaauuucuuuaaucauuuugccucuuuucucugugcuucaauuaauaaaaaauggaaagaaccuagaucuaaaaaaaaaaaaaaaaaaaaaaaaaaaaaaaaaaaaaaaaaaaaaaaaaaaaaaaaaaaaaaaaugcaucccccccccccccccccccccccccccccccaaaggcucuuuucagagccaccagaauu

SEQ ID NO: 13473 - RNA, 682 nt, Artificial Sequence
  mRNA product Design i-2 comprising derived and/or modified sequence from LASV(G502-SLE-2009;Clade IV)__AIT17124__Z (opt2)
ggggcgcugccuacggagguggcagccaucuccuucucggcaucaagcuuaccaugggcaacaagcaggucaagacccccgaggccaaggacuccccccgcgccucccucauccccgacgccacccaccucggcccccaguucugcaaguccugcugguucgagaacaagggccucgucgagugcaacaaccacuaccucugccucaacugccucacccuccuccucuccgucggcaaccgcugccccaucugcaagaugccccuccccaccaagcuccgccccuccgucacccccaccgccccccccacccgcgccgccgacuccaucggccccccccccuacucccccugaggacuagugcaucacauuuaaaagcaucucagccuaccaugagaauaagagaaagaaaaugaagaucaauagcuuauucaucucuuuuucuuuuucguugguguaaagccaacacccugucuaaaaaacauaaauuucuuuaaucauuuugccucuuuucucugugcuucaauuaauaaaaaauggaaagaaccuagaucuaaaaaaaaaaaaaaaaaaaaaaaaaaaaaaaaaaaaaaaaaaaaaaaaaaaaaaaaaaaaaaaaugcaucccccccccccccccccccccccccccccccaaaggcucuuuucagagccaccagaauu

SEQ ID NO: 13474 - RNA, 682 nt, Artificial Sequence
  mRNA product Design i-2 comprising derived and/or modified sequence from LASV(G733-SLE-2010;Clade IV)__AIT17152__Z (opt2)
ggggcgcugccuacggagguggcagccaucuccuucucggcaucaagcuuaccaugggcaacaagcaggccaagacccccgagaccaaggacuccccccgcgccucccucauccccgacgccacccaccucggcccccaguucugcaaguccugcugguucgagaacaagggccucgucgagugcaacaaccacuaccucugccucaacugccucacccuccuccucuccgucuccaaccgcugccccaucugcaagaugccccuccccaccaagcuccgccccuccaccgcccccaccgccccccccgccggcgccgccgacaacacccgccccccccccuacucccccugaggacuagugcaucacauuuaaaagcaucucagccuaccaugagaauaagagaaagaaaaugaagaucaauagcuuauucaucucuuuuucuuuuucguugguguaaagccaacacccugucuaaaaaacauaaauuucuuuaaucauuuugccucuuuucucugugcuucaauuaauaaaaaauggaaagaaccuagaucuaaaaaaaaaaaaaaaaaaaaaaaaaaaaaaaaaaaaaaaaaaaaaaaaaaaaaaaaaaaaaaaaugcaucccccccccccccccccccccccccccccccaaaggcucuuuucagagccaccagaauu

SEQ ID NO: 13475 - RNA, 694 nt, Artificial Sequence
  mRNA product Design i-2 comprising derived and/or modified sequence from MOPV/LASV reassortant(IGS-1;Clade IV)__AFY05533__Z (opt2)
ggggcgcugccuacggagguggcagccaucuccuucucggcaucaagcuuaccaugggcaagacccaguccaagggccagcccuccaccaaccuccucaaggagaccgagccccgccaccccgucauccccgacgcccgcggcaccggccccgaguucugcaaguccugcugguucgagcgccgcggccucguccgcugcaacgaccacuaccucugccucaacugccucacccuccuccacaccgucuccgaccgcugccccaucugcaagcacaagcuccccuuccgccucgagcuccagacccagcccaccgccccccccgagaucccccccucccagaaccccccccccuacucccccugaggacuagugcaucacauuuaaaagcaucucagccuaccaugagaauaagagaaagaaaaugaagaucaauagcuuauucaucucuuuuucuuuuucguugguguaaagccaacacccugucuaaaaaacauaaauuucuuuaaucauuuugccucuuuucucugugcuucaauuaauaaaaaauggaaagaaccuagaucuaaaaaaaaaaaaaaaaaaaaaaaaaaaaaaaaaaaaaaaaaaaaaaaaaaaaaaaaaaaaaaaaugcaucccccccccccccccccccccccccccccccaaaggcucuuuucagagccaccagaauu

SEQ ID NO: 13476 - RNA, 682 nt, Artificial Sequence
  mRNA product Design i-2 comprising derived and/or modified sequence from LASV(LM776-SLE-2012;Clade IV)__AIT17824__Z (opt2)
ggggcgcugccuacggagguggcagccaucuccuucucggcaucaagcuuaccaugggcaacaagcaggccaaggccuccgaggagaagaacuccccccgcgccucccucauccccgacgccacccaccucggcccccaguucugcaaguccugcugguucgagaacaagggccucgucgagugcaacaaccacuaccucugccucaacugccucacccuccuccucuccgucuccaaccgcugccccaucugcaagaugccccuccccaccaagcuccgccccuccaccacccccaccgccccccccaccggcgccgccgacuccauccgccccccccccuacucccccugaggacuagugcaucacauuuaaaagcaucucagccuaccaugagaauaagagaaagaaaaugaagaucaauagcuuauucaucucuuuuucuuuuucguugguguaaagccaacacccugucuaaaaaacauaaauuucuuuaaucauuuugccucuuuucucugugcuucaauuaauaaaaaauggaaagaaccuagaucuaaaaaaaaaaaaaaaaaaaaaaaaaaaaaaaaaaaaaaaaaaaaaaaaaaaaaaaaaaaaaaaaugcaucccccccccccccccccccccccccccccccaaaggcucuuuucagagccaccagaauu

SEQ ID NO: 13477 - RNA, 682 nt, Artificial Sequence
  mRNA product Design i-2 comprising derived and/or modified sequence from LASV(Mad39;Clade IV)__ANH09743__Z (opt2)
ggggcgcugccuacggagguggcagccaucuccuucucggcaucaagcuuaccaugggcaacaagcaggccaaggccuccgaggucgaggacggcccccgcgccucccucauccccgacgccacccaccucggcccccaguucugcaaguccugcugguucgagaacaagucccucgucgagugcaacaaccacuaccucugccucaacugccucacccuccuccucuccgucuccaaccgcugccccaucugcaagaugccccuccccacccgccucaagcccuccgucguccccaccgccccccccacccgcgccggcgacggcacccgccccccccccuacucccccugaggacuagugcaucacauuuaaaagcaucucagccuaccaugagaauaagagaaagaaaaugaagaucaauagcuuauucaucucuuuuucuuuuucguugguguaaagccaacacccugucuaaaaaacauaaauuucuuuaaucauuuugccucuuuucucugugcuucaauuaauaaaaaauggaaagaaccuagaucuaaaaaaaaaaaaaaaaaaaaaaaaaaaaaaaaaaaaaaaaaaaaaaaaaaaaaaaaaaaaaaaaugcaucccccccccccccccccccccccccccccccaaaggcucuuuucagagccaccagaauu

SEQ ID NO: 13478 - RNA, 682 nt, Artificial Sequence
  mRNA product Design i-2 comprising derived and/or modified sequence from LASV(Z0947-SLE-2011;Clade IV)__AIT17838__Z (opt2)
ggggcgcugccuacggagguggcagccaucuccuucucggcaucaagcuuaccaugggcaacaagcaggccaagguccccgaguccaaggacuccccccgcgccucccucauccccgacgccacccaccucggcccccaguucugcaaguccugcugguucgagaacaagggccucgucgagugcaacaaccacuaccucugccucaacugccucacccuccuccucuccgucuccaaccgcugccccaucugcaagaugccccuccccaccaagcucaagcccuccgccgcccccaccgccccccccaccggcgccgccgacuccauccgccccccccccuacucccccugaggacuagugcaucacauuuaaaagcaucucagccuaccaugagaauaagagaaagaaaaugaagaucaauagcuuauucaucucuuuuucuuuuucguugguguaaagccaacacccugucuaaaaaacauaaauuucuuuaaucauuuugccucuuuucucugugcuucaauuaauaaaaaauggaaagaaccuagaucuaaaaaaaaaaaaaaaaaaaaaaaaaaaaaaaaaaaaaaaaaaaaaaaaaaaaaaaaaaaaaaaaugcaucccccccccccccccccccccccccccccccaaaggcucuuuucagagccaccagaauu

SEQ ID NO: 13479 - RNA, 682 nt, Artificial Sequence
  mRNA product Design i-2 comprising derived and/or modified sequence from LASV(Josiah;Clade IV)__ADY11072/NP_694871__Z (opt3)
ggggcgcugccuacggagguggcagccaucuccuucucggcaucaagcuuaccaugggcaacaagcaggccaaggcucccgagagcaaggacuccccuagagcaucucugaucccagaugccacccaccucgggccgcaauucugcaaaucauguugguuugaaaauaagggacuuguggagugcaacaaucauuaccuguguuugaacugcuuaacacugcuacucagugucagcaauaggugucccauuugcaaaaugccucugccaacuaaacuucggcccuccgcggcuccuacggccccacccaccggugcagccgacucuauacgcccuccaccguauucgcccugaggacuagugcaucacauuuaaaagcaucucagccuaccaugagaauaagagaaagaaaaugaagaucaauagcuuauucaucucuuuuucuuuuucguugguguaaagccaacacccugucuaaaaaacauaaauuucuuuaaucauuuugccucuuuucucugugcuucaauuaauaaaaaauggaaagaaccuagaucuaaaaaaaaaaaaaaaaaaaaaaaaaaaaaaaaaaaaaaaaaaaaaaaaaaaaaaaaaaaaaaaaugcaucccccccccccccccccccccccccccccccaaaggcucuuuucagagccaccagaauu

SEQ ID NO: 13480 - RNA, 685 nt, Artificial Sequence
  mRNA product Design i-2 comprising derived and/or modified sequence from LASV(Pinneo-NIG-1969;Clade I)__AIT17834__Z (opt3)
ggggcgcugccuacggagguggcagccaucuccuucucggcaucaagcuuaccaugggcaacaagcagaccagaagcccucccaaaccagagcacccgaggcccacacugcucccugacgccucccaucuugggccacaauucugcaagucuuguugguuugaaaauaaaggacugguggagugcaacaaucacuacuuguguuuaaacugccugacucuacuccugucagucagugaucggugucccaucugcaagaugccucuuccaacgaaacuggcuguucgcacccagcccagcgcaccuccauugaaucaggguaacacacaguccucuccgcccccuuauucgccaugaggacuagugcaucacauuuaaaagcaucucagccuaccaugagaauaagagaaagaaaaugaagaucaauagcuuauucaucucuuuuucuuuuucguugguguaaagccaacacccugucuaaaaaacauaaauuucuuuaaucauuuugccucuuuucucugugcuucaauuaauaaaaaauggaaagaaccuagaucuaaaaaaaaaaaaaaaaaaaaaaaaaaaaaaaaaaaaaaaaaaaaaaaaaaaaaaaaaaaaaaaaugcaucccccccccccccccccccccccccccccccaaaggcucuuuucagagccaccagaauu

SEQ ID NO: 13481 - RNA, 682 nt, Artificial Sequence
  mRNA product Design i-2 comprising derived and/or modified sequence from LASV(Nig08-04;Clade II)__ADU56612__Z (opt3)
ggggcgcugccuacggagguggcagccaucuccuucucggcaucaagcuuaccaugggcaacagacagaccaggcccacagaggccacugaacaaagccgggcucaccuggugccugacgcaucccaucucgggccacaguucugcaagucuuguugguuugagaaucgcggacuugucgaaugcaacaaucacuaccuguguuugaacugcuuaucacugcuacucaguguuagcucccgauguccgaucugcaaaaugccccugccuacgcgucuuaaggccucugcgcagccaucggcucccccuaccgaggccccacagaauacaacucccccuccauauaccccgugaggacuagugcaucacauuuaaaagcaucucagccuaccaugagaauaagagaaagaaaaugaagaucaauagcuuauucaucucuuuuucuuuuucguugguguaaagccaacacccugucuaaaaaacauaaauuucuuuaaucauuuugccucuuuucucugugcuucaauuaauaaaaaauggaaagaaccuagaucuaaaaaaaaaaaaaaaaaaaaaaaaaaaaaaaaaaaaaaaaaaaaaaaaaaaaaaaaaaaaaaaaugcaucccccccccccccccccccccccccccccccaaaggcucuuuucagagccaccagaauu

SEQ ID NO: 13482 - RNA, 682 nt, Artificial Sequence
  mRNA product Design i-2 comprising derived and/or modified sequence from LASV(Nig08-A19;Clade III)__ADU56620__Z (opt3)
ggggcgcugccuacggagguggcagccaucuccuucucggcaucaagcuuaccaugggcgggaagcacaccaaaccccagagagagagcaacuccccuagggccucucugaucccagacgcuacacaucucggaccgcaauucugcaagucauguugguuugaaaauaaaggucuuguggagugcaacaaucacuaccuguguuugaacugcuuaacucugcuacucagugucagcaaucggugucccauuugcaagaugccucugccaacgcgccuucgagcauccaccaaccccacagccccucagguugaacaggugggcccaacuaaucccccuccauauucuccgugaggacuagugcaucacauuuaaaagcaucucagccuaccaugagaauaagagaaagaaaaugaagaucaauagcuuauucaucucuuuuucuuuuucguugguguaaagccaacacccugucuaaaaaacauaaauuucuuuaaucauuuugccucuuuucucugugcuucaauuaauaaaaaauggaaagaaccuagaucuaaaaaaaaaaaaaaaaaaaaaaaaaaaaaaaaaaaaaaaaaaaaaaaaaaaaaaaaaaaaaaaaugcaucccccccccccccccccccccccccccccccaaaggcucuuuucagagccaccagaauu

SEQ ID NO: 13483 - RNA, 682 nt, Artificial Sequence
  mRNA product Design i-2 comprising derived and/or modified sequence from LASV(AV;Clade V)__CCA30312__Z (opt3)
ggggcgcugccuacggagguggcagccaucuccuucucggcaucaagcuuaccaugggcaacagacaggccaagaaucccgagguggaaaacagcccuagggcuucccugaucccagacgcaacccaccucgggccgcaauucugcaaaucuuguugguuugagaauaagggacuugucgaaugcaacaaucauuaccuguguuugaacugcuuaucacugcuacucaguguuagcaaucggugucccauuugcaaaaugccucugccaacacgccuucgacccacuacgaccccuacagccccacagauaaucaaggagaacacuaccaaucccccuccauauacaccgugaggacuagugcaucacauuuaaaagcaucucagccuaccaugagaauaagagaaagaaaaugaagaucaauagcuuauucaucucuuuuucuuuuucguugguguaaagccaacacccugucuaaaaaacauaaauuucuuuaaucauuuugccucuuuucucugugcuucaauuaauaaaaaauggaaagaaccuagaucuaaaaaaaaaaaaaaaaaaaaaaaaaaaaaaaaaaaaaaaaaaaaaaaaaaaaaaaaaaaaaaaaugcaucccccccccccccccccccccccccccccccaaaggcucuuuucagagccaccagaauu

SEQ ID NO: 13484 - RNA, 682 nt, Artificial Sequence
  mRNA product Design i-2 comprising derived and/or modified sequence from LASV(Togo/2016/7082;Clade VI)__AMR44579__Z (opt3)
ggggcgcugccuacggagguggcagccaucuccuucucggcaucaagcuuaccaugggcgccagacagaccaagcaaccccagaucgaggggagcccuagggcuucccuggugccagacgcaucucaccucggaccgcaguucugcaagucauguugguuugaaaacaagggucuugucgagugcaauaaccauuaccuguguuugaauugcuuaagucugcuacucagcguuuccaaccggugucccauuugcaaaaugccucugccaacaaaacuucgcgugucuucggcccccucagcgccuccagcugccacugcacagcccggcacgccuccaccguauagccccugaggacuagugcaucacauuuaaaagcaucucagccuaccaugagaauaagagaaagaaaaugaagaucaauagcuuauucaucucuuuuucuuuuucguugguguaaagccaacacccugucuaaaaaacauaaauuucuuuaaucauuuugccucuuuucucugugcuucaauuaauaaaaaauggaaagaaccuagaucuaaaaaaaaaaaaaaaaaaaaaaaaaaaaaaaaaaaaaaaaaaaaaaaaaaaaaaaaaaaaaaaaugcaucccccccccccccccccccccccccccccccaaaggcucuuuucagagccaccagaauu

SEQ ID NO: 13485 - RNA, 682 nt, Artificial Sequence
  mRNA product Design i-2 comprising derived and/or modified sequence from LASV(KAK-428;Clade n.d. (VII))__ANH09761__Z (opt3)
ggggcgcugccuacggagguggcagccaucuccuucucggcaucaagcuuaccaugggcaacaaggggaccaaacccacacagaauagcgagccuuccagagccaaccuggugccagacgcuucuuaccucggaccgcaauucugcaagucauguugguuugaaaauaaaggucuugucgagugcaacaaucacuaucuguguuugaacugcuuaacuaugcugcuaaguguuagcaauaggugucccaucugcaagaugccucucccaacgaaaauuaaggcauccggcucucccucggccccuccaaccgaagcgaacucagcugugagcccucccccauacacaccgugaggacuagugcaucacauuuaaaagcaucucagccuaccaugagaauaagagaaagaaaaugaagaucaauagcuuauucaucucuuuuucuuuuucguugguguaaagccaacacccugucuaaaaaacauaaauuucuuuaaucauuuugccucuuuucucugugcuucaauuaauaaaaaauggaaagaaccuagaucuaaaaaaaaaaaaaaaaaaaaaaaaaaaaaaaaaaaaaaaaaaaaaaaaaaaaaaaaaaaaaaaaugcaucccccccccccccccccccccccccccccccaaaggcucuuuucagagccaccagaauu

SEQ ID NO: 13486 - RNA, 682 nt, Artificial Sequence
  mRNA product Design i-2 comprising derived and/or modified sequence from LASV(ISTH0009-NIG-2011;Clade II)__AIT17402__Z (opt3)
ggggcgcugccuacggagguggcagccaucuccuucucggcaucaagcuuaccaugggcaacagacaggccaagagcaccaaaguggacgagcaccaaagggcucaucugguccccgaugcaucccaccucgggccucaguucugcaagucuuguugguuugaaaaucggggacuuguugagugcaacaaucauuaccuguguuugaacugcuuaucacugcuacucagugugagcucccgcuguccaaucugcaaaaugccgcugcccacaaaacuuaaggccgcggcucagccuucugccccaucgacugaaacgauucagaauaccacacccccuccauauacucccugaggacuagugcaucacauuuaaaagcaucucagccuaccaugagaauaagagaaagaaaaugaagaucaauagcuuauucaucucuuuuucuuuuucguugguguaaagccaacacccugucuaaaaaacauaaauuucuuuaaucauuuugccucuuuucucugugcuucaauuaauaaaaaauggaaagaaccuagaucuaaaaaaaaaaaaaaaaaaaaaaaaaaaaaaaaaaaaaaaaaaaaaaaaaaaaaaaaaaaaaaaaugcaucccccccccccccccccccccccccccccccaaaggcucuuuucagagccaccagaauu

SEQ ID NO: 13487 - RNA, 682 nt, Artificial Sequence
  mRNA product Design i-2 comprising derived and/or modified sequence from LASV(ISTH2010-NIG-2012;Clade II)__AIT17480__Z (opt3)
ggggcgcugccuacggagguggcagccaucuccuucucggcaucaagcuuaccaugggcaacagacacgccaagagcaccaaaguggacgagcaucagagggcucaccugguccccgaugcaucccaucucgggccucaauucugcaagucuuguugguuugaaaaucggggacuuguugagugcaacaaucacuaccuguguuugaacugcuuaucacugcuacucagugugagcucccgcuguccaaucugcaaaaugccgcugcccacaaaacuuaaggccgcggcucagccuucugccccaucgacugaaguaauucagucaacgacacccccuccauauacccccugaggacuagugcaucacauuuaaaagcaucucagccuaccaugagaauaagagaaagaaaaugaagaucaauagcuuauucaucucuuuuucuuuuucguugguguaaagccaacacccugucuaaaaaacauaaauuucuuuaaucauuuugccucuuuucucugugcuucaauuaauaaaaaauggaaagaaccuagaucuaaaaaaaaaaaaaaaaaaaaaaaaaaaaaaaaaaaaaaaaaaaaaaaaaaaaaaaaaaaaaaaaugcaucccccccccccccccccccccccccccccccaaaggcucuuuucagagccaccagaauu

SEQ ID NO: 13488 - RNA, 682 nt, Artificial Sequence
  mRNA product Design i-2 comprising derived and/or modified sequence from LASV(Lassa virus/H.sapiens-wt/NGA/2016/ISTH_0017;Clade II)__AVO03713__Z (opt3)
ggggcgcugccuacggagguggcagccaucuccuucucggcaucaagcuuaccaugggcaacagacaggccaagagcaccaaaguggacgagcaccaaagggcucaucugguccccgaugcaucccaccucgggccucaguucugcaagucuuguugguuugaaaaucggggacuuguugagugcaacaaucauuaccuguguuugaacugcuuaucacugcuacucagugugagcucccgcuguccaaucugcaaaaugccgcugcccacaaaacuuaaggccgcgacucagccuucugcuccaucgacggaaguaaaucagaacaccacacccccuccauauacucccugaggacuagugcaucacauuuaaaagcaucucagccuaccaugagaauaagagaaagaaaaugaagaucaauagcuuauucaucucuuuuucuuuuucguugguguaaagccaacacccugucuaaaaaacauaaauuucuuuaaucauuuugccucuuuucucugugcuucaauuaauaaaaaauggaaagaaccuagaucuaaaaaaaaaaaaaaaaaaaaaaaaaaaaaaaaaaaaaaaaaaaaaaaaaaaaaaaaaaaaaaaaugcaucccccccccccccccccccccccccccccccaaaggcucuuuucagagccaccagaauu

SEQ ID NO: 13489 - RNA, 682 nt, Artificial Sequence
  mRNA product Design i-2 comprising derived and/or modified sequence from LASV(Lassa virus/H.sapiens-wt/NGA/2018/ISTH_0959;Clade II)__AVV65084__Z (opt3)
ggggcgcugccuacggagguggcagccaucuccuucucggcaucaagcuuaccaugggcaacaagcaggccaaaagcaccaagguggacgagcaccaaagagcucaucugguccccgaugcaucccaccucgggccucaguucugcaaaucuuguugguuugaaaauaggggacuuguugagugcaacaaucauuaccuguguuugaacugcuuaucacugcuacucagugugagcucccgguguccaaucugcaagaugccgcugcccacaaaacuuaaggccgcggcucagccuucugccccaucgacugaagcaauucagucaacgacacccccuccauauacccccugaggacuagugcaucacauuuaaaagcaucucagccuaccaugagaauaagagaaagaaaaugaagaucaauagcuuauucaucucuuuuucuuuuucguugguguaaagccaacacccugucuaaaaaacauaaauuucuuuaaucauuuugccucuuuucucugugcuucaauuaauaaaaaauggaaagaaccuagaucuaaaaaaaaaaaaaaaaaaaaaaaaaaaaaaaaaaaaaaaaaaaaaaaaaaaaaaaaaaaaaaaaugcaucccccccccccccccccccccccccccccccaaaggcucuuuucagagccaccagaauu

SEQ ID NO: 13490 - RNA, 682 nt, Artificial Sequence
  mRNA product Design i-2 comprising derived and/or modified sequence from LASV(LASV003-NIG-2008;Clade II)__AIT17578__Z (opt3)
ggggcgcugccuacggagguggcagccaucuccuucucggcaucaagcuuaccaugggcaacagacaggccaagagcaccaaaguggacgagcaccaaagggcucaucugguccccgaugcaucccaccucgggccucaguucugcaagucuuguugguuugaaaauaaaggacuuguugagugcaacaaucauuaccuguguuugaacugcuuaucacugcuacucagugugagcucccgguguccaaucugcaagaugccgcugcccacaaaacuucgcgccgcggcucagccuucugccccaucgacugaaucagcacagaauacggcucccccuccauaugcccccugaggacuagugcaucacauuuaaaagcaucucagccuaccaugagaauaagagaaagaaaaugaagaucaauagcuuauucaucucuuuuucuuuuucguugguguaaagccaacacccugucuaaaaaacauaaauuucuuuaaucauuuugccucuuuucucugugcuucaauuaauaaaaaauggaaagaaccuagaucuaaaaaaaaaaaaaaaaaaaaaaaaaaaaaaaaaaaaaaaaaaaaaaaaaaaaaaaaaaaaaaaaugcaucccccccccccccccccccccccccccccccaaaggcucuuuucagagccaccagaauu

SEQ ID NO: 13491 - RNA, 682 nt, Artificial Sequence
  mRNA product Design i-2 comprising derived and/or modified sequence from LASV(LASV035-NIG-2009;Clade II)__AIT17586__Z (opt3)
ggggcgcugccuacggagguggcagccaucuccuucucggcaucaagcuuaccaugggcaacaagcaggccaaaagcaccaagguggacgagcaccaaagagcucaucugguccccgaugcaucccaccucgggccucaguucugcaaaucuuguugguuugaaaauaggggacuuguugagugcaacaaucauuaccuguguuugaacugcuuaucacugcuacucagugugagcucccgguguccaaucugcaagaugccgcugcccacacgccuuaaagccgcggcucagccuucugccccaucgacugaaguaacgcagaauaccacacccccuccauauacucccugaggacuagugcaucacauuuaaaagcaucucagccuaccaugagaauaagagaaagaaaaugaagaucaauagcuuauucaucucuuuuucuuuuucguugguguaaagccaacacccugucuaaaaaacauaaauuucuuuaaucauuuugccucuuuucucugugcuucaauuaauaaaaaauggaaagaaccuagaucuaaaaaaaaaaaaaaaaaaaaaaaaaaaaaaaaaaaaaaaaaaaaaaaaaaaaaaaaaaaaaaaaugcaucccccccccccccccccccccccccccccccaaaggcucuuuucagagccaccagaauu

SEQ ID NO: 13492 - RNA, 682 nt, Artificial Sequence
  mRNA product Design i-2 comprising derived and/or modified sequence from LASV(LASV1000-NIG-2009;Clade II)__AIT17780__Z (opt3)
ggggcgcugccuacggagguggcagccaucuccuucucggcaucaagcuuaccaugggcaacagacagaccaagagcacaaaaguggacgagcaccaaagggccuaccugguccccgaugcuucccuccuugggccucaguucugcaagucuuguugguuugaaaauaaaggacugguugagugcaacaaucauuauuuguguuuaaacugccugucacuacuccugagugugagcucccgguguccaaucugcaagaugccgcuucccacucgccugaaagcagccgcgcagccuucugcuccacccacggaagccauucagaauaccacaccuccacccuacacuccuugaggacuagugcaucacauuuaaaagcaucucagccuaccaugagaauaagagaaagaaaaugaagaucaauagcuuauucaucucuuuuucuuuuucguugguguaaagccaacacccugucuaaaaaacauaaauuucuuuaaucauuuugccucuuuucucugugcuucaauuaauaaaaaauggaaagaaccuagaucuaaaaaaaaaaaaaaaaaaaaaaaaaaaaaaaaaaaaaaaaaaaaaaaaaaaaaaaaaaaaaaaaugcaucccccccccccccccccccccccccccccccaaaggcucuuuucagagccaccagaauu

SEQ ID NO: 13493 - RNA, 682 nt, Artificial Sequence
  mRNA product Design i-2 comprising derived and/or modified sequence from LASV(LASV221-NIG-2010;Clade II)__AIT17622__Z (opt3)
ggggcgcugccuacggagguggcagccaucuccuucucggcaucaagcuuaccaugggcaacagacaggccaagagcaccaaaguggacgagcaccaaagggcucaucugguccccgaugcaucccaccucgggccucaguucugcaagucuuguugguuugaaaaucggggacuuguugagugcaacaaucauuaccuguguuugaacugcuuaucacugcuacucagugugagcucccgcuguccaaucugcaaaaugccgcugcccacaaaacuuaaggccgcgacucagccuucugcuccaucgacggaaguaacccagaauacaauucccccuccauauucacccugaggacuagugcaucacauuuaaaagcaucucagccuaccaugagaauaagagaaagaaaaugaagaucaauagcuuauucaucucuuuuucuuuuucguugguguaaagccaacacccugucuaaaaaacauaaauuucuuuaaucauuuugccucuuuucucugugcuucaauuaauaaaaaauggaaagaaccuagaucuaaaaaaaaaaaaaaaaaaaaaaaaaaaaaaaaaaaaaaaaaaaaaaaaaaaaaaaaaaaaaaaaugcaucccccccccccccccccccccccccccccccaaaggcucuuuucagagccaccagaauu

SEQ ID NO: 13494 - RNA, 682 nt, Artificial Sequence
  mRNA product Design i-2 comprising derived and/or modified sequence from LASV(LASV237-NIG-2010;Clade II)__AIT17636__Z (opt3)
ggggcgcugccuacggagguggcagccaucuccuucucggcaucaagcuuaccaugggcaacagacaggccaagagcaccaaaguggacgagcaccaaagggcucaucugguccccgaugcaucccaccucgggccucaguucugcaagucuuguugguuugaaaaucggggacuuguugagugcaacaaucauuaccuguguuugaacugcuuaucacugcuacucagugugagcucccgcuguccaaucugcaaaaugccgcugcccacaaaacuuaaggccgcggcucagccuucugccccaucgauugaaacuauacagaauacgacacccccuccauauacccccugaggacuagugcaucacauuuaaaagcaucucagccuaccaugagaauaagagaaagaaaaugaagaucaauagcuuauucaucucuuuuucuuuuucguugguguaaagccaacacccugucuaaaaaacauaaauuucuuuaaucauuuugccucuuuucucugugcuucaauuaauaaaaaauggaaagaaccuagaucuaaaaaaaaaaaaaaaaaaaaaaaaaaaaaaaaaaaaaaaaaaaaaaaaaaaaaaaaaaaaaaaaugcaucccccccccccccccccccccccccccccccaaaggcucuuuucagagccaccagaauu

SEQ ID NO: 13495 - RNA, 682 nt, Artificial Sequence
  mRNA product Design i-2 comprising derived and/or modified sequence from LASV(LASV253-NIG-2011;Clade II)__AIT17668__Z (opt3)
ggggcgcugccuacggagguggcagccaucuccuucucggcaucaagcuuaccaugggcaacagacaggccaagagcaccaaaguggacgagcaccaaagggcucaucugguccccgaugcaucccaccucgggccucaguucugcaagucuuguugguuugaaaauaaaggacuuguugagugcaacaaucauuaccuguguuugaacugcuuaucacugcuacucagugugagcucccgguguccaaucugcaagaugccgcugcccacaaaacuuaagacuacggcccagccuucugcgccacccaccgaagcugccaagaauacagcaccuccacccuaugccccuugaggacuagugcaucacauuuaaaagcaucucagccuaccaugagaauaagagaaagaaaaugaagaucaauagcuuauucaucucuuuuucuuuuucguugguguaaagccaacacccugucuaaaaaacauaaauuucuuuaaucauuuugccucuuuucucugugcuucaauuaauaaaaaauggaaagaaccuagaucuaaaaaaaaaaaaaaaaaaaaaaaaaaaaaaaaaaaaaaaaaaaaaaaaaaaaaaaaaaaaaaaaugcaucccccccccccccccccccccccccccccccaaaggcucuuuucagagccaccagaauu

SEQ ID NO: 13496 - RNA, 682 nt, Artificial Sequence
  mRNA product Design i-2 comprising derived and/or modified sequence from LASV(G1180-SLE-2010;Clade IV)__AIT17166__Z (opt3)
ggggcgcugccuacggagguggcagccaucuccuucucggcaucaagcuuaccaugggcaacaagcaggccaaggcucccgaggcaaaggacagcccuagagccucccugaucccagaugcgacccaccucgggccgcaauucugcaaaucuuguugguuugaaacaaagggacuuguggagugcaauaaccauuaccuguguuugaauugcuuaacucugcuacucucagucaguaacaggugucccauuugcaaaaugccucugccaacgaaacuucggcccagcgcuaccccuacagccccacccacugaagcagccgacuccauagguccuccaccguauucucccugaggacuagugcaucacauuuaaaagcaucucagccuaccaugagaauaagagaaagaaaaugaagaucaauagcuuauucaucucuuuuucuuuuucguugguguaaagccaacacccugucuaaaaaacauaaauuucuuuaaucauuuugccucuuuucucugugcuucaauuaauaaaaaauggaaagaaccuagaucuaaaaaaaaaaaaaaaaaaaaaaaaaaaaaaaaaaaaaaaaaaaaaaaaaaaaaaaaaaaaaaaaugcaucccccccccccccccccccccccccccccccaaaggcucuuuucagagccaccagaauu

SEQ ID NO: 13497 - RNA, 682 nt, Artificial Sequence
  mRNA product Design i-2 comprising derived and/or modified sequence from LASV(G1442-SLE-2011;Clade IV)__AIT17178__Z (opt3)
ggggcgcugccuacggagguggcagccaucuccuucucggcaucaagcuuaccaugggcaacaagcaggccaaagcuagcgaggcaaaggacucccccagagccucucugaucccugaugcgacccaccucgggccacaauucugcaaaucauguugguuugaaaauaagggacuuguggagugcaacaaucauuaccuguguuugaacugcuuaagucugcuacucagcgucuccucuagguguccgauuugcaaaaugccccugccuacacggcuucgcccaucgacugcucccacggccccuccagcacgagccggugacaauauaaagcccccuccauauucaccgugaggacuagugcaucacauuuaaaagcaucucagccuaccaugagaauaagagaaagaaaaugaagaucaauagcuuauucaucucuuuuucuuuuucguugguguaaagccaacacccugucuaaaaaacauaaauuucuuuaaucauuuugccucuuuucucugugcuucaauuaauaaaaaauggaaagaaccuagaucuaaaaaaaaaaaaaaaaaaaaaaaaaaaaaaaaaaaaaaaaaaaaaaaaaaaaaaaaaaaaaaaaugcaucccccccccccccccccccccccccccccccaaaggcucuuuucagagccaccagaauu

SEQ ID NO: 13498 - RNA, 682 nt, Artificial Sequence
  mRNA product Design i-2 comprising derived and/or modified sequence from LASV(G502-SLE-2009;Clade IV)__AIT17124__Z (opt3)
ggggcgcugccuacggagguggcagccaucuccuucucggcaucaagcuuaccaugggcaacaaacaggugaagacccccgaggccaaggacagcccuagagcuucccugaucccagaugcaacacaccucgggccgcaauucugcaagucuuguugguuugaaaauaagggacuugucgagugcaacaaucauuaccuguguuugaacugcuuaacucugcuacucucaguugguaauaggugucccauuugcaaaaugccucugccaacgaaacuucggcccagugugaccccuacagccccacccacucgcgcggcugacagcauaggcccuccaccguauucccccugaggacuagugcaucacauuuaaaagcaucucagccuaccaugagaauaagagaaagaaaaugaagaucaauagcuuauucaucucuuuuucuuuuucguugguguaaagccaacacccugucuaaaaaacauaaauuucuuuaaucauuuugccucuuuucucugugcuucaauuaauaaaaaauggaaagaaccuagaucuaaaaaaaaaaaaaaaaaaaaaaaaaaaaaaaaaaaaaaaaaaaaaaaaaaaaaaaaaaaaaaaaugcaucccccccccccccccccccccccccccccccaaaggcucuuuucagagccaccagaauu

SEQ ID NO: 13499 - RNA, 682 nt, Artificial Sequence
  mRNA product Design i-2 comprising derived and/or modified sequence from LASV(G733-SLE-2010;Clade IV)__AIT17152__Z (opt3)
ggggcgcugccuacggagguggcagccaucuccuucucggcaucaagcuuaccaugggcaacaagcaggccaagacccccgagacaaaggacagcccuagagcuucccugaucccagaugcaacucaccucgggccgcaauucugcaaaucuuguugguuugaaaauaagggacuuguggagugcaacaaucauuaccuguguuugaacugcuuaacgcugcuacucucagucaguaauaggugucccauuugcaaaaugccucugccaaccaaacuucggcccagcacagccccuacugcgccacccgcuggugccgcagacaacacccgcccuccaccguauucccccugaggacuagugcaucacauuuaaaagcaucucagccuaccaugagaauaagagaaagaaaaugaagaucaauagcuuauucaucucuuuuucuuuuucguugguguaaagccaacacccugucuaaaaaacauaaauuucuuuaaucauuuugccucuuuucucugugcuucaauuaauaaaaaauggaaagaaccuagaucuaaaaaaaaaaaaaaaaaaaaaaaaaaaaaaaaaaaaaaaaaaaaaaaaaaaaaaaaaaaaaaaaugcaucccccccccccccccccccccccccccccccaaaggcucuuuucagagccaccagaauu

SEQ ID NO: 13500 - RNA, 694 nt, Artificial Sequence
  mRNA product Design i-2 comprising derived and/or modified sequence from MOPV/LASV reassortant(IGS-1;Clade IV)__AFY05533__Z (opt3)
ggggcgcugccuacggagguggcagccaucuccuucucggcaucaagcuuaccaugggcaagacccagagcaaagggcaacccuccacaaaccugcucaaggagacugaaccuagacacccagugaucccggacgccaggggaacgggucccgaguucugcaaaucuuguugguuugaacggcgcggccuuguccgaugcaaugaucauuaccuguguuugaacugcuuaacccugcuacacacaguuucagaccguuguccuauuugcaagcauaaacucccauucagacuggagcuucagacucagcccaccgcuccuccagaaauacccccuagucagaauccaccgcccuauagcccuugaggacuagugcaucacauuuaaaagcaucucagccuaccaugagaauaagagaaagaaaaugaagaucaauagcuuauucaucucuuuuucuuuuucguugguguaaagccaacacccugucuaaaaaacauaaauuucuuuaaucauuuugccucuuuucucugugcuucaauuaauaaaaaauggaaagaaccuagaucuaaaaaaaaaaaaaaaaaaaaaaaaaaaaaaaaaaaaaaaaaaaaaaaaaaaaaaaaaaaaaaaaugcaucccccccccccccccccccccccccccccccaaaggcucuuuucagagccaccagaauu

SEQ ID NO: 13501 - RNA, 682 nt, Artificial Sequence
  mRNA product Design i-2 comprising derived and/or modified sequence from LASV(LM776-SLE-2012;Clade IV)__AIT17824__Z (opt3)
ggggcgcugccuacggagguggcagccaucuccuucucggcaucaagcuuaccaugggcaacaagcaggccaaggcuagcgaggaaaagaacucccccagagcaucucugaucccugacgccacccaccucgggccacaauucugcaaaucauguugguuugagaauaagggacuuguggaaugcaauaaccauuaccuguguuugaauugcuuaacacugcuacucagugucagcaacagguguccgauuugcaaaaugccccugccuacuaaacuucggccauccacgacccccacagcgccuccaacuggugcugccgauucuauacgcccucccccauauucgccgugaggacuagugcaucacauuuaaaagcaucucagccuaccaugagaauaagagaaagaaaaugaagaucaauagcuuauucaucucuuuuucuuuuucguugguguaaagccaacacccugucuaaaaaacauaaauuucuuuaaucauuuugccucuuuucucugugcuucaauuaauaaaaaauggaaagaaccuagaucuaaaaaaaaaaaaaaaaaaaaaaaaaaaaaaaaaaaaaaaaaaaaaaaaaaaaaaaaaaaaaaaaugcaucccccccccccccccccccccccccccccccaaaggcucuuuucagagccaccagaauu

SEQ ID NO: 13502 - RNA, 682 nt, Artificial Sequence
  mRNA product Design i-2 comprising derived and/or modified sequence from LASV(Mad39;Clade IV)__ANH09743__Z (opt3)
ggggcgcugccuacggagguggcagccaucuccuucucggcaucaagcuuaccaugggcaacaagcaggccaaagcuagcgagguggaagacgggcccagagcaucccugaucccugaugccacccaccucggaccacaauucugcaagucuuguugguuugagaauaaaucacuugucgaaugcaacaaucauuaccuguguuugaacugcuuaacacugcuacucaguguuagcaauagguguccgauuugcaagaugccccugccuacucggcuuaaaccauccgugguacccacggcgccuccaacccgcgcuggugacggcacacgacccccuccauauucuccgugaggacuagugcaucacauuuaaaagcaucucagccuaccaugagaauaagagaaagaaaaugaagaucaauagcuuauucaucucuuuuucuuuuucguugguguaaagccaacacccugucuaaaaaacauaaauuucuuuaaucauuuugccucuuuucucugugcuucaauuaauaaaaaauggaaagaaccuagaucuaaaaaaaaaaaaaaaaaaaaaaaaaaaaaaaaaaaaaaaaaaaaaaaaaaaaaaaaaaaaaaaaugcaucccccccccccccccccccccccccccccccaaaggcucuuuucagagccaccagaauu

SEQ ID NO: 13503 - RNA, 682 nt, Artificial Sequence
  mRNA product Design i-2 comprising derived and/or modified sequence from LASV(Z0947-SLE-2011;Clade IV)__AIT17838__Z (opt3)
ggggcgcugccuacggagguggcagccaucuccuucucggcaucaagcuuaccaugggcaacaagcaggccaaggugcccgagagcaaggacuccccuagagcuucucugaucccagaugcaacccaccucgggccgcaauucugcaaaucauguugguuugaaaauaagggacuugucgagugcaacaaucauuaccuguguuugaacugcuuaacacugcuacucaguguuagcaauaggugucccauuugcaaaaugccucugccaacuaaacuuaagcccuccgccgcgccuacggcuccacccaccggugccgcagacucuauacggccuccaccguauucgcccugaggacuagugcaucacauuuaaaagcaucucagccuaccaugagaauaagagaaagaaaaugaagaucaauagcuuauucaucucuuuuucuuuuucguugguguaaagccaacacccugucuaaaaaacauaaauuucuuuaaucauuuugccucuuuucucugugcuucaauuaauaaaaaauggaaagaaccuagaucuaaaaaaaaaaaaaaaaaaaaaaaaaaaaaaaaaaaaaaaaaaaaaaaaaaaaaaaaaaaaaaaaugcaucccccccccccccccccccccccccccccccaaaggcucuuuucagagccaccagaauu

SEQ ID NO: 13504 - RNA, 682 nt, Artificial Sequence
  mRNA product Design i-2 comprising derived and/or modified sequence from LASV(Josiah;Clade IV)__ADY11072/NP_694871__Z (opt4)
ggggcgcugccuacggagguggcagccaucuccuucucggcaucaagcuuaccaugggcaacaagcaggccaaggcccccgagagcaaggacagccccagagccagccugauccccgacgccacccaccugggcccccaguucugcaagagcugcugguucgagaacaagggccugguggagugcaacaaccacuaccugugccugaacugccugacccugcugcugagcgugagcaacagaugccccaucugcaagaugccccugcccaccaagcugagacccagcgccgcccccaccgccccccccaccggcgccgccgacagcaucagacccccccccuacagccccugaggacuagugcaucacauuuaaaagcaucucagccuaccaugagaauaagagaaagaaaaugaagaucaauagcuuauucaucucuuuuucuuuuucguugguguaaagccaacacccugucuaaaaaacauaaauuucuuuaaucauuuugccucuuuucucugugcuucaauuaauaaaaaauggaaagaaccuagaucuaaaaaaaaaaaaaaaaaaaaaaaaaaaaaaaaaaaaaaaaaaaaaaaaaaaaaaaaaaaaaaaaugcaucccccccccccccccccccccccccccccccaaaggcucuuuucagagccaccagaauu

SEQ ID NO: 13505 - RNA, 685 nt, Artificial Sequence
  mRNA product Design i-2 comprising derived and/or modified sequence from LASV(Pinneo-NIG-1969;Clade I)__AIT17834__Z (opt4)
ggggcgcugccuacggagguggcagccaucuccuucucggcaucaagcuuaccaugggcaacaagcagaccagaagcccccccaagcccgagcaccccagacccacccugcugcccgacgccagccaccugggcccccaguucugcaagagcugcugguucgagaacaagggccugguggagugcaacaaccacuaccugugccugaacugccugacccugcugcugagcgugagcgacagaugccccaucugcaagaugccccugcccaccaagcuggccgugagaacccagcccagcgcccccccccugaaccagggcaacacccagagcagccccccccccuacagccccugaggacuagugcaucacauuuaaaagcaucucagccuaccaugagaauaagagaaagaaaaugaagaucaauagcuuauucaucucuuuuucuuuuucguugguguaaagccaacacccugucuaaaaaacauaaauuucuuuaaucauuuugccucuuuucucugugcuucaauuaauaaaaaauggaaagaaccuagaucuaaaaaaaaaaaaaaaaaaaaaaaaaaaaaaaaaaaaaaaaaaaaaaaaaaaaaaaaaaaaaaaaugcaucccccccccccccccccccccccccccccccaaaggcucuuuucagagccaccagaauu

SEQ ID NO: 13506 - RNA, 682 nt, Artificial Sequence
  mRNA product Design i-2 comprising derived and/or modified sequence from LASV(Nig08-04;Clade II)__ADU56612__Z (opt4)
ggggcgcugccuacggagguggcagccaucuccuucucggcaucaagcuuaccaugggcaacagacagaccagacccaccgaggccaccgagcagagcagagcccaccuggugcccgacgccagccaccugggcccccaguucugcaagagcugcugguucgagaacagaggccugguggagugcaacaaccacuaccugugccugaacugccugagccugcugcugagcgugagcagcagaugccccaucugcaagaugccccugcccaccagacugaaggccagcgcccagcccagcgccccccccaccgaggccccccagaacaccacccccccccccuacacccccugaggacuagugcaucacauuuaaaagcaucucagccuaccaugagaauaagagaaagaaaaugaagaucaauagcuuauucaucucuuuuucuuuuucguugguguaaagccaacacccugucuaaaaaacauaaauuucuuuaaucauuuugccucuuuucucugugcuucaauuaauaaaaaauggaaagaaccuagaucuaaaaaaaaaaaaaaaaaaaaaaaaaaaaaaaaaaaaaaaaaaaaaaaaaaaaaaaaaaaaaaaaugcaucccccccccccccccccccccccccccccccaaaggcucuuuucagagccaccagaauu

SEQ ID NO: 13507 - RNA, 682 nt, Artificial Sequence
  mRNA product Design i-2 comprising derived and/or modified sequence from LASV(Nig08-A19;Clade III)__ADU56620__Z (opt4)
ggggcgcugccuacggagguggcagccaucuccuucucggcaucaagcuuaccaugggcggcaagcacaccaagccccagagagagagcaacagccccagagccagccugauccccgacgccacccaccugggcccccaguucugcaagagcugcugguucgagaacaagggccugguggagugcaacaaccacuaccugugccugaacugccugacccugcugcugagcgugagcaacagaugccccaucugcaagaugccccugcccaccagacugagagccagcaccaaccccaccgccccccagguggagcaggugggccccaccaaccccccccccuacagccccugaggacuagugcaucacauuuaaaagcaucucagccuaccaugagaauaagagaaagaaaaugaagaucaauagcuuauucaucucuuuuucuuuuucguugguguaaagccaacacccugucuaaaaaacauaaauuucuuuaaucauuuugccucuuuucucugugcuucaauuaauaaaaaauggaaagaaccuagaucuaaaaaaaaaaaaaaaaaaaaaaaaaaaaaaaaaaaaaaaaaaaaaaaaaaaaaaaaaaaaaaaaugcaucccccccccccccccccccccccccccccccaaaggcucuuuucagagccaccagaauu

SEQ ID NO: 13508 - RNA, 682 nt, Artificial Sequence
  mRNA product Design i-2 comprising derived and/or modified sequence from LASV(AV;Clade V)__CCA30312__Z (opt4)
ggggcgcugccuacggagguggcagccaucuccuucucggcaucaagcuuaccaugggcaacagacaggccaagaaccccgagguggagaacagccccagagccagccugauccccgacgccacccaccugggcccccaguucugcaagagcugcugguucgagaacaagggccugguggagugcaacaaccacuaccugugccugaacugccugagccugcugcugagcgugagcaacagaugccccaucugcaagaugccccugcccaccagacugagacccaccaccacccccaccgccccccagaucaucaaggagaacaccaccaaccccccccccuacacccccugaggacuagugcaucacauuuaaaagcaucucagccuaccaugagaauaagagaaagaaaaugaagaucaauagcuuauucaucucuuuuucuuuuucguugguguaaagccaacacccugucuaaaaaacauaaauuucuuuaaucauuuugccucuuuucucugugcuucaauuaauaaaaaauggaaagaaccuagaucuaaaaaaaaaaaaaaaaaaaaaaaaaaaaaaaaaaaaaaaaaaaaaaaaaaaaaaaaaaaaaaaaugcaucccccccccccccccccccccccccccccccaaaggcucuuuucagagccaccagaauu

SEQ ID NO: 13509 - RNA, 682 nt, Artificial Sequence
  mRNA product Design i-2 comprising derived and/or modified sequence from LASV(Togo/2016/7082;Clade VI)__AMR44579__Z (opt4)
ggggcgcugccuacggagguggcagccaucuccuucucggcaucaagcuuaccaugggcgccagacagaccaagcagccccagaucgagggcagccccagagccagccuggugcccgacgccagccaccugggcccccaguucugcaagagcugcugguucgagaacaagggccugguggagugcaacaaccacuaccugugccugaacugccugagccugcugcugagcgugagcaacagaugccccaucugcaagaugccccugcccaccaagcugagagugagcagcgcccccagcgccccccccgccgccaccgcccagcccggcacccccccccccuacagccccugaggacuagugcaucacauuuaaaagcaucucagccuaccaugagaauaagagaaagaaaaugaagaucaauagcuuauucaucucuuuuucuuuuucguugguguaaagccaacacccugucuaaaaaacauaaauuucuuuaaucauuuugccucuuuucucugugcuucaauuaauaaaaaauggaaagaaccuagaucuaaaaaaaaaaaaaaaaaaaaaaaaaaaaaaaaaaaaaaaaaaaaaaaaaaaaaaaaaaaaaaaaugcaucccccccccccccccccccccccccccccccaaaggcucuuuucagagccaccagaauu

SEQ ID NO: 13510 - RNA, 682 nt, Artificial Sequence
  mRNA product Design i-2 comprising derived and/or modified sequence from LASV(KAK-428;Clade n.d. (VII))__ANH09761__Z (opt4)
ggggcgcugccuacggagguggcagccaucuccuucucggcaucaagcuuaccaugggcaacaagggcaccaagcccacccagaacagcgagcccagcagagccaaccuggugcccgacgccagcuaccugggcccccaguucugcaagagcugcugguucgagaacaagggccugguggagugcaacaaccacuaccugugccugaacugccugaccaugcugcugagcgugagcaacagaugccccaucugcaagaugccccugcccaccaagaucaaggccagcggcagccccagcgccccccccaccgaggccaacagcgccgugagccccccccccuacacccccugaggacuagugcaucacauuuaaaagcaucucagccuaccaugagaauaagagaaagaaaaugaagaucaauagcuuauucaucucuuuuucuuuuucguugguguaaagccaacacccugucuaaaaaacauaaauuucuuuaaucauuuugccucuuuucucugugcuucaauuaauaaaaaauggaaagaaccuagaucuaaaaaaaaaaaaaaaaaaaaaaaaaaaaaaaaaaaaaaaaaaaaaaaaaaaaaaaaaaaaaaaaugcaucccccccccccccccccccccccccccccccaaaggcucuuuucagagccaccagaauu

SEQ ID NO: 13511 - RNA, 682 nt, Artificial Sequence
  mRNA product Design i-2 comprising derived and/or modified sequence from LASV(ISTH0009-NIG-2011;Clade II)__AIT17402__Z (opt4)
ggggcgcugccuacggagguggcagccaucuccuucucggcaucaagcuuaccaugggcaacagacaggccaagagcaccaagguggacgagcaccagagagcccaccuggugcccgacgccagccaccugggcccccaguucugcaagagcugcugguucgagaacagaggccugguggagugcaacaaccacuaccugugccugaacugccugagccugcugcugagcgugagcagcagaugccccaucugcaagaugccccugcccaccaagcugaaggccgccgcccagcccagcgcccccagcaccgagaccauccagaacaccacccccccccccuacacccccugaggacuagugcaucacauuuaaaagcaucucagccuaccaugagaauaagagaaagaaaaugaagaucaauagcuuauucaucucuuuuucuuuuucguugguguaaagccaacacccugucuaaaaaacauaaauuucuuuaaucauuuugccucuuuucucugugcuucaauuaauaaaaaauggaaagaaccuagaucuaaaaaaaaaaaaaaaaaaaaaaaaaaaaaaaaaaaaaaaaaaaaaaaaaaaaaaaaaaaaaaaaugcaucccccccccccccccccccccccccccccccaaaggcucuuuucagagccaccagaauu

SEQ ID NO: 13512 - RNA, 682 nt, Artificial Sequence
  mRNA product Design i-2 comprising derived and/or modified sequence from LASV(ISTH2010-NIG-2012;Clade II)__AIT17480__Z (opt4)
ggggcgcugccuacggagguggcagccaucuccuucucggcaucaagcuuaccaugggcaacagacacgccaagagcaccaagguggacgagcaccagagagcccaccuggugcccgacgccagccaccugggcccccaguucugcaagagcugcugguucgagaacagaggccugguggagugcaacaaccacuaccugugccugaacugccugagccugcugcugagcgugagcagcagaugccccaucugcaagaugccccugcccaccaagcugaaggccgccgcccagcccagcgcccccagcaccgaggugauccagagcaccacccccccccccuacacccccugaggacuagugcaucacauuuaaaagcaucucagccuaccaugagaauaagagaaagaaaaugaagaucaauagcuuauucaucucuuuuucuuuuucguugguguaaagccaacacccugucuaaaaaacauaaauuucuuuaaucauuuugccucuuuucucugugcuucaauuaauaaaaaauggaaagaaccuagaucuaaaaaaaaaaaaaaaaaaaaaaaaaaaaaaaaaaaaaaaaaaaaaaaaaaaaaaaaaaaaaaaaugcaucccccccccccccccccccccccccccccccaaaggcucuuuucagagccaccagaauu

SEQ ID NO: 13513 - RNA, 682 nt, Artificial Sequence
  mRNA product Design i-2 comprising derived and/or modified sequence from LASV(Lassa virus/H.sapiens-wt/NGA/2016/ISTH_0017;Clade II)__AVO03713__Z (opt4)
ggggcgcugccuacggagguggcagccaucuccuucucggcaucaagcuuaccaugggcaacagacaggccaagagcaccaagguggacgagcaccagagagcccaccuggugcccgacgccagccaccugggcccccaguucugcaagagcugcugguucgagaacagaggccugguggagugcaacaaccacuaccugugccugaacugccugagccugcugcugagcgugagcagcagaugccccaucugcaagaugccccugcccaccaagcugaaggccgccacccagcccagcgcccccagcaccgaggugaaccagaacaccacccccccccccuacacccccugaggacuagugcaucacauuuaaaagcaucucagccuaccaugagaauaagagaaagaaaaugaagaucaauagcuuauucaucucuuuuucuuuuucguugguguaaagccaacacccugucuaaaaaacauaaauuucuuuaaucauuuugccucuuuucucugugcuucaauuaauaaaaaauggaaagaaccuagaucuaaaaaaaaaaaaaaaaaaaaaaaaaaaaaaaaaaaaaaaaaaaaaaaaaaaaaaaaaaaaaaaaugcaucccccccccccccccccccccccccccccccaaaggcucuuuucagagccaccagaauu

SEQ ID NO: 13514 - RNA, 682 nt, Artificial Sequence
  mRNA product Design i-2 comprising derived and/or modified sequence from LASV(Lassa virus/H.sapiens-wt/NGA/2018/ISTH_0959;Clade II)__AVV65084__Z (opt4)
ggggcgcugccuacggagguggcagccaucuccuucucggcaucaagcuuaccaugggcaacaagcaggccaagagcaccaagguggacgagcaccagagagcccaccuggugcccgacgccagccaccugggcccccaguucugcaagagcugcugguucgagaacagaggccugguggagugcaacaaccacuaccugugccugaacugccugagccugcugcugagcgugagcagcagaugccccaucugcaagaugccccugcccaccaagcugaaggccgccgcccagcccagcgcccccagcaccgaggccauccagagcaccacccccccccccuacacccccugaggacuagugcaucacauuuaaaagcaucucagccuaccaugagaauaagagaaagaaaaugaagaucaauagcuuauucaucucuuuuucuuuuucguugguguaaagccaacacccugucuaaaaaacauaaauuucuuuaaucauuuugccucuuuucucugugcuucaauuaauaaaaaauggaaagaaccuagaucuaaaaaaaaaaaaaaaaaaaaaaaaaaaaaaaaaaaaaaaaaaaaaaaaaaaaaaaaaaaaaaaaugcaucccccccccccccccccccccccccccccccaaaggcucuuuucagagccaccagaauu

SEQ ID NO: 13515 - RNA, 682 nt, Artificial Sequence
  mRNA product Design i-2 comprising derived and/or modified sequence from LASV(LASV003-NIG-2008;Clade II)__AIT17578__Z (opt4)
ggggcgcugccuacggagguggcagccaucuccuucucggcaucaagcuuaccaugggcaacagacaggccaagagcaccaagguggacgagcaccagagagcccaccuggugcccgacgccagccaccugggcccccaguucugcaagagcugcugguucgagaacaagggccugguggagugcaacaaccacuaccugugccugaacugccugagccugcugcugagcgugagcagcagaugccccaucugcaagaugccccugcccaccaagcugagagccgccgcccagcccagcgcccccagcaccgagagcgcccagaacaccgcccccccccccuacgcccccugaggacuagugcaucacauuuaaaagcaucucagccuaccaugagaauaagagaaagaaaaugaagaucaauagcuuauucaucucuuuuucuuuuucguugguguaaagccaacacccugucuaaaaaacauaaauuucuuuaaucauuuugccucuuuucucugugcuucaauuaauaaaaaauggaaagaaccuagaucuaaaaaaaaaaaaaaaaaaaaaaaaaaaaaaaaaaaaaaaaaaaaaaaaaaaaaaaaaaaaaaaaugcaucccccccccccccccccccccccccccccccaaaggcucuuuucagagccaccagaauu

SEQ ID NO: 13516 - RNA, 682 nt, Artificial Sequence
  mRNA product Design i-2 comprising derived and/or modified sequence from LASV(LASV035-NIG-2009;Clade II)__AIT17586__Z (opt4)
ggggcgcugccuacggagguggcagccaucuccuucucggcaucaagcuuaccaugggcaacaagcaggccaagagcaccaagguggacgagcaccagagagcccaccuggugcccgacgccagccaccugggcccccaguucugcaagagcugcugguucgagaacagaggccugguggagugcaacaaccacuaccugugccugaacugccugagccugcugcugagcgugagcagcagaugccccaucugcaagaugccccugcccaccagacugaaggccgccgcccagcccagcgcccccagcaccgaggugacccagaacaccacccccccccccuacacccccugaggacuagugcaucacauuuaaaagcaucucagccuaccaugagaauaagagaaagaaaaugaagaucaauagcuuauucaucucuuuuucuuuuucguugguguaaagccaacacccugucuaaaaaacauaaauuucuuuaaucauuuugccucuuuucucugugcuucaauuaauaaaaaauggaaagaaccuagaucuaaaaaaaaaaaaaaaaaaaaaaaaaaaaaaaaaaaaaaaaaaaaaaaaaaaaaaaaaaaaaaaaugcaucccccccccccccccccccccccccccccccaaaggcucuuuucagagccaccagaauu

SEQ ID NO: 13517 - RNA, 682 nt, Artificial Sequence
  mRNA product Design i-2 comprising derived and/or modified sequence from LASV(LASV1000-NIG-2009;Clade II)__AIT17780__Z (opt4)
ggggcgcugccuacggagguggcagccaucuccuucucggcaucaagcuuaccaugggcaacagacagaccaagagcaccaagguggacgagcaccagagagccuaccuggugcccgacgccagccugcugggcccccaguucugcaagagcugcugguucgagaacaagggccugguggagugcaacaaccacuaccugugccugaacugccugagccugcugcugagcgugagcagcagaugccccaucugcaagaugccccugcccaccagacugaaggccgccgcccagcccagcgccccccccaccgaggccauccagaacaccacccccccccccuacacccccugaggacuagugcaucacauuuaaaagcaucucagccuaccaugagaauaagagaaagaaaaugaagaucaauagcuuauucaucucuuuuucuuuuucguugguguaaagccaacacccugucuaaaaaacauaaauuucuuuaaucauuuugccucuuuucucugugcuucaauuaauaaaaaauggaaagaaccuagaucuaaaaaaaaaaaaaaaaaaaaaaaaaaaaaaaaaaaaaaaaaaaaaaaaaaaaaaaaaaaaaaaaugcaucccccccccccccccccccccccccccccccaaaggcucuuuucagagccaccagaauu

SEQ ID NO: 13518 - RNA, 682 nt, Artificial Sequence
  mRNA product Design i-2 comprising derived and/or modified sequence from LASV(LASV221-NIG-2010;Clade II)__AIT17622__Z (opt4)
ggggcgcugccuacggagguggcagccaucuccuucucggcaucaagcuuaccaugggcaacagacaggccaagagcaccaagguggacgagcaccagagagcccaccuggugcccgacgccagccaccugggcccccaguucugcaagagcugcugguucgagaacagaggccugguggagugcaacaaccacuaccugugccugaacugccugagccugcugcugagcgugagcagcagaugccccaucugcaagaugccccugcccaccaagcugaaggccgccacccagcccagcgcccccagcaccgaggugacccagaacaccauccccccccccuacagccccugaggacuagugcaucacauuuaaaagcaucucagccuaccaugagaauaagagaaagaaaaugaagaucaauagcuuauucaucucuuuuucuuuuucguugguguaaagccaacacccugucuaaaaaacauaaauuucuuuaaucauuuugccucuuuucucugugcuucaauuaauaaaaaauggaaagaaccuagaucuaaaaaaaaaaaaaaaaaaaaaaaaaaaaaaaaaaaaaaaaaaaaaaaaaaaaaaaaaaaaaaaaugcaucccccccccccccccccccccccccccccccaaaggcucuuuucagagccaccagaauu

SEQ ID NO: 13519 - RNA, 682 nt, Artificial Sequence
  mRNA product Design i-2 comprising derived and/or modified sequence from LASV(LASV237-NIG-2010;Clade II)__AIT17636__Z (opt4)
ggggcgcugccuacggagguggcagccaucuccuucucggcaucaagcuuaccaugggcaacagacaggccaagagcaccaagguggacgagcaccagagagcccaccuggugcccgacgccagccaccugggcccccaguucugcaagagcugcugguucgagaacagaggccugguggagugcaacaaccacuaccugugccugaacugccugagccugcugcugagcgugagcagcagaugccccaucugcaagaugccccugcccaccaagcugaaggccgccgcccagcccagcgcccccagcaucgagaccauccagaacaccacccccccccccuacacccccugaggacuagugcaucacauuuaaaagcaucucagccuaccaugagaauaagagaaagaaaaugaagaucaauagcuuauucaucucuuuuucuuuuucguugguguaaagccaacacccugucuaaaaaacauaaauuucuuuaaucauuuugccucuuuucucugugcuucaauuaauaaaaaauggaaagaaccuagaucuaaaaaaaaaaaaaaaaaaaaaaaaaaaaaaaaaaaaaaaaaaaaaaaaaaaaaaaaaaaaaaaaugcaucccccccccccccccccccccccccccccccaaaggcucuuuucagagccaccagaauu

SEQ ID NO: 13520 - RNA, 682 nt, Artificial Sequence
  mRNA product Design i-2 comprising derived and/or modified sequence from LASV(LASV253-NIG-2011;Clade II)__AIT17668__Z (opt4)
ggggcgcugccuacggagguggcagccaucuccuucucggcaucaagcuuaccaugggcaacagacaggccaagagcaccaagguggacgagcaccagagagcccaccuggugcccgacgccagccaccugggcccccaguucugcaagagcugcugguucgagaacaagggccugguggagugcaacaaccacuaccugugccugaacugccugagccugcugcugagcgugagcagcagaugccccaucugcaagaugccccugcccaccaagcugaagaccaccgcccagcccagcgccccccccaccgaggccgccaagaacaccgcccccccccccuacgcccccugaggacuagugcaucacauuuaaaagcaucucagccuaccaugagaauaagagaaagaaaaugaagaucaauagcuuauucaucucuuuuucuuuuucguugguguaaagccaacacccugucuaaaaaacauaaauuucuuuaaucauuuugccucuuuucucugugcuucaauuaauaaaaaauggaaagaaccuagaucuaaaaaaaaaaaaaaaaaaaaaaaaaaaaaaaaaaaaaaaaaaaaaaaaaaaaaaaaaaaaaaaaugcaucccccccccccccccccccccccccccccccaaaggcucuuuucagagccaccagaauu

SEQ ID NO: 13521 - RNA, 682 nt, Artificial Sequence
  mRNA product Design i-2 comprising derived and/or modified sequence from LASV(G1180-SLE-2010;Clade IV)__AIT17166__Z (opt4)
ggggcgcugccuacggagguggcagccaucuccuucucggcaucaagcuuaccaugggcaacaagcaggccaaggcccccgaggccaaggacagccccagagccagccugauccccgacgccacccaccugggcccccaguucugcaagagcugcugguucgagaccaagggccugguggagugcaacaaccacuaccugugccugaacugccugacccugcugcugagcgugagcaacagaugccccaucugcaagaugccccugcccaccaagcugagacccagcgccacccccaccgccccccccaccgaggccgccgacagcaucggccccccccccuacagccccugaggacuagugcaucacauuuaaaagcaucucagccuaccaugagaauaagagaaagaaaaugaagaucaauagcuuauucaucucuuuuucuuuuucguugguguaaagccaacacccugucuaaaaaacauaaauuucuuuaaucauuuugccucuuuucucugugcuucaauuaauaaaaaauggaaagaaccuagaucuaaaaaaaaaaaaaaaaaaaaaaaaaaaaaaaaaaaaaaaaaaaaaaaaaaaaaaaaaaaaaaaaugcaucccccccccccccccccccccccccccccccaaaggcucuuuucagagccaccagaauu

SEQ ID NO: 13522 - RNA, 682 nt, Artificial Sequence
  mRNA product Design i-2 comprising derived and/or modified sequence from LASV(G1442-SLE-2011;Clade IV)__AIT17178__Z (opt4)
ggggcgcugccuacggagguggcagccaucuccuucucggcaucaagcuuaccaugggcaacaagcaggccaaggccagcgaggccaaggacagccccagagccagccugauccccgacgccacccaccugggcccccaguucugcaagagcugcugguucgagaacaagggccugguggagugcaacaaccacuaccugugccugaacugccugagccugcugcugagcgugagcagcagaugccccaucugcaagaugccccugcccaccagacugagacccagcaccgcccccaccgccccccccgccagagccggcgacaacaucaagcccccccccuacagccccugaggacuagugcaucacauuuaaaagcaucucagccuaccaugagaauaagagaaagaaaaugaagaucaauagcuuauucaucucuuuuucuuuuucguugguguaaagccaacacccugucuaaaaaacauaaauuucuuuaaucauuuugccucuuuucucugugcuucaauuaauaaaaaauggaaagaaccuagaucuaaaaaaaaaaaaaaaaaaaaaaaaaaaaaaaaaaaaaaaaaaaaaaaaaaaaaaaaaaaaaaaaugcaucccccccccccccccccccccccccccccccaaaggcucuuuucagagccaccagaauu

SEQ ID NO: 13523 - RNA, 682 nt, Artificial Sequence
  mRNA product Design i-2 comprising derived and/or modified sequence from LASV(G502-SLE-2009;Clade IV)__AIT17124__Z (opt4)
ggggcgcugccuacggagguggcagccaucuccuucucggcaucaagcuuaccaugggcaacaagcaggugaagacccccgaggccaaggacagccccagagccagccugauccccgacgccacccaccugggcccccaguucugcaagagcugcugguucgagaacaagggccugguggagugcaacaaccacuaccugugccugaacugccugacccugcugcugagcgugggcaacagaugccccaucugcaagaugccccugcccaccaagcugagacccagcgugacccccaccgccccccccaccagagccgccgacagcaucggccccccccccuacagccccugaggacuagugcaucacauuuaaaagcaucucagccuaccaugagaauaagagaaagaaaaugaagaucaauagcuuauucaucucuuuuucuuuuucguugguguaaagccaacacccugucuaaaaaacauaaauuucuuuaaucauuuugccucuuuucucugugcuucaauuaauaaaaaauggaaagaaccuagaucuaaaaaaaaaaaaaaaaaaaaaaaaaaaaaaaaaaaaaaaaaaaaaaaaaaaaaaaaaaaaaaaaugcaucccccccccccccccccccccccccccccccaaaggcucuuuucagagccaccagaauu

SEQ ID NO: 13524 - RNA, 682 nt, Artificial Sequence
  mRNA product Design i-2 comprising derived and/or modified sequence from LASV(G733-SLE-2010;Clade IV)__AIT17152__Z (opt4)
ggggcgcugccuacggagguggcagccaucuccuucucggcaucaagcuuaccaugggcaacaagcaggccaagacccccgagaccaaggacagccccagagccagccugauccccgacgccacccaccugggcccccaguucugcaagagcugcugguucgagaacaagggccugguggagugcaacaaccacuaccugugccugaacugccugacccugcugcugagcgugagcaacagaugccccaucugcaagaugccccugcccaccaagcugagacccagcaccgcccccaccgccccccccgccggcgccgccgacaacaccagacccccccccuacagccccugaggacuagugcaucacauuuaaaagcaucucagccuaccaugagaauaagagaaagaaaaugaagaucaauagcuuauucaucucuuuuucuuuuucguugguguaaagccaacacccugucuaaaaaacauaaauuucuuuaaucauuuugccucuuuucucugugcuucaauuaauaaaaaauggaaagaaccuagaucuaaaaaaaaaaaaaaaaaaaaaaaaaaaaaaaaaaaaaaaaaaaaaaaaaaaaaaaaaaaaaaaaugcaucccccccccccccccccccccccccccccccaaaggcucuuuucagagccaccagaauu

SEQ ID NO: 13525 - RNA, 694 nt, Artificial Sequence
  mRNA product Design i-2 comprising derived and/or modified sequence from MOPV/LASV reassortant(IGS-1;Clade IV)__AFY05533__Z (opt4)
ggggcgcugccuacggagguggcagccaucuccuucucggcaucaagcuuaccaugggcaagacccagagcaagggccagcccagcaccaaccugcugaaggagaccgagcccagacaccccgugauccccgacgccagaggcaccggccccgaguucugcaagagcugcugguucgagagaagaggccuggugagaugcaacgaccacuaccugugccugaacugccugacccugcugcacaccgugagcgacagaugccccaucugcaagcacaagcugcccuucagacuggagcugcagacccagcccaccgccccccccgagaucccccccagccagaaccccccccccuacagccccugaggacuagugcaucacauuuaaaagcaucucagccuaccaugagaauaagagaaagaaaaugaagaucaauagcuuauucaucucuuuuucuuuuucguugguguaaagccaacacccugucuaaaaaacauaaauuucuuuaaucauuuugccucuuuucucugugcuucaauuaauaaaaaauggaaagaaccuagaucuaaaaaaaaaaaaaaaaaaaaaaaaaaaaaaaaaaaaaaaaaaaaaaaaaaaaaaaaaaaaaaaaugcaucccccccccccccccccccccccccccccccaaaggcucuuuucagagccaccagaauu

SEQ ID NO: 13526 - RNA, 682 nt, Artificial Sequence
  mRNA product Design i-2 comprising derived and/or modified sequence from LASV(LM776-SLE-2012;Clade IV)__AIT17824__Z (opt4)
ggggcgcugccuacggagguggcagccaucuccuucucggcaucaagcuuaccaugggcaacaagcaggccaaggccagcgaggagaagaacagccccagagccagccugauccccgacgccacccaccugggcccccaguucugcaagagcugcugguucgagaacaagggccugguggagugcaacaaccacuaccugugccugaacugccugacccugcugcugagcgugagcaacagaugccccaucugcaagaugccccugcccaccaagcugagacccagcaccacccccaccgccccccccaccggcgccgccgacagcaucagacccccccccuacagccccugaggacuagugcaucacauuuaaaagcaucucagccuaccaugagaauaagagaaagaaaaugaagaucaauagcuuauucaucucuuuuucuuuuucguugguguaaagccaacacccugucuaaaaaacauaaauuucuuuaaucauuuugccucuuuucucugugcuucaauuaauaaaaaauggaaagaaccuagaucuaaaaaaaaaaaaaaaaaaaaaaaaaaaaaaaaaaaaaaaaaaaaaaaaaaaaaaaaaaaaaaaaugcaucccccccccccccccccccccccccccccccaaaggcucuuuucagagccaccagaauu

SEQ ID NO: 13527 - RNA, 682 nt, Artificial Sequence
  mRNA product Design i-2 comprising derived and/or modified sequence from LASV(Mad39;Clade IV)__ANH09743__Z (opt4)
ggggcgcugccuacggagguggcagccaucuccuucucggcaucaagcuuaccaugggcaacaagcaggccaaggccagcgagguggaggacggccccagagccagccugauccccgacgccacccaccugggcccccaguucugcaagagcugcugguucgagaacaagagccugguggagugcaacaaccacuaccugugccugaacugccugacccugcugcugagcgugagcaacagaugccccaucugcaagaugccccugcccaccagacugaagcccagcguggugcccaccgccccccccaccagagccggcgacggcaccagacccccccccuacagccccugaggacuagugcaucacauuuaaaagcaucucagccuaccaugagaauaagagaaagaaaaugaagaucaauagcuuauucaucucuuuuucuuuuucguugguguaaagccaacacccugucuaaaaaacauaaauuucuuuaaucauuuugccucuuuucucugugcuucaauuaauaaaaaauggaaagaaccuagaucuaaaaaaaaaaaaaaaaaaaaaaaaaaaaaaaaaaaaaaaaaaaaaaaaaaaaaaaaaaaaaaaaugcaucccccccccccccccccccccccccccccccaaaggcucuuuucagagccaccagaauu

SEQ ID NO: 13528 - RNA, 682 nt, Artificial Sequence
  mRNA product Design i-2 comprising derived and/or modified sequence from LASV(Z0947-SLE-2011;Clade IV)__AIT17838__Z (opt4)
ggggcgcugccuacggagguggcagccaucuccuucucggcaucaagcuuaccaugggcaacaagcaggccaaggugcccgagagcaaggacagccccagagccagccugauccccgacgccacccaccugggcccccaguucugcaagagcugcugguucgagaacaagggccugguggagugcaacaaccacuaccugugccugaacugccugacccugcugcugagcgugagcaacagaugccccaucugcaagaugccccugcccaccaagcugaagcccagcgccgcccccaccgccccccccaccggcgccgccgacagcaucagacccccccccuacagccccugaggacuagugcaucacauuuaaaagcaucucagccuaccaugagaauaagagaaagaaaaugaagaucaauagcuuauucaucucuuuuucuuuuucguugguguaaagccaacacccugucuaaaaaacauaaauuucuuuaaucauuuugccucuuuucucugugcuucaauuaauaaaaaauggaaagaaccuagaucuaaaaaaaaaaaaaaaaaaaaaaaaaaaaaaaaaaaaaaaaaaaaaaaaaaaaaaaaaaaaaaaaugcaucccccccccccccccccccccccccccccccaaaggcucuuuucagagccaccagaauu

SEQ ID NO: 13529 - RNA, 682 nt, Artificial Sequence
  mRNA product Design i-2 comprising derived and/or modified sequence from LASV(Josiah;Clade IV)__ADY11072/NP_694871__Z (opt5)
ggggcgcugccuacggagguggcagccaucuccuucucggcaucaagcuuaccaugggcaacaagcaggccaaagcucccgagagcaaggacuccccuagagccucucugaucccggaugcgacccaccucgggccccaauucugcaaaagcuguugguuugaaaauaagggacugguggagugcaacaaucauuaccuuugucugaacugccucacacugcuucuguccgucucuaaucgguguccuauuugcaaaaugccccucccuacgaagcugcgccccagcgcugccccuaccgccccgcccacaggcgcugccgacuccaucagaccucccccuuauucucccugaggacuagugcaucacauuuaaaagcaucucagccuaccaugagaauaagagaaagaaaaugaagaucaauagcuuauucaucucuuuuucuuuuucguugguguaaagccaacacccugucuaaaaaacauaaauuucuuuaaucauuuugccucuuuucucugugcuucaauuaauaaaaaauggaaagaaccuagaucuaaaaaaaaaaaaaaaaaaaaaaaaaaaaaaaaaaaaaaaaaaaaaaaaaaaaaaaaaaaaaaaaugcaucccccccccccccccccccccccccccccccaaaggcucuuuucagagccaccagaauu

SEQ ID NO: 13530 - RNA, 685 nt, Artificial Sequence
  mRNA product Design i-2 comprising derived and/or modified sequence from LASV(Pinneo-NIG-1969;Clade I)__AIT17834__Z (opt5)
ggggcgcugccuacggagguggcagccaucuccuucucggcaucaagcuuaccaugggcaacaagcagaccagaagcccucccaaaccggagcacccccggccuacacugcuccccgacgccucccaucuggggccucaauucugcaagucuuguugguuugaaaauaaaggacuuguggagugcaacaaucacuaccugugucucaacugccugacgcuucugcucagcgucuccgaucgcugucccaucugcaagaugccucugccgaccaaacuggcuguuagaacacagcccucugccccuccccucaaucagggcaacacccagagcuccccucccccguauucuccuugaggacuagugcaucacauuuaaaagcaucucagccuaccaugagaauaagagaaagaaaaugaagaucaauagcuuauucaucucuuuuucuuuuucguugguguaaagccaacacccugucuaaaaaacauaaauuucuuuaaucauuuugccucuuuucucugugcuucaauuaauaaaaaauggaaagaaccuagaucuaaaaaaaaaaaaaaaaaaaaaaaaaaaaaaaaaaaaaaaaaaaaaaaaaaaaaaaaaaaaaaaaugcaucccccccccccccccccccccccccccccccaaaggcucuuuucagagccaccagaauu

SEQ ID NO: 13531 - RNA, 682 nt, Artificial Sequence
  mRNA product Design i-2 comprising derived and/or modified sequence from LASV(Nig08-04;Clade II)__ADU56612__Z (opt5)
ggggcgcugccuacggagguggcagccaucuccuucucggcaucaagcuuaccaugggcaacagacagacccggcccacagaggccacggaacaaagccgcgcccaccuggugccugacgccucccaucucgggccgcaguucugcaagucuuguugguuugagaauagaggacuggucgaaugcaacaaucacuaccuuugucugaacugccucagccugcuucuguccguuucuagccggugucccaucugcaaaaugccucuccccacccgccugaaggcguccgcucagccuucugcucccccuacagaggccccgcagaauaccacacccccucccuauaccccuugaggacuagugcaucacauuuaaaagcaucucagccuaccaugagaauaagagaaagaaaaugaagaucaauagcuuauucaucucuuuuucuuuuucguugguguaaagccaacacccugucuaaaaaacauaaauuucuuuaaucauuuugccucuuuucucugugcuucaauuaauaaaaaauggaaagaaccuagaucuaaaaaaaaaaaaaaaaaaaaaaaaaaaaaaaaaaaaaaaaaaaaaaaaaaaaaaaaaaaaaaaaugcaucccccccccccccccccccccccccccccccaaaggcucuuuucagagccaccagaauu

SEQ ID NO: 13532 - RNA, 682 nt, Artificial Sequence
  mRNA product Design i-2 comprising derived and/or modified sequence from LASV(Nig08-A19;Clade III)__ADU56620__Z (opt5)
ggggcgcugccuacggagguggcagccaucuccuucucggcaucaagcuuaccaugggcgggaagcacaccaaaccccagagagagagcaacuccccucgggccucucugaucccggacgcuacacaucucggaccccaauucugcaagagcuguugguuugaaaauaaaggccugguggagugcaacaaucacuaccuuugucugaacugccucacgcugcuucuguccgucucuaaucgcuguccuauuugcaagaugccccucccuaccagacugcgggccagcacaaaccccaccgcgccucagguugaacagguggggccgacaaaucccccucccuauuccccuugaggacuagugcaucacauuuaaaagcaucucagccuaccaugagaauaagagaaagaaaaugaagaucaauagcuuauucaucucuuuuucuuuuucguugguguaaagccaacacccugucuaaaaaacauaaauuucuuuaaucauuuugccucuuuucucugugcuucaauuaauaaaaaauggaaagaaccuagaucuaaaaaaaaaaaaaaaaaaaaaaaaaaaaaaaaaaaaaaaaaaaaaaaaaaaaaaaaaaaaaaaaugcaucccccccccccccccccccccccccccccccaaaggcucuuuucagagccaccagaauu

SEQ ID NO: 13533 - RNA, 682 nt, Artificial Sequence
  mRNA product Design i-2 comprising derived and/or modified sequence from LASV(AV;Clade V)__CCA30312__Z (opt5)
ggggcgcugccuacggagguggcagccaucuccuucucggcaucaagcuuaccaugggcaacagacaggccaagaaucccgagguggaaaacagcccucgggcuucccugaucccggacgccacccaccucgggccccaauucugcaaaucuuguugguuugagaauaagggacuggucgaaugcaacaaucauuaccuuugucugaacugccucagccugcuucuguccguuucuaaucgcuguccuauuugcaaaaugccccucccuacaagacugcggcccacgaccacaccuaccgcgccgcagaucauuaaggagaacacaaccaaucccccucccuauacaccuugaggacuagugcaucacauuuaaaagcaucucagccuaccaugagaauaagagaaagaaaaugaagaucaauagcuuauucaucucuuuuucuuuuucguugguguaaagccaacacccugucuaaaaaacauaaauuucuuuaaucauuuugccucuuuucucugugcuucaauuaauaaaaaauggaaagaaccuagaucuaaaaaaaaaaaaaaaaaaaaaaaaaaaaaaaaaaaaaaaaaaaaaaaaaaaaaaaaaaaaaaaaugcaucccccccccccccccccccccccccccccccaaaggcucuuuucagagccaccagaauu

SEQ ID NO: 13534 - RNA, 682 nt, Artificial Sequence
  mRNA product Design i-2 comprising derived and/or modified sequence from LASV(Togo/2016/7082;Clade VI)__AMR44579__Z (opt5)
ggggcgcugccuacggagguggcagccaucuccuucucggcaucaagcuuaccaugggcgccagacagaccaagcaaccccagaucgaggggagcccucgggcuucccuggugccggacgccucucaccucggaccccaguucugcaaaagcuguugguuugaaaacaagggccuggucgagugcaauaaccauuaccuuugucugaauugccucucccugcuucugucuguuagcaaccgcuguccuauuugcaaaaugccccucccuacaaagcugagaguguccucugcgcccagcgcuccuccggccgccacggcucagcccgggaccccucccccuuauucccccugaggacuagugcaucacauuuaaaagcaucucagccuaccaugagaauaagagaaagaaaaugaagaucaauagcuuauucaucucuuuuucuuuuucguugguguaaagccaacacccugucuaaaaaacauaaauuucuuuaaucauuuugccucuuuucucugugcuucaauuaauaaaaaauggaaagaaccuagaucuaaaaaaaaaaaaaaaaaaaaaaaaaaaaaaaaaaaaaaaaaaaaaaaaaaaaaaaaaaaaaaaaugcaucccccccccccccccccccccccccccccccaaaggcucuuuucagagccaccagaauu

SEQ ID NO: 13535 - RNA, 682 nt, Artificial Sequence
  mRNA product Design i-2 comprising derived and/or modified sequence from LASV(KAK-428;Clade n.d. (VII))__ANH09761__Z (opt5)
ggggcgcugccuacggagguggcagccaucuccuucucggcaucaagcuuaccaugggcaacaaggggaccaaacccacacagaauagcgagccuuccagagccaaccuggugccggacgcuucuuaccucggaccccaauucugcaagagcuguugguuugaaaauaaaggccuggucgagugcaacaaucacuaucuuugucugaacugccucacgaugcugcuuuccguuuccaaucgguguccuaucugcaagaugccccugccuaccaaaauuaaggccagcgggucccccucugcgccuccgacagaagcuaacagcgccgugucucccccucccuacaccccuugaggacuagugcaucacauuuaaaagcaucucagccuaccaugagaauaagagaaagaaaaugaagaucaauagcuuauucaucucuuuuucuuuuucguugguguaaagccaacacccugucuaaaaaacauaaauuucuuuaaucauuuugccucuuuucucugugcuucaauuaauaaaaaauggaaagaaccuagaucuaaaaaaaaaaaaaaaaaaaaaaaaaaaaaaaaaaaaaaaaaaaaaaaaaaaaaaaaaaaaaaaaugcaucccccccccccccccccccccccccccccccaaaggcucuuuucagagccaccagaauu

SEQ ID NO: 13536 - RNA, 682 nt, Artificial Sequence
  mRNA product Design i-2 comprising derived and/or modified sequence from LASV(ISTH0009-NIG-2011;Clade II)__AIT17402__Z (opt5)
ggggcgcugccuacggagguggcagccaucuccuucucggcaucaagcuuaccaugggcaacagacaggccaagagcaccaaaguggacgagcaccaacgggcucaucugguccccgaugccucccaccucgggccucaguucugcaagucuuguugguuugaaaaucgcggacugguugagugcaacaaucauuaccuuugucugaacugccucagccugcuucuguccgugucuagcagauguccgaucugcaaaaugccccucccuacaaagcugaaagcggcugcccagcccuccgccccuucuacggaaaccauucagaauacaacacccccuccguauacccccugaggacuagugcaucacauuuaaaagcaucucagccuaccaugagaauaagagaaagaaaaugaagaucaauagcuuauucaucucuuuuucuuuuucguugguguaaagccaacacccugucuaaaaaacauaaauuucuuuaaucauuuugccucuuuucucugugcuucaauuaauaaaaaauggaaagaaccuagaucuaaaaaaaaaaaaaaaaaaaaaaaaaaaaaaaaaaaaaaaaaaaaaaaaaaaaaaaaaaaaaaaaugcaucccccccccccccccccccccccccccccccaaaggcucuuuucagagccaccagaauu

SEQ ID NO: 13537 - RNA, 682 nt, Artificial Sequence
  mRNA product Design i-2 comprising derived and/or modified sequence from LASV(ISTH2010-NIG-2012;Clade II)__AIT17480__Z (opt5)
ggggcgcugccuacggagguggcagccaucuccuucucggcaucaagcuuaccaugggcaacagacacgccaagagcaccaaaguggacgagcaucagcgggcucaccugguccccgaugccucccaucucgggccucaauucugcaagucuuguugguuugaaaaucgcggacugguugagugcaacaaucacuaccuuugucugaacugccucagccugcuucuguccgugucuagcagauguccgaucugcaaaaugccccucccuacaaagcugaaagcggcugcccagcccuccgccccuucuacggaagugauucagagcaccacacccccuccguauacccccugaggacuagugcaucacauuuaaaagcaucucagccuaccaugagaauaagagaaagaaaaugaagaucaauagcuuauucaucucuuuuucuuuuucguugguguaaagccaacacccugucuaaaaaacauaaauuucuuuaaucauuuugccucuuuucucugugcuucaauuaauaaaaaauggaaagaaccuagaucuaaaaaaaaaaaaaaaaaaaaaaaaaaaaaaaaaaaaaaaaaaaaaaaaaaaaaaaaaaaaaaaaugcaucccccccccccccccccccccccccccccccaaaggcucuuuucagagccaccagaauu

SEQ ID NO: 13538 - RNA, 682 nt, Artificial Sequence
  mRNA product Design i-2 comprising derived and/or modified sequence from LASV(Lassa virus/H.sapiens-wt/NGA/2016/ISTH_0017;Clade II)__AVO03713__Z (opt5)
ggggcgcugccuacggagguggcagccaucuccuucucggcaucaagcuuaccaugggcaacagacaggccaagagcaccaaaguggacgagcaccaacgggcucaucugguccccgaugccucccaccucgggccucaguucugcaagucuuguugguuugaaaaucgcggacugguugagugcaacaaucauuaccuuugucugaacugccucagccugcuucuguccgugucuagcagauguccgaucugcaaaaugccccucccuacaaagcugaaagcggcuacgcagcccuccgccccuucuaccgaagugaaucagaacacaacacccccuccguauacccccugaggacuagugcaucacauuuaaaagcaucucagccuaccaugagaauaagagaaagaaaaugaagaucaauagcuuauucaucucuuuuucuuuuucguugguguaaagccaacacccugucuaaaaaacauaaauuucuuuaaucauuuugccucuuuucucugugcuucaauuaauaaaaaauggaaagaaccuagaucuaaaaaaaaaaaaaaaaaaaaaaaaaaaaaaaaaaaaaaaaaaaaaaaaaaaaaaaaaaaaaaaaugcaucccccccccccccccccccccccccccccccaaaggcucuuuucagagccaccagaauu

SEQ ID NO: 13539 - RNA, 682 nt, Artificial Sequence
  mRNA product Design i-2 comprising derived and/or modified sequence from LASV(Lassa virus/H.sapiens-wt/NGA/2018/ISTH_0959;Clade II)__AVV65084__Z (opt5)
ggggcgcugccuacggagguggcagccaucuccuucucggcaucaagcuuaccaugggcaacaagcaggccaaaagcaccaagguggacgagcaccaaagagcucaucugguccccgaugccucccaccucgggccucaguucugcaaaucuuguugguuugaaaaucggggacugguugagugcaacaaucauuaccuuugucugaacugccucagccugcuucuguccgugucuagccgcuguccgaucugcaagaugccccucccuacaaaacugaaggcggcugcccagcccuccgccccuucuacggaagcuauucagagcaccacacccccuccguauacccccugaggacuagugcaucacauuuaaaagcaucucagccuaccaugagaauaagagaaagaaaaugaagaucaauagcuuauucaucucuuuuucuuuuucguugguguaaagccaacacccugucuaaaaaacauaaauuucuuuaaucauuuugccucuuuucucugugcuucaauuaauaaaaaauggaaagaaccuagaucuaaaaaaaaaaaaaaaaaaaaaaaaaaaaaaaaaaaaaaaaaaaaaaaaaaaaaaaaaaaaaaaaugcaucccccccccccccccccccccccccccccccaaaggcucuuuucagagccaccagaauu

SEQ ID NO: 13540 - RNA, 682 nt, Artificial Sequence
  mRNA product Design i-2 comprising derived and/or modified sequence from LASV(LASV003-NIG-2008;Clade II)__AIT17578__Z (opt5)
ggggcgcugccuacggagguggcagccaucuccuucucggcaucaagcuuaccaugggcaacagacaggccaagagcaccaaaguggacgagcaccaacgggcucaucugguccccgaugccucccaccucgggccucaguucugcaagucuuguugguuugaaaauaaaggacugguugagugcaacaaucauuaccuuugucugaacugccucagccugcuucuguccgugucuagccgcuguccgaucugcaagaugccccucccuacaaaacugagagcggcugcccagcccuccgccccuucuacggaaagcgcucagaauaccgcucccccuccguaugcccccugaggacuagugcaucacauuuaaaagcaucucagccuaccaugagaauaagagaaagaaaaugaagaucaauagcuuauucaucucuuuuucuuuuucguugguguaaagccaacacccugucuaaaaaacauaaauuucuuuaaucauuuugccucuuuucucugugcuucaauuaauaaaaaauggaaagaaccuagaucuaaaaaaaaaaaaaaaaaaaaaaaaaaaaaaaaaaaaaaaaaaaaaaaaaaaaaaaaaaaaaaaaugcaucccccccccccccccccccccccccccccccaaaggcucuuuucagagccaccagaauu

SEQ ID NO: 13541 - RNA, 682 nt, Artificial Sequence
  mRNA product Design i-2 comprising derived and/or modified sequence from LASV(LASV035-NIG-2009;Clade II)__AIT17586__Z (opt5)
ggggcgcugccuacggagguggcagccaucuccuucucggcaucaagcuuaccaugggcaacaagcaggccaaaagcaccaagguggacgagcaccaaagagcucaucugguccccgaugccucccaccucgggccucaguucugcaaaucuuguugguuugaaaaucggggacugguugagugcaacaaucauuaccuuugucugaacugccucagccugcuucuguccgugucuagccgcuguccgaucugcaagaugccccucccuacaagacugaaagcggcugcccagcccuccgccccuucuacggaagugacccagaauacaacacccccuccguauacccccugaggacuagugcaucacauuuaaaagcaucucagccuaccaugagaauaagagaaagaaaaugaagaucaauagcuuauucaucucuuuuucuuuuucguugguguaaagccaacacccugucuaaaaaacauaaauuucuuuaaucauuuugccucuuuucucugugcuucaauuaauaaaaaauggaaagaaccuagaucuaaaaaaaaaaaaaaaaaaaaaaaaaaaaaaaaaaaaaaaaaaaaaaaaaaaaaaaaaaaaaaaaugcaucccccccccccccccccccccccccccccccaaaggcucuuuucagagccaccagaauu

SEQ ID NO: 13542 - RNA, 682 nt, Artificial Sequence
  mRNA product Design i-2 comprising derived and/or modified sequence from LASV(LASV1000-NIG-2009;Clade II)__AIT17780__Z (opt5)
ggggcgcugccuacggagguggcagccaucuccuucucggcaucaagcuuaccaugggcaacagacagaccaagagcacaaaaguggacgagcaccaacgggccuaccugguccccgaugcuucccuccuggggccucaguucugcaagucuuguugguuugaaaauaaaggacuuguugagugcaacaaucauuaucugugucucaacugccugagccuucugcucuccgugucuagccgcuguccgaucugcaagaugccccugccuacgagacugaaagccgcggcucagcccuccgccccucccaccgaagccauucagaauacaaccccuccgcccuacacaccuugaggacuagugcaucacauuuaaaagcaucucagccuaccaugagaauaagagaaagaaaaugaagaucaauagcuuauucaucucuuuuucuuuuucguugguguaaagccaacacccugucuaaaaaacauaaauuucuuuaaucauuuugccucuuuucucugugcuucaauuaauaaaaaauggaaagaaccuagaucuaaaaaaaaaaaaaaaaaaaaaaaaaaaaaaaaaaaaaaaaaaaaaaaaaaaaaaaaaaaaaaaaugcaucccccccccccccccccccccccccccccccaaaggcucuuuucagagccaccagaauu

SEQ ID NO: 13543 - RNA, 682 nt, Artificial Sequence
  mRNA product Design i-2 comprising derived and/or modified sequence from LASV(LASV221-NIG-2010;Clade II)__AIT17622__Z (opt5)
ggggcgcugccuacggagguggcagccaucuccuucucggcaucaagcuuaccaugggcaacagacaggccaagagcaccaaaguggacgagcaccaacgggcucaucugguccccgaugccucccaccucgggccucaguucugcaagucuuguugguuugaaaaucgcggacugguugagugcaacaaucauuaccuuugucugaacugccucagccugcuucuguccgugucuagcagauguccgaucugcaaaaugccccucccuacaaagcugaaagcggcuacgcagcccuccgccccuucuaccgaagugacacagaauaccauucccccuccguauagccccugaggacuagugcaucacauuuaaaagcaucucagccuaccaugagaauaagagaaagaaaaugaagaucaauagcuuauucaucucuuuuucuuuuucguugguguaaagccaacacccugucuaaaaaacauaaauuucuuuaaucauuuugccucuuuucucugugcuucaauuaauaaaaaauggaaagaaccuagaucuaaaaaaaaaaaaaaaaaaaaaaaaaaaaaaaaaaaaaaaaaaaaaaaaaaaaaaaaaaaaaaaaugcaucccccccccccccccccccccccccccccccaaaggcucuuuucagagccaccagaauu

SEQ ID NO: 13544 - RNA, 682 nt, Artificial Sequence
  mRNA product Design i-2 comprising derived and/or modified sequence from LASV(LASV237-NIG-2010;Clade II)__AIT17636__Z (opt5)
ggggcgcugccuacggagguggcagccaucuccuucucggcaucaagcuuaccaugggcaacagacaggccaagagcaccaaaguggacgagcaccaacgggcucaucugguccccgaugccucccaccucgggccucaguucugcaagucuuguugguuugaaaaucgcggacugguugagugcaacaaucauuaccuuugucugaacugccucagccugcuucuguccgugucuagcagauguccgaucugcaaaaugccccucccuacaaagcugaaagcggcugcccagcccuccgccccuucuauugaaacgauccagaauaccacacccccuccguauacccccugaggacuagugcaucacauuuaaaagcaucucagccuaccaugagaauaagagaaagaaaaugaagaucaauagcuuauucaucucuuuuucuuuuucguugguguaaagccaacacccugucuaaaaaacauaaauuucuuuaaucauuuugccucuuuucucugugcuucaauuaauaaaaaauggaaagaaccuagaucuaaaaaaaaaaaaaaaaaaaaaaaaaaaaaaaaaaaaaaaaaaaaaaaaaaaaaaaaaaaaaaaaugcaucccccccccccccccccccccccccccccccaaaggcucuuuucagagccaccagaauu

SEQ ID NO: 13545 - RNA, 682 nt, Artificial Sequence
  mRNA product Design i-2 comprising derived and/or modified sequence from LASV(LASV253-NIG-2011;Clade II)__AIT17668__Z (opt5)
ggggcgcugccuacggagguggcagccaucuccuucucggcaucaagcuuaccaugggcaacagacaggccaagagcaccaaaguggacgagcaccaacgggcucaucugguccccgaugccucccaccucgggccucaguucugcaagucuuguugguuugaaaauaaaggacugguugagugcaacaaucauuaccuuugucugaacugccucagccugcuucuguccgugucuagccgcuguccgaucugcaagaugccccucccuacaaaacugaagacgaccgcgcagcccuccgcuccucccacagaagccgccaagaauaccgcuccuccgcccuaugccccuugaggacuagugcaucacauuuaaaagcaucucagccuaccaugagaauaagagaaagaaaaugaagaucaauagcuuauucaucucuuuuucuuuuucguugguguaaagccaacacccugucuaaaaaacauaaauuucuuuaaucauuuugccucuuuucucugugcuucaauuaauaaaaaauggaaagaaccuagaucuaaaaaaaaaaaaaaaaaaaaaaaaaaaaaaaaaaaaaaaaaaaaaaaaaaaaaaaaaaaaaaaaugcaucccccccccccccccccccccccccccccccaaaggcucuuuucagagccaccagaauu

SEQ ID NO: 13546 - RNA, 682 nt, Artificial Sequence
  mRNA product Design i-2 comprising derived and/or modified sequence from LASV(G1180-SLE-2010;Clade IV)__AIT17166__Z (opt5)
ggggcgcugccuacggagguggcagccaucuccuucucggcaucaagcuuaccaugggcaacaagcaggccaaagcucccgaggccaaggacagcccuagagcgucccugaucccggaugcuacccaccucgggccccaauucugcaaaucuuguugguuugaaacaaagggacugguggagugcaauaaccauuaccuuugucugaauugccucacgcugcuucugagcgucuccaaccgguguccuauuugcaaaaugccccucccuaccaagcugcgccccucugccacaccuaccgccccgcccacagaagcugccgacagcaucggcccucccccuuauucccccugaggacuagugcaucacauuuaaaagcaucucagccuaccaugagaauaagagaaagaaaaugaagaucaauagcuuauucaucucuuuuucuuuuucguugguguaaagccaacacccugucuaaaaaacauaaauuucuuuaaucauuuugccucuuuucucugugcuucaauuaauaaaaaauggaaagaaccuagaucuaaaaaaaaaaaaaaaaaaaaaaaaaaaaaaaaaaaaaaaaaaaaaaaaaaaaaaaaaaaaaaaaugcaucccccccccccccccccccccccccccccccaaaggcucuuuucagagccaccagaauu

SEQ ID NO: 13547 - RNA, 682 nt, Artificial Sequence
  mRNA product Design i-2 comprising derived and/or modified sequence from LASV(G1442-SLE-2011;Clade IV)__AIT17178__Z (opt5)
ggggcgcugccuacggagguggcagccaucuccuucucggcaucaagcuuaccaugggcaacaagcaggccaaagcuagcgaggccaaggacucccccagagcgucucugaucccugaugcuacccaccucgggccgcaauucugcaaaagcuguugguuugaaaauaagggacugguggagugcaacaaucauuaccuuugucugaacugccucucccugcuucugucugucagcucccggugucccauuugcaaaaugccucuccccacacgccugagaccuucuacggcccccaccgccccuccggcucgggccggcgacaauaucaagcccccucccuauagcccuugaggacuagugcaucacauuuaaaagcaucucagccuaccaugagaauaagagaaagaaaaugaagaucaauagcuuauucaucucuuuuucuuuuucguugguguaaagccaacacccugucuaaaaaacauaaauuucuuuaaucauuuugccucuuuucucugugcuucaauuaauaaaaaauggaaagaaccuagaucuaaaaaaaaaaaaaaaaaaaaaaaaaaaaaaaaaaaaaaaaaaaaaaaaaaaaaaaaaaaaaaaaugcaucccccccccccccccccccccccccccccccaaaggcucuuuucagagccaccagaauu

SEQ ID NO: 13548 - RNA, 682 nt, Artificial Sequence
  mRNA product Design i-2 comprising derived and/or modified sequence from LASV(G502-SLE-2009;Clade IV)__AIT17124__Z (opt5)
ggggcgcugccuacggagguggcagccaucuccuucucggcaucaagcuuaccaugggcaacaaacaggugaagacccccgaggccaaggacagcccuagagcuucccugaucccggaugccacacaccucgggccccaauucugcaaaucuuguugguuugaaaauaagggacuggucgagugcaacaaucauuaccuuugucugaacugccucacgcugcuucugagcguuggcaaucgguguccuauuugcaaaaugccccucccuaccaagcugcgccccuccgugacaccuaccgcgccgcccacaagagcugccgacucuaucgggccucccccuuauagccccugaggacuagugcaucacauuuaaaagcaucucagccuaccaugagaauaagagaaagaaaaugaagaucaauagcuuauucaucucuuuuucuuuuucguugguguaaagccaacacccugucuaaaaaacauaaauuucuuuaaucauuuugccucuuuucucugugcuucaauuaauaaaaaauggaaagaaccuagaucuaaaaaaaaaaaaaaaaaaaaaaaaaaaaaaaaaaaaaaaaaaaaaaaaaaaaaaaaaaaaaaaaugcaucccccccccccccccccccccccccccccccaaaggcucuuuucagagccaccagaauu

SEQ ID NO: 13549 - RNA, 682 nt, Artificial Sequence
  mRNA product Design i-2 comprising derived and/or modified sequence from LASV(G733-SLE-2010;Clade IV)__AIT17152__Z (opt5)
ggggcgcugccuacggagguggcagccaucuccuucucggcaucaagcuuaccaugggcaacaagcaggccaaaacccccgagacaaaggacagcccuagagcuucccugaucccggaugccacgcaccucgggccccaauucugcaaaucuuguugguuugaaaauaagggacugguggagugcaacaaucauuaccuuugucugaacugccucacccugcuucugagcgucuccaaucgguguccuauuugcaaaaugccccucccuacaaagcugcgccccucuaccgcgccuacagcuccgcccgccggcgccgcugacaacaccagaccucccccuuauagccccugaggacuagugcaucacauuuaaaagcaucucagccuaccaugagaauaagagaaagaaaaugaagaucaauagcuuauucaucucuuuuucuuuuucguugguguaaagccaacacccugucuaaaaaacauaaauuucuuuaaucauuuugccucuuuucucugugcuucaauuaauaaaaaauggaaagaaccuagaucuaaaaaaaaaaaaaaaaaaaaaaaaaaaaaaaaaaaaaaaaaaaaaaaaaaaaaaaaaaaaaaaaugcaucccccccccccccccccccccccccccccccaaaggcucuuuucagagccaccagaauu

SEQ ID NO: 13550 - RNA, 694 nt, Artificial Sequence
  mRNA product Design i-2 comprising derived and/or modified sequence from MOPV/LASV reassortant(IGS-1;Clade IV)__AFY05533__Z (opt5)
ggggcgcugccuacggagguggcagccaucuccuucucggcaucaagcuuaccaugggcaagacccagagcaaagggcaacccuccacaaaccugcucaaggagacggaaccuagacacccggugauccccgacgcccggggaaccggcccugaguucugcaaaucuuguugguuugaacgcagagggcugguccggugcaaugaucauuaccuuugucugaacugccucacacugcuucacaccguuagcgaccgcugucccaucugcaagcauaaacugccuuucagacucgagcugcagacacagcccaccgcuccuccggaaauucccccuucccagaaucccccucccuauucuccgugaggacuagugcaucacauuuaaaagcaucucagccuaccaugagaauaagagaaagaaaaugaagaucaauagcuuauucaucucuuuuucuuuuucguugguguaaagccaacacccugucuaaaaaacauaaauuucuuuaaucauuuugccucuuuucucugugcuucaauuaauaaaaaauggaaagaaccuagaucuaaaaaaaaaaaaaaaaaaaaaaaaaaaaaaaaaaaaaaaaaaaaaaaaaaaaaaaaaaaaaaaaugcaucccccccccccccccccccccccccccccccaaaggcucuuuucagagccaccagaauu

SEQ ID NO: 13551 - RNA, 682 nt, Artificial Sequence
  mRNA product Design i-2 comprising derived and/or modified sequence from LASV(LM776-SLE-2012;Clade IV)__AIT17824__Z (opt5)
ggggcgcugccuacggagguggcagccaucuccuucucggcaucaagcuuaccaugggcaacaagcaggccaaagcuagcgaggaaaagaacucccccagagccucucugaucccugacgcgacccaccucgggccgcaauucugcaaaagcuguugguuugagaauaagggacugguggaaugcaauaaccauuaccuuugucugaauugccucacacugcuucuguccgucucuaaccggugucccauuugcaaaaugccucuccccacgaagcugcgcccuagcaccacacccaccgcuccuccgacaggcgccgccgauuccaucagacccccucccuauucuccuugaggacuagugcaucacauuuaaaagcaucucagccuaccaugagaauaagagaaagaaaaugaagaucaauagcuuauucaucucuuuuucuuuuucguugguguaaagccaacacccugucuaaaaaacauaaauuucuuuaaucauuuugccucuuuucucugugcuucaauuaauaaaaaauggaaagaaccuagaucuaaaaaaaaaaaaaaaaaaaaaaaaaaaaaaaaaaaaaaaaaaaaaaaaaaaaaaaaaaaaaaaaugcaucccccccccccccccccccccccccccccccaaaggcucuuuucagagccaccagaauu

SEQ ID NO: 13552 - RNA, 682 nt, Artificial Sequence
  mRNA product Design i-2 comprising derived and/or modified sequence from LASV(Mad39;Clade IV)__ANH09743__Z (opt5)
ggggcgcugccuacggagguggcagccaucuccuucucggcaucaagcuuaccaugggcaacaagcaggccaaagcuagcgagguggaagacgggcccagagccucccugaucccugaugcgacccaccucggaccgcaauucugcaagucuuguugguuugagaauaaaagccuggucgaaugcaacaaucauuaccuuugucugaacugccucacacugcuucuguccguuucuaaucggugucccauuugcaagaugccucuccccacgcgccugaaaccuagcguggugcccaccgcuccuccgacaagagccggcgacgggacccggcccccucccuauuccccuugaggacuagugcaucacauuuaaaagcaucucagccuaccaugagaauaagagaaagaaaaugaagaucaauagcuuauucaucucuuuuucuuuuucguugguguaaagccaacacccugucuaaaaaacauaaauuucuuuaaucauuuugccucuuuucucugugcuucaauuaauaaaaaauggaaagaaccuagaucuaaaaaaaaaaaaaaaaaaaaaaaaaaaaaaaaaaaaaaaaaaaaaaaaaaaaaaaaaaaaaaaaugcaucccccccccccccccccccccccccccccccaaaggcucuuuucagagccaccagaauu

SEQ ID NO: 13553 - RNA, 682 nt, Artificial Sequence
  mRNA product Design i-2 comprising derived and/or modified sequence from LASV(Z0947-SLE-2011;Clade IV)__AIT17838__Z (opt5)
ggggcgcugccuacggagguggcagccaucuccuucucggcaucaagcuuaccaugggcaacaagcaggccaaagugcccgagagcaaggacuccccuagagcuucucugaucccggaugccacccaccucgggccccaauucugcaaaagcuguugguuugaaaauaagggacuggucgagugcaacaaucauuaccuuugucugaacugccucacacugcuucuguccguuucuaaucgguguccuauuugcaaaaugccccucccuacgaagcugaagcccagcgcggcuccuaccgccccgcccacaggcgccgcugacuccauccgcccucccccuuauucucccugaggacuagugcaucacauuuaaaagcaucucagccuaccaugagaauaagagaaagaaaaugaagaucaauagcuuauucaucucuuuuucuuuuucguugguguaaagccaacacccugucuaaaaaacauaaauuucuuuaaucauuuugccucuuuucucugugcuucaauuaauaaaaaauggaaagaaccuagaucuaaaaaaaaaaaaaaaaaaaaaaaaaaaaaaaaaaaaaaaaaaaaaaaaaaaaaaaaaaaaaaaaugcaucccccccccccccccccccccccccccccccaaaggcucuuuucagagccaccagaauu

SEQ ID NO: 13554 - RNA, 682 nt, Artificial Sequence
  mRNA product Design i-2 comprising derived and/or modified sequence from LASV(Josiah;Clade IV)__ADY11072/NP_694871__Z (opt6)
ggggcgcugccuacggagguggcagccaucuccuucucggcaucaagcuuaccaugggaaacaaacaagcaaaagcaccagaaucaaaagacucaccaagagcaucacuaauaccagacgcaacacaccuaggaccacaauucugcaaaucaugcugguucgaaaacaaaggacuuguagaaugcaacaaccacuaccuaugccuaaacugccuaacacuacuacuaucaguaucaaacagaugcccaauaugcaaaaugccacuaccaacaaaacuaagaccaucagcagcaccaacagcaccaccaacaggagcagcagacucaauaagaccaccaccauacucaccauaaggacuagugcaucacauuuaaaagcaucucagccuaccaugagaauaagagaaagaaaaugaagaucaauagcuuauucaucucuuuuucuuuuucguugguguaaagccaacacccugucuaaaaaacauaaauuucuuuaaucauuuugccucuuuucucugugcuucaauuaauaaaaaauggaaagaaccuagaucuaaaaaaaaaaaaaaaaaaaaaaaaaaaaaaaaaaaaaaaaaaaaaaaaaaaaaaaaaaaaaaaaugcaucccccccccccccccccccccccccccccccaaaggcucuuuucagagccaccagaauu

SEQ ID NO: 13555 - RNA, 685 nt, Artificial Sequence
  mRNA product Design i-2 comprising derived and/or modified sequence from LASV(Pinneo-NIG-1969;Clade I)__AIT17834__Z (opt6)
ggggcgcugccuacggagguggcagccaucuccuucucggcaucaagcuuaccaugggaaacaaacaaacaagaucaccaccaaaaccagaacacccaagaccaacacuacuaccagacgcaucacaccuaggaccacaauucugcaaaucaugcugguucgaaaacaaaggacuaguagaaugcaacaaccacuaccuaugccuaaacugccuaacacuacuacuaucaguaucagacagaugcccaauaugcaaaaugccacuaccaacaaaacuagcaguaagaacacaaccaucagcaccaccacuaaaccaaggaaacacacaaucaucaccaccaccauacucaccauaaggacuagugcaucacauuuaaaagcaucucagccuaccaugagaauaagagaaagaaaaugaagaucaauagcuuauucaucucuuuuucuuuuucguugguguaaagccaacacccugucuaaaaaacauaaauuucuuuaaucauuuugccucuuuucucugugcuucaauuaauaaaaaauggaaagaaccuagaucuaaaaaaaaaaaaaaaaaaaaaaaaaaaaaaaaaaaaaaaaaaaaaaaaaaaaaaaaaaaaaaaaugcaucccccccccccccccccccccccccccccccaaaggcucuuuucagagccaccagaauu

SEQ ID NO: 13556 - RNA, 682 nt, Artificial Sequence
  mRNA product Design i-2 comprising derived and/or modified sequence from LASV(Nig08-04;Clade II)__ADU56612__Z (opt6)
ggggcgcugccuacggagguggcagccaucuccuucucggcaucaagcuuaccaugggaaacagacaaacaagaccaacagaagcaacagaacaaucaagagcacaccuaguaccagacgcaucacaccuaggaccacaauucugcaaaucaugcugguucgaaaacagaggacuaguagaaugcaacaaccacuaccuaugccuaaacugccuaucacuacuacuaucaguaucaucaagaugcccaauaugcaaaaugccacuaccaacaagacuaaaagcaucagcacaaccaucagcaccaccaacagaagcaccacaaaacacaacaccaccaccauacacaccauaaggacuagugcaucacauuuaaaagcaucucagccuaccaugagaauaagagaaagaaaaugaagaucaauagcuuauucaucucuuuuucuuuuucguugguguaaagccaacacccugucuaaaaaacauaaauuucuuuaaucauuuugccucuuuucucugugcuucaauuaauaaaaaauggaaagaaccuagaucuaaaaaaaaaaaaaaaaaaaaaaaaaaaaaaaaaaaaaaaaaaaaaaaaaaaaaaaaaaaaaaaaugcaucccccccccccccccccccccccccccccccaaaggcucuuuucagagccaccagaauu

SEQ ID NO: 13557 - RNA, 682 nt, Artificial Sequence
  mRNA product Design i-2 comprising derived and/or modified sequence from LASV(Nig08-A19;Clade III)__ADU56620__Z (opt6)
ggggcgcugccuacggagguggcagccaucuccuucucggcaucaagcuuaccaugggaggaaaacacacaaaaccacaaagagaaucaaacucaccaagagcaucacuaauaccagacgcaacacaccuaggaccacaauucugcaaaucaugcugguucgaaaacaaaggauuaguagaaugcaacaaccacuaccuaugccuaaacugccuaacacuacuacuaucaguaucaaacagaugcccaauaugcaaaaugccacuaccaacaagacuaagagcaucaacaaacccaacagcaccacaaguagaacaaguaggaccaacaaacccaccaccauacucaccauaaggacuagugcaucacauuuaaaagcaucucagccuaccaugagaauaagagaaagaaaaugaagaucaauagcuuauucaucucuuuuucuuuuucguugguguaaagccaacacccugucuaaaaaacauaaauuucuuuaaucauuuugccucuuuucucugugcuucaauuaauaaaaaauggaaagaaccuagaucuaaaaaaaaaaaaaaaaaaaaaaaaaaaaaaaaaaaaaaaaaaaaaaaaaaaaaaaaaaaaaaaaugcaucccccccccccccccccccccccccccccccaaaggcucuuuucagagccaccagaauu

SEQ ID NO: 13558 - RNA, 682 nt, Artificial Sequence
  mRNA product Design i-2 comprising derived and/or modified sequence from LASV(AV;Clade V)__CCA30312__Z (opt6)
ggggcgcugccuacggagguggcagccaucuccuucucggcaucaagcuuaccaugggaaacagacaagcaaaaaacccagaaguagaaaacucaccaagagcaucacuaauaccagacgcaacacaccuaggaccacaauucugcaaaucaugcugguucgaaaacaaaggacuaguagaaugcaacaaccacuaccuaugccuaaacugccuaucacuacuacuaucaguaucaaacagaugcccaauaugcaaaaugccacuaccaacaagacuaagaccaacaacaacaccaacagcaccacaaauaauaaaagaaaacacaacaaacccaccaccauacacaccauaaggacuagugcaucacauuuaaaagcaucucagccuaccaugagaauaagagaaagaaaaugaagaucaauagcuuauucaucucuuuuucuuuuucguugguguaaagccaacacccugucuaaaaaacauaaauuucuuuaaucauuuugccucuuuucucugugcuucaauuaauaaaaaauggaaagaaccuagaucuaaaaaaaaaaaaaaaaaaaaaaaaaaaaaaaaaaaaaaaaaaaaaaaaaaaaaaaaaaaaaaaaugcaucccccccccccccccccccccccccccccccaaaggcucuuuucagagccaccagaauu

SEQ ID NO: 13559 - RNA, 682 nt, Artificial Sequence
  mRNA product Design i-2 comprising derived and/or modified sequence from LASV(Togo/2016/7082;Clade VI)__AMR44579__Z (opt6)
ggggcgcugccuacggagguggcagccaucuccuucucggcaucaagcuuaccaugggagcaagacaaacaaaacaaccacaaauagaaggaucaccaagagcaucacuaguaccagacgcaucacaccuaggaccacaauucugcaaaucaugcugguucgaaaacaaaggacuaguagaaugcaacaaccacuacuuaugccuaaacugccuaucacuacuacuaucaguaucaaacagaugcccaauaugcaaaaugccacuaccaacaaaacuaagaguaucaucagcaccaucagcaccaccagcagcaacagcacaaccaggaacaccaccaccauacucaccauaaggacuagugcaucacauuuaaaagcaucucagccuaccaugagaauaagagaaagaaaaugaagaucaauagcuuauucaucucuuuuucuuuuucguugguguaaagccaacacccugucuaaaaaacauaaauuucuuuaaucauuuugccucuuuucucugugcuucaauuaauaaaaaauggaaagaaccuagaucuaaaaaaaaaaaaaaaaaaaaaaaaaaaaaaaaaaaaaaaaaaaaaaaaaaaaaaaaaaaaaaaaugcaucccccccccccccccccccccccccccccccaaaggcucuuuucagagccaccagaauu

SEQ ID NO: 13560 - RNA, 682 nt, Artificial Sequence
  mRNA product Design i-2 comprising derived and/or modified sequence from LASV(KAK-428;Clade n.d. (VII))__ANH09761__Z (opt6)
ggggcgcugccuacggagguggcagccaucuccuucucggcaucaagcuuaccaugggaaacaaaggaacaaaaccaacacaaaacucagaaccaucaagagcaaaccuaguaccagacgcaucauaccuaggaccacaauucugcaaaucaugcugguucgaaaacaaaggacuaguagaaugcaacaaccacuaccuaugccuaaacugccuaacaaugcuacuaucaguaucaaacagaugcccaauaugcaaaaugccacuaccaacaaaaauaaaagcaucaggaucaccaucagcaccaccaacagaagcaaacucagcaguaucaccaccaccauacacaccauaaggacuagugcaucacauuuaaaagcaucucagccuaccaugagaauaagagaaagaaaaugaagaucaauagcuuauucaucucuuuuucuuuuucguugguguaaagccaacacccugucuaaaaaacauaaauuucuuuaaucauuuugccucuuuucucugugcuucaauuaauaaaaaauggaaagaaccuagaucuaaaaaaaaaaaaaaaaaaaaaaaaaaaaaaaaaaaaaaaaaaaaaaaaaaaaaaaaaaaaaaaaugcaucccccccccccccccccccccccccccccccaaaggcucuuuucagagccaccagaauu

SEQ ID NO: 13561 - RNA, 682 nt, Artificial Sequence
  mRNA product Design i-2 comprising derived and/or modified sequence from LASV(ISTH0009-NIG-2011;Clade II)__AIT17402__Z (opt6)
ggggcgcugccuacggagguggcagccaucuccuucucggcaucaagcuuaccaugggaaacagacaagcaaaaucaacaaaaguagacgaacaccaaagagcacaccuaguaccagacgcaucacaccuaggaccacaauucugcaaaucaugcugguucgaaaacagaggacuaguagaaugcaacaaccacuaccuaugccuaaacugccuaucacuacuacuaucaguaucaucaagaugcccaauaugcaaaaugccacuaccaacaaaacuaaaagcagcagcacaaccaucagcaccaucaacagaaacaauacaaaacacaacaccaccaccauacacaccauaaggacuagugcaucacauuuaaaagcaucucagccuaccaugagaauaagagaaagaaaaugaagaucaauagcuuauucaucucuuuuucuuuuucguugguguaaagccaacacccugucuaaaaaacauaaauuucuuuaaucauuuugccucuuuucucugugcuucaauuaauaaaaaauggaaagaaccuagaucuaaaaaaaaaaaaaaaaaaaaaaaaaaaaaaaaaaaaaaaaaaaaaaaaaaaaaaaaaaaaaaaaugcaucccccccccccccccccccccccccccccccaaaggcucuuuucagagccaccagaauu

SEQ ID NO: 13562 - RNA, 682 nt, Artificial Sequence
  mRNA product Design i-2 comprising derived and/or modified sequence from LASV(ISTH2010-NIG-2012;Clade II)__AIT17480__Z (opt6)
ggggcgcugccuacggagguggcagccaucuccuucucggcaucaagcuuaccaugggaaacagacacgcaaaaucaacaaaaguagacgaacaccaaagagcacaccuaguaccagacgcaucacaccuaggaccacaauucugcaaaucaugcugguucgaaaacagaggacuaguagaaugcaacaaccacuaccuaugccuaaacugccuaucacuacuacuaucaguaucaucaagaugcccaauaugcaaaaugccacuaccaacaaaacuaaaagcagcagcacaaccaucagcaccaucaacagaaguaauacaaucaacaacacccccaccauacacaccauaaggacuagugcaucacauuuaaaagcaucucagccuaccaugagaauaagagaaagaaaaugaagaucaauagcuuauucaucucuuuuucuuuuucguugguguaaagccaacacccugucuaaaaaacauaaauuucuuuaaucauuuugccucuuuucucugugcuucaauuaauaaaaaauggaaagaaccuagaucuaaaaaaaaaaaaaaaaaaaaaaaaaaaaaaaaaaaaaaaaaaaaaaaaaaaaaaaaaaaaaaaaugcaucccccccccccccccccccccccccccccccaaaggcucuuuucagagccaccagaauu

SEQ ID NO: 13563 - RNA, 682 nt, Artificial Sequence
  mRNA product Design i-2 comprising derived and/or modified sequence from LASV(Lassa virus/H.sapiens-wt/NGA/2016/ISTH_0017;Clade II)__AVO03713__Z (opt6)
ggggcgcugccuacggagguggcagccaucuccuucucggcaucaagcuuaccaugggaaacagacaagcaaaaucaacaaaaguagacgaacaccaaagagcacaccuaguaccagacgcaucacaccuaggaccacaauucugcaaaucaugcugguucgaaaacagaggacuaguagaaugcaacaaccacuaccuaugccuaaacugccuaucacuacuacuaucaguaucaucaagaugcccaauaugcaaaaugccacuaccaacaaaacuaaaagcagcaacacaaccaucagcaccaucaacagaaguaaaccaaaacacaacaccaccaccauacacaccauaaggacuagugcaucacauuuaaaagcaucucagccuaccaugagaauaagagaaagaaaaugaagaucaauagcuuauucaucucuuuuucuuuuucguugguguaaagccaacacccugucuaaaaaacauaaauuucuuuaaucauuuugccucuuuucucugugcuucaauuaauaaaaaauggaaagaaccuagaucuaaaaaaaaaaaaaaaaaaaaaaaaaaaaaaaaaaaaaaaaaaaaaaaaaaaaaaaaaaaaaaaaugcaucccccccccccccccccccccccccccccccaaaggcucuuuucagagccaccagaauu

SEQ ID NO: 13564 - RNA, 682 nt, Artificial Sequence
  mRNA product Design i-2 comprising derived and/or modified sequence from LASV(Lassa virus/H.sapiens-wt/NGA/2018/ISTH_0959;Clade II)__AVV65084__Z (opt6)
ggggcgcugccuacggagguggcagccaucuccuucucggcaucaagcuuaccaugggaaacaaacaagcaaaaucaacaaaaguagacgaacaccaaagagcacaccuaguuccagacgcaucacaccuaggaccacaauucugcaaaucaugcugguucgaaaacagaggacuaguagaaugcaacaaccacuaccuaugccuaaacugccuaucacuacuacuaucaguaucaucaagaugcccaauaugcaaaaugccacuaccaacaaaacuaaaagcagcagcacaaccaucagcaccaucaacagaagcaauacaaucaacaacaccaccaccauacacaccauaaggacuagugcaucacauuuaaaagcaucucagccuaccaugagaauaagagaaagaaaaugaagaucaauagcuuauucaucucuuuuucuuuuucguugguguaaagccaacacccugucuaaaaaacauaaauuucuuuaaucauuuugccucuuuucucugugcuucaauuaauaaaaaauggaaagaaccuagaucuaaaaaaaaaaaaaaaaaaaaaaaaaaaaaaaaaaaaaaaaaaaaaaaaaaaaaaaaaaaaaaaaugcaucccccccccccccccccccccccccccccccaaaggcucuuuucagagccaccagaauu

SEQ ID NO: 13565 - RNA, 682 nt, Artificial Sequence
  mRNA product Design i-2 comprising derived and/or modified sequence from LASV(LASV003-NIG-2008;Clade II)__AIT17578__Z (opt6)
ggggcgcugccuacggagguggcagccaucuccuucucggcaucaagcuuaccaugggaaacagacaagcaaaaucaacaaaaguagacgaacaccaaagagcacaccuaguaccagacgcaucacaccuaggaccacaauucugcaaaucaugcugguucgaaaacaaaggacuaguagaaugcaacaaccacuaccuaugccuaaacugccuaucacuacuacuaucaguaucaucaagaugcccaauaugcaaaaugccacuaccaacaaaacuaagagcagcagcacaaccaucagcaccaucaacagaaucagcacaaaacacagcaccaccaccauacgcaccauaaggacuagugcaucacauuuaaaagcaucucagccuaccaugagaauaagagaaagaaaaugaagaucaauagcuuauucaucucuuuuucuuuuucguugguguaaagccaacacccugucuaaaaaacauaaauuucuuuaaucauuuugccucuuuucucugugcuucaauuaauaaaaaauggaaagaaccuagaucuaaaaaaaaaaaaaaaaaaaaaaaaaaaaaaaaaaaaaaaaaaaaaaaaaaaaaaaaaaaaaaaaugcaucccccccccccccccccccccccccccccccaaaggcucuuuucagagccaccagaauu

SEQ ID NO: 13566 - RNA, 682 nt, Artificial Sequence
  mRNA product Design i-2 comprising derived and/or modified sequence from LASV(LASV035-NIG-2009;Clade II)__AIT17586__Z (opt6)
ggggcgcugccuacggagguggcagccaucuccuucucggcaucaagcuuaccaugggaaacaaacaagcaaaaucaacaaaaguagacgaacaccaaagagcacaccuaguaccagacgcaucacaccuaggaccacaauucugcaaaucaugcugguucgaaaacagaggacuaguagaaugcaacaaccacuaccuaugccuaaacugccuaucacuacuacuaucaguaucaucaagaugcccaauaugcaaaaugccacuaccaacaagacuaaaagcagcagcacaaccaucagcaccaucaacagaaguaacacaaaacacaacaccaccaccauacacaccauaaggacuagugcaucacauuuaaaagcaucucagccuaccaugagaauaagagaaagaaaaugaagaucaauagcuuauucaucucuuuuucuuuuucguugguguaaagccaacacccugucuaaaaaacauaaauuucuuuaaucauuuugccucuuuucucugugcuucaauuaauaaaaaauggaaagaaccuagaucuaaaaaaaaaaaaaaaaaaaaaaaaaaaaaaaaaaaaaaaaaaaaaaaaaaaaaaaaaaaaaaaaugcaucccccccccccccccccccccccccccccccaaaggcucuuuucagagccaccagaauu

SEQ ID NO: 13567 - RNA, 682 nt, Artificial Sequence
  mRNA product Design i-2 comprising derived and/or modified sequence from LASV(LASV1000-NIG-2009;Clade II)__AIT17780__Z (opt6)
ggggcgcugccuacggagguggcagccaucuccuucucggcaucaagcuuaccaugggaaacagacaaacaaaaucaacaaaaguagacgaacaccaaagagcauaccuaguaccagacgcaucacuacuaggaccacaauucugcaaaucaugcugguucgaaaacaaaggacuaguagaaugcaacaaccacuaccuaugccuaaacugccuaucacuacuacuaucaguaucaucaagaugcccaauaugcaaaaugccacuaccaacaagacuaaaagcagcagcacaaccaucagcaccaccaacagaagcaauacaaaacacaacaccaccaccauacacaccauaaggacuagugcaucacauuuaaaagcaucucagccuaccaugagaauaagagaaagaaaaugaagaucaauagcuuauucaucucuuuuucuuuuucguugguguaaagccaacacccugucuaaaaaacauaaauuucuuuaaucauuuugccucuuuucucugugcuucaauuaauaaaaaauggaaagaaccuagaucuaaaaaaaaaaaaaaaaaaaaaaaaaaaaaaaaaaaaaaaaaaaaaaaaaaaaaaaaaaaaaaaaugcaucccccccccccccccccccccccccccccccaaaggcucuuuucagagccaccagaauu

SEQ ID NO: 13568 - RNA, 682 nt, Artificial Sequence
  mRNA product Design i-2 comprising derived and/or modified sequence from LASV(LASV221-NIG-2010;Clade II)__AIT17622__Z (opt6)
ggggcgcugccuacggagguggcagccaucuccuucucggcaucaagcuuaccaugggaaacagacaagccaaaucaacaaaaguagacgaacaccaaagagcacaccuaguaccagacgcaucacaccuaggaccacaauucugcaaaucaugcugguucgaaaacagaggauuaguagaaugcaacaaccacuaccuaugccuaaacugccuaucacuacuacuaucaguaucaucaagaugcccaauaugcaaaaugccacuaccaacaaaacuaaaagcagcaacacaaccaucagcaccaucaacagaaguaacacaaaacacaauaccaccaccauacucaccauaaggacuagugcaucacauuuaaaagcaucucagccuaccaugagaauaagagaaagaaaaugaagaucaauagcuuauucaucucuuuuucuuuuucguugguguaaagccaacacccugucuaaaaaacauaaauuucuuuaaucauuuugccucuuuucucugugcuucaauuaauaaaaaauggaaagaaccuagaucuaaaaaaaaaaaaaaaaaaaaaaaaaaaaaaaaaaaaaaaaaaaaaaaaaaaaaaaaaaaaaaaaugcaucccccccccccccccccccccccccccccccaaaggcucuuuucagagccaccagaauu

SEQ ID NO: 13569 - RNA, 682 nt, Artificial Sequence
  mRNA product Design i-2 comprising derived and/or modified sequence from LASV(LASV237-NIG-2010;Clade II)__AIT17636__Z (opt6)
ggggcgcugccuacggagguggcagccaucuccuucucggcaucaagcuuaccaugggaaacagacaagcaaaaucaacaaaaguagacgaacaccaaagagcacaccuaguaccagacgcaucacaccuaggaccacaauucugcaaaucaugcugguucgaaaacagaggacucguagaaugcaacaaccacuaccuaugccuaaacugccuaucacuacuacuaucaguaucaucaagaugcccaauaugcaaaaugccacuaccaacaaaacuaaaagcagcagcacaaccaucagcaccaucaauagaaacaauacaaaacacaacaccaccaccauacacaccauaaggacuagugcaucacauuuaaaagcaucucagccuaccaugagaauaagagaaagaaaaugaagaucaauagcuuauucaucucuuuuucuuuuucguugguguaaagccaacacccugucuaaaaaacauaaauuucuuuaaucauuuugccucuuuucucugugcuucaauuaauaaaaaauggaaagaaccuagaucuaaaaaaaaaaaaaaaaaaaaaaaaaaaaaaaaaaaaaaaaaaaaaaaaaaaaaaaaaaaaaaaaugcaucccccccccccccccccccccccccccccccaaaggcucuuuucagagccaccagaauu

SEQ ID NO: 13570 - RNA, 682 nt, Artificial Sequence
  mRNA product Design i-2 comprising derived and/or modified sequence from LASV(LASV253-NIG-2011;Clade II)__AIT17668__Z (opt6)
ggggcgcugccuacggagguggcagccaucuccuucucggcaucaagcuuaccaugggaaacagacaagcaaaaucaacaaaaguagacgaacaccaaagagcacaccuaguaccagacgcaucacaccuaggaccacaauucugcaaaucaugcugguucgaaaacaaaggacuaguagaaugcaacaaccacuaccuaugccuaaacugccuaucacuacuacuaucaguaucaucaagaugcccaauaugcaaaaugccauuaccaacaaaacuaaaaacaacagcacaaccaucagcaccaccaacagaagcagcaaaaaacacagcaccaccaccauacgcaccauaaggacuagugcaucacauuuaaaagcaucucagccuaccaugagaauaagagaaagaaaaugaagaucaauagcuuauucaucucuuuuucuuuuucguugguguaaagccaacacccugucuaaaaaacauaaauuucuuuaaucauuuugccucuuuucucugugcuucaauuaauaaaaaauggaaagaaccuagaucuaaaaaaaaaaaaaaaaaaaaaaaaaaaaaaaaaaaaaaaaaaaaaaaaaaaaaaaaaaaaaaaaugcaucccccccccccccccccccccccccccccccaaaggcucuuuucagagccaccagaauu

SEQ ID NO: 13571 - RNA, 682 nt, Artificial Sequence
  mRNA product Design i-2 comprising derived and/or modified sequence from LASV(G1180-SLE-2010;Clade IV)__AIT17166__Z (opt6)
ggggcgcugccuacggagguggcagccaucuccuucucggcaucaagcuuaccaugggaaacaaacaagcaaaagcaccagaagcaaaagacucaccaagagcaucacuaauaccagacgcaacacaccuaggaccacaauucugcaaaucaugcugguucgaaacaaaaggacuaguagaaugcaacaaccacuaccuaugccuaaacugccuaacacuacuacuaucaguaucaaacagaugcccaauaugcaaaaugccacuaccaacaaaacuaagaccaucagcaacaccaacagcaccaccaacagaagcagcagacucaauaggaccaccaccauacucaccauaaggacuagugcaucacauuuaaaagcaucucagccuaccaugagaauaagagaaagaaaaugaagaucaauagcuuauucaucucuuuuucuuuuucguugguguaaagccaacacccugucuaaaaaacauaaauuucuuuaaucauuuugccucuuuucucugugcuucaauuaauaaaaaauggaaagaaccuagaucuaaaaaaaaaaaaaaaaaaaaaaaaaaaaaaaaaaaaaaaaaaaaaaaaaaaaaaaaaaaaaaaaugcaucccccccccccccccccccccccccccccccaaaggcucuuuucagagccaccagaauu

SEQ ID NO: 13572 - RNA, 682 nt, Artificial Sequence
  mRNA product Design i-2 comprising derived and/or modified sequence from LASV(G1442-SLE-2011;Clade IV)__AIT17178__Z (opt6)
ggggcgcugccuacggagguggcagccaucuccuucucggcaucaagcuuaccaugggaaacaaacaagcaaaagcaucagaagcaaaagacucaccaagagcaucacuaauaccagacgcaacacaccuaggaccacaauucugcaaaucaugcugguucgaaaacaaaggauuaguagaaugcaacaaccacuaccuaugccuaaacugccuaucacuacuacuaucaguaucaucaagaugcccaauaugcaaaaugccacuaccaacaagacuaagaccaucaacagcaccaacagcaccaccagcaagagcaggagacaacauaaaaccaccaccauacucaccauaaggacuagugcaucacauuuaaaagcaucucagccuaccaugagaauaagagaaagaaaaugaagaucaauagcuuauucaucucuuuuucuuuuucguugguguaaagccaacacccugucuaaaaaacauaaauuucuuuaaucauuuugccucuuuucucugugcuucaauuaauaaaaaauggaaagaaccuagaucuaaaaaaaaaaaaaaaaaaaaaaaaaaaaaaaaaaaaaaaaaaaaaaaaaaaaaaaaaaaaaaaaugcaucccccccccccccccccccccccccccccccaaaggcucuuuucagagccaccagaauu

SEQ ID NO: 13573 - RNA, 682 nt, Artificial Sequence
  mRNA product Design i-2 comprising derived and/or modified sequence from LASV(G502-SLE-2009;Clade IV)__AIT17124__Z (opt6)
ggggcgcugccuacggagguggcagccaucuccuucucggcaucaagcuuaccaugggaaacaaacaaguaaaaacaccagaagcaaaagacucaccaagagcaucacuaauaccagacgcaacacaccuaggaccacaauucugcaaaucaugcugguucgaaaacaaaggacuaguagaaugcaacaaccacuaccuaugccuaaacugccuaacacuacuacuaucaguaggaaacagaugcccaauaugcaaaaugccacuaccaacaaaacuaagaccaucagucacaccaacagcaccaccaacaagagcagcagacucaauaggaccaccaccauacucaccauaaggacuagugcaucacauuuaaaagcaucucagccuaccaugagaauaagagaaagaaaaugaagaucaauagcuuauucaucucuuuuucuuuuucguugguguaaagccaacacccugucuaaaaaacauaaauuucuuuaaucauuuugccucuuuucucugugcuucaauuaauaaaaaauggaaagaaccuagaucuaaaaaaaaaaaaaaaaaaaaaaaaaaaaaaaaaaaaaaaaaaaaaaaaaaaaaaaaaaaaaaaaugcaucccccccccccccccccccccccccccccccaaaggcucuuuucagagccaccagaauu

SEQ ID NO: 13574 - RNA, 682 nt, Artificial Sequence
  mRNA product Design i-2 comprising derived and/or modified sequence from LASV(G733-SLE-2010;Clade IV)__AIT17152__Z (opt6)
ggggcgcugccuacggagguggcagccaucuccuucucggcaucaagcuuaccaugggaaacaaacaagcaaaaacaccagaaacaaaagacucaccaagagcaucauuaauaccagacgcaacacaccuaggaccacaauucugcaaaucaugcugguucgaaaacaaaggauuaguagaaugcaacaaccacuaccuaugccuaaacugccuaacacuacuacuaucaguaucaaacagaugcccaauaugcaaaaugccacuaccaacaaaacuaagaccaucaacagcaccaacagcaccaccagcaggagcagcagacaacacaagaccaccaccauacucaccauaaggacuagugcaucacauuuaaaagcaucucagccuaccaugagaauaagagaaagaaaaugaagaucaauagcuuauucaucucuuuuucuuuuucguugguguaaagccaacacccugucuaaaaaacauaaauuucuuuaaucauuuugccucuuuucucugugcuucaauuaauaaaaaauggaaagaaccuagaucuaaaaaaaaaaaaaaaaaaaaaaaaaaaaaaaaaaaaaaaaaaaaaaaaaaaaaaaaaaaaaaaaugcaucccccccccccccccccccccccccccccccaaaggcucuuuucagagccaccagaauu

SEQ ID NO: 13575 - RNA, 694 nt, Artificial Sequence
  mRNA product Design i-2 comprising derived and/or modified sequence from MOPV/LASV reassortant(IGS-1;Clade IV)__AFY05533__Z (opt6)
ggggcgcugccuacggagguggcagccaucuccuucucggcaucaagcuuaccaugggaaaaacacaaucaaaaggacaaccauccacaaaccuacuaaaagaaacagaaccaagacacccaguaauaccagacgcaagaggaacaggaccagaauucugcaaaucaugcugguucgaaagaagaggacuaguaagaugcaacgaccacuaccuaugccuaaacugccuaacacuacuacacacaguaucagacagaugcccaauaugcaaacacaaacuaccauucagacuagaacuacaaacacaaccaacagcaccaccagaaauaccaccaucacaaaacccaccaccauacucaccauaaggacuagugcaucacauuuaaaagcaucucagccuaccaugagaauaagagaaagaaaaugaagaucaauagcuuauucaucucuuuuucuuuuucguugguguaaagccaacacccugucuaaaaaacauaaauuucuuuaaucauuuugccucuuuucucugugcuucaauuaauaaaaaauggaaagaaccuagaucuaaaaaaaaaaaaaaaaaaaaaaaaaaaaaaaaaaaaaaaaaaaaaaaaaaaaaaaaaaaaaaaaugcaucccccccccccccccccccccccccccccccaaaggcucuuuucagagccaccagaauu

SEQ ID NO: 13576 - RNA, 682 nt, Artificial Sequence
  mRNA product Design i-2 comprising derived and/or modified sequence from LASV(LM776-SLE-2012;Clade IV)__AIT17824__Z (opt6)
ggggcgcugccuacggagguggcagccaucuccuucucggcaucaagcuuaccaugggaaacaaacaagcaaaagcaucagaagaaaaaaacucaccaagagcaucacuaauaccagacgcaacacaccuaggaccacaauucugcaaaucaugcugguucgaaaacaaaggacuaguagaaugcaacaaucacuaccuaugccuaaacugccuaacacuacuacuaucaguaucaaacagaugcccaauaugcaaaaugccacuaccaacaaaacuaagaccaucaacaacaccaacagcaccaccaacaggagcagcagacucaauaagaccaccaccauacucaccauaaggacuagugcaucacauuuaaaagcaucucagccuaccaugagaauaagagaaagaaaaugaagaucaauagcuuauucaucucuuuuucuuuuucguugguguaaagccaacacccugucuaaaaaacauaaauuucuuuaaucauuuugccucuuuucucugugcuucaauuaauaaaaaauggaaagaaccuagaucuaaaaaaaaaaaaaaaaaaaaaaaaaaaaaaaaaaaaaaaaaaaaaaaaaaaaaaaaaaaaaaaaugcaucccccccccccccccccccccccccccccccaaaggcucuuuucagagccaccagaauu

SEQ ID NO: 13577 - RNA, 682 nt, Artificial Sequence
  mRNA product Design i-2 comprising derived and/or modified sequence from LASV(Mad39;Clade IV)__ANH09743__Z (opt6)
ggggcgcugccuacggagguggcagccaucuccuucucggcaucaagcuuaccaugggaaacaaacaagcaaaagcaucagaaguagaagacggaccaagagcaucacuaauaccagacgcaacacaccuaggaccacaauucugcaaaucaugcugguucgaaaacaaaucacuaguagaaugcaacaaccacuaccuaugccuaaacugccuaacacuacuacuaucaguaucaaacagaugcccaauaugcaaaaugccacuaccaacaagacuaaaaccaucaguaguaccaacagcaccaccaacacgagcaggagacggaacaagaccaccaccauacucaccauaaggacuagugcaucacauuuaaaagcaucucagccuaccaugagaauaagagaaagaaaaugaagaucaauagcuuauucaucucuuuuucuuuuucguugguguaaagccaacacccugucuaaaaaacauaaauuucuuuaaucauuuugccucuuuucucugugcuucaauuaauaaaaaauggaaagaaccuagaucuaaaaaaaaaaaaaaaaaaaaaaaaaaaaaaaaaaaaaaaaaaaaaaaaaaaaaaaaaaaaaaaaugcaucccccccccccccccccccccccccccccccaaaggcucuuuucagagccaccagaauu

SEQ ID NO: 13578 - RNA, 682 nt, Artificial Sequence
  mRNA product Design i-2 comprising derived and/or modified sequence from LASV(Z0947-SLE-2011;Clade IV)__AIT17838__Z (opt6)
ggggcgcugccuacggagguggcagccaucuccuucucggcaucaagcuuaccaugggaaacaaacaagcaaaaguaccagaaucaaaagacucaccaagagcaucacuaauaccagacgcaacacaccuaggaccacaauucugcaaaucaugcugguucgaaaacaaaggacuaguagaaugcaacaaccacuaccuaugccuaaacugccuaacacuacuacuaucaguaucaaacagaugcccaauaugcaaaaugccacuaccaacaaaacuaaaaccaucagcagcaccaacagcaccaccaacaggagcagcagacucaauaagaccaccaccauacucaccauaaggacuagugcaucacauuuaaaagcaucucagccuaccaugagaauaagagaaagaaaaugaagaucaauagcuuauucaucucuuuuucuuuuucguugguguaaagccaacacccugucuaaaaaacauaaauuucuuuaaucauuuugccucuuuucucugugcuucaauuaauaaaaaauggaaagaaccuagaucuaaaaaaaaaaaaaaaaaaaaaaaaaaaaaaaaaaaaaaaaaaaaaaaaaaaaaaaaaaaaaaaaugcaucccccccccccccccccccccccccccccccaaaggcucuuuucagagccaccagaauu

SEQ ID NO: 13579 - RNA, 682 nt, Artificial Sequence
  mRNA product Design i-2 comprising derived and/or modified sequence from LASV(Josiah;Clade IV)__ADY11072/NP_694871__Z (opt11)
ggggcgcugccuacggagguggcagccaucuccuucucggcaucaagcuuaccaugggcaacaaacaagccaaagcccccgaauccaaagacuccccccgcgccucccucauccccgacgccacccaccucggcccccaauucugcaaauccugcugguucgaaaacaaaggccucgucgaaugcaacaaccacuaccucugccucaacugccucacccuacuccucuccgucuccaaccgcugccccaucugcaaaaugccccuccccaccaaacuccgccccuccgccgcccccaccgccccccccaccggcgccgccgacuccauccgccccccccccuacucccccuaaggacuagugcaucacauuuaaaagcaucucagccuaccaugagaauaagagaaagaaaaugaagaucaauagcuuauucaucucuuuuucuuuuucguugguguaaagccaacacccugucuaaaaaacauaaauuucuuuaaucauuuugccucuuuucucugugcuucaauuaauaaaaaauggaaagaaccuagaucuaaaaaaaaaaaaaaaaaaaaaaaaaaaaaaaaaaaaaaaaaaaaaaaaaaaaaaaaaaaaaaaaugcaucccccccccccccccccccccccccccccccaaaggcucuuuucagagccaccagaauu

SEQ ID NO: 13580 - RNA, 685 nt, Artificial Sequence
  mRNA product Design i-2 comprising derived and/or modified sequence from LASV(Pinneo-NIG-1969;Clade I)__AIT17834__Z (opt11)
ggggcgcugccuacggagguggcagccaucuccuucucggcaucaagcuuaccaugggcaacaaacaaacccgcuccccccccaaacccgaacacccccgccccacccuccucccagacgccucccaccucggcccccaauucugcaaauccugcugguucgaaaacaaaggccuagucgaaugcaacaaccacuaccucugccucaacugccucacccuccuccucuccgucuccgaccgcugccccaucugcaaaaugccccuccccaccaaacuugccguccgcacccaacccuccgcccccccccucaaccaaggcaacacccaauccucccccccccccuacucccccuaaggacuagugcaucacauuuaaaagcaucucagccuaccaugagaauaagagaaagaaaaugaagaucaauagcuuauucaucucuuuuucuuuuucguugguguaaagccaacacccugucuaaaaaacauaaauuucuuuaaucauuuugccucuuuucucugugcuucaauuaauaaaaaauggaaagaaccuagaucuaaaaaaaaaaaaaaaaaaaaaaaaaaaaaaaaaaaaaaaaaaaaaaaaaaaaaaaaaaaaaaaaugcaucccccccccccccccccccccccccccccccaaaggcucuuuucagagccaccagaauu

SEQ ID NO: 13581 - RNA, 682 nt, Artificial Sequence
  mRNA product Design i-2 comprising derived and/or modified sequence from LASV(Nig08-04;Clade II)__ADU56612__Z (opt11)
ggggcgcugccuacggagguggcagccaucuccuucucggcaucaagcuuaccaugggcaaccgccaaacccgccccaccgaagcaaccgaacaaucccgcgcccaccucguccccgacgccucccaccucggcccccaauucugcaaauccugcugguucgaaaaccgcggccucgucgaaugcaacaaccacuaccucugccucaacugccucucccuccuccucuccgucuccucccgcugccccaucugcaaaaugccccuccccacccgccucaaagccuccgcccaacccuccgccccccccaccgaagccccccaaaacaccacccccccccccuacacccccuaaggacuagugcaucacauuuaaaagcaucucagccuaccaugagaauaagagaaagaaaaugaagaucaauagcuuauucaucucuuuuucuuuuucguugguguaaagccaacacccugucuaaaaaacauaaauuucuuuaaucauuuugccucuuuucucugugcuucaauuaauaaaaaauggaaagaaccuagaucuaaaaaaaaaaaaaaaaaaaaaaaaaaaaaaaaaaaaaaaaaaaaaaaaaaaaaaaaaaaaaaaaugcaucccccccccccccccccccccccccccccccaaaggcucuuuucagagccaccagaauu

SEQ ID NO: 13582 - RNA, 682 nt, Artificial Sequence
  mRNA product Design i-2 comprising derived and/or modified sequence from LASV(Nig08-A19;Clade III)__ADU56620__Z (opt11)
ggggcgcugccuacggagguggcagccaucuccuucucggcaucaagcuuaccaugggcggcaaacacaccaaaccccaacgcgaauccaacuccccccgcgccucccucauccccgacgccacccaccucggcccccaauucugcaaauccugcugguucgaaaacaaaggccucgucgaaugcaacaaccacuaccucugccucaacugccucacccuccuccucuccgucuccaaccgcugccccaucugcaaaaugccccuccccacccgccuccgcgccuccaccaaccccaccgccccccaagucgaacaagucggccccaccaaccccccccccuacucccccuaaggacuagugcaucacauuuaaaagcaucucagccuaccaugagaauaagagaaagaaaaugaagaucaauagcuuauucaucucuuuuucuuuuucguugguguaaagccaacacccugucuaaaaaacauaaauuucuuuaaucauuuugccucuuuucucugugcuucaauuaauaaaaaauggaaagaaccuagaucuaaaaaaaaaaaaaaaaaaaaaaaaaaaaaaaaaaaaaaaaaaaaaaaaaaaaaaaaaaaaaaaaugcaucccccccccccccccccccccccccccccccaaaggcucuuuucagagccaccagaauu

SEQ ID NO: 13583 - RNA, 682 nt, Artificial Sequence
  mRNA product Design i-2 comprising derived and/or modified sequence from LASV(AV;Clade V)__CCA30312__Z (opt11)
ggggcgcugccuacggagguggcagccaucuccuucucggcaucaagcuuaccaugggcaaccgccaagccaaaaaccccgaagucgaaaacuccccccgcgccucccucauccccgacgccacccaccucggcccccaauucugcaaauccugcugguucgaaaacaaaggccucgucgaaugcaacaaccacuaccucugccucaacugccucucccuccuccucuccgucuccaaccgcugccccaucugcaaaaugccccuccccacccgccuccgccccaccaccacccccaccgccccccaaaucaucaaagaaaacaccaccaaccccccccccuacacccccuaaggacuagugcaucacauuuaaaagcaucucagccuaccaugagaauaagagaaagaaaaugaagaucaauagcuuauucaucucuuuuucuuuuucguugguguaaagccaacacccugucuaaaaaacauaaauuucuuuaaucauuuugccucuuuucucugugcuucaauuaauaaaaaauggaaagaaccuagaucuaaaaaaaaaaaaaaaaaaaaaaaaaaaaaaaaaaaaaaaaaaaaaaaaaaaaaaaaaaaaaaaaugcaucccccccccccccccccccccccccccccccaaaggcucuuuucagagccaccagaauu

SEQ ID NO: 13584 - RNA, 682 nt, Artificial Sequence
  mRNA product Design i-2 comprising derived and/or modified sequence from LASV(Togo/2016/7082;Clade VI)__AMR44579__Z (opt11)
ggggcgcugccuacggagguggcagccaucuccuucucggcaucaagcuuaccaugggcgcccgccaaaccaaacaaccccaaaucgaaggcuccccccgcgccucccucguccccgacgccucccaccucggcccccaauucugcaaauccugcugguucgaaaacaaaggccucgucgaaugcaacaaccacuaccucugccucaacugccucucccuccuccuauccgucucaaaccgcugccccaucugcaaaaugccccuccccaccaaacuccgcgucuccuccgcccccuccgccccccccgccgccaccgcccaacccggcacccccccccccuacucccccuaaggacuagugcaucacauuuaaaagcaucucagccuaccaugagaauaagagaaagaaaaugaagaucaauagcuuauucaucucuuuuucuuuuucguugguguaaagccaacacccugucuaaaaaacauaaauuucuuuaaucauuuugccucuuuucucugugcuucaauuaauaaaaaauggaaagaaccuagaucuaaaaaaaaaaaaaaaaaaaaaaaaaaaaaaaaaaaaaaaaaaaaaaaaaaaaaaaaaaaaaaaaugcaucccccccccccccccccccccccccccccccaaaggcucuuuucagagccaccagaauu

SEQ ID NO: 13585 - RNA, 682 nt, Artificial Sequence
  mRNA product Design i-2 comprising derived and/or modified sequence from LASV(KAK-428;Clade n.d. (VII))__ANH09761__Z (opt11)
ggggcgcugccuacggagguggcagccaucuccuucucggcaucaagcuuaccaugggcaacaaaggcaccaaacccacccaaaacuccgaacccucccgcgccaaccucguccccgacgccuccuaccucggcccccaauucugcaaauccugcugguucgaaaacaaaggccucgucgaaugcaacaaccacuaccucugccucaacugccucaccaugcuccucuccgucuccaaccgcugccccaucugcaaaaugccccuccccaccaaaaucaaagccuccggcucccccuccgccccccccaccgaagccaacuccgccgucucccccccccccuacacccccuaaggacuagugcaucacauuuaaaagcaucucagccuaccaugagaauaagagaaagaaaaugaagaucaauagcuuauucaucucuuuuucuuuuucguugguguaaagccaacacccugucuaaaaaacauaaauuucuuuaaucauuuugccucuuuucucugugcuucaauuaauaaaaaauggaaagaaccuagaucuaaaaaaaaaaaaaaaaaaaaaaaaaaaaaaaaaaaaaaaaaaaaaaaaaaaaaaaaaaaaaaaaugcaucccccccccccccccccccccccccccccccaaaggcucuuuucagagccaccagaauu

SEQ ID NO: 13586 - RNA, 682 nt, Artificial Sequence
  mRNA product Design i-2 comprising derived and/or modified sequence from LASV(ISTH0009-NIG-2011;Clade II)__AIT17402__Z (opt11)
ggggcgcugccuacggagguggcagccaucuccuucucggcaucaagcuuaccaugggcaaccgccaagccaaauccaccaaagucgacgaacaccaacgcgcccaccucguccccgacgccucccaccucggcccccaauucugcaaauccugcugguucgaaaaccgcggccuagucgaaugcaacaaccacuaccucugccucaacugccucucccuccuccucuccgucuccucccgcugccccaucugcaaaaugccccuccccaccaaacucaaagccgccgcccaacccuccgcccccuccaccgaaaccauccaaaacaccacccccccccccuacacccccuaaggacuagugcaucacauuuaaaagcaucucagccuaccaugagaauaagagaaagaaaaugaagaucaauagcuuauucaucucuuuuucuuuuucguugguguaaagccaacacccugucuaaaaaacauaaauuucuuuaaucauuuugccucuuuucucugugcuucaauuaauaaaaaauggaaagaaccuagaucuaaaaaaaaaaaaaaaaaaaaaaaaaaaaaaaaaaaaaaaaaaaaaaaaaaaaaaaaaaaaaaaaugcaucccccccccccccccccccccccccccccccaaaggcucuuuucagagccaccagaauu

SEQ ID NO: 13587 - RNA, 682 nt, Artificial Sequence
  mRNA product Design i-2 comprising derived and/or modified sequence from LASV(ISTH2010-NIG-2012;Clade II)__AIT17480__Z (opt11)
ggggcgcugccuacggagguggcagccaucuccuucucggcaucaagcuuaccaugggcaaccgccacgccaaauccaccaaagucgacgaacaccaacgcgcccaccucguccccgacgccucccaccuaggcccccaauucugcaaauccugcugguucgaaaaccgcggccucgucgaaugcaacaaccacuaccucugccucaacugccucucccuccuccucuccgucuccucccgcugccccaucugcaaaaugccccuccccaccaaacucaaagccgccgcccaaccauccgcccccuccaccgaagucauccaauccaccacccccccccccuacacccccuaaggacuagugcaucacauuuaaaagcaucucagccuaccaugagaauaagagaaagaaaaugaagaucaauagcuuauucaucucuuuuucuuuuucguugguguaaagccaacacccugucuaaaaaacauaaauuucuuuaaucauuuugccucuuuucucugugcuucaauuaauaaaaaauggaaagaaccuagaucuaaaaaaaaaaaaaaaaaaaaaaaaaaaaaaaaaaaaaaaaaaaaaaaaaaaaaaaaaaaaaaaaugcaucccccccccccccccccccccccccccccccaaaggcucuuuucagagccaccagaauu

SEQ ID NO: 13588 - RNA, 682 nt, Artificial Sequence
  mRNA product Design i-2 comprising derived and/or modified sequence from LASV(Lassa virus/H.sapiens-wt/NGA/2016/ISTH_0017;Clade II)__AVO03713__Z (opt11)
ggggcgcugccuacggagguggcagccaucuccuucucggcaucaagcuuaccaugggcaaccgccaagccaaauccaccaaagucgacgaacaccaacgcgcccaccucguccccgacgccucccaccucggcccccaauucugcaaauccugcugguucgaaaaccgcggccucgucgaaugcaacaaccacuaccucugccucaacugccucucccuccuccucuccgucuccucccgcugccccaucugcaaaaugccccuccccaccaaacucaaagccgccacccaacccuccgcccccuccaccgaagucaaccaaaacaccacccccccccccuacacccccuaaggacuagugcaucacauuuaaaagcaucucagccuaccaugagaauaagagaaagaaaaugaagaucaauagcuuauucaucucuuuuucuuuuucguugguguaaagccaacacccugucuaaaaaacauaaauuucuuuaaucauuuugccucuuuucucugugcuucaauuaauaaaaaauggaaagaaccuagaucuaaaaaaaaaaaaaaaaaaaaaaaaaaaaaaaaaaaaaaaaaaaaaaaaaaaaaaaaaaaaaaaaugcaucccccccccccccccccccccccccccccccaaaggcucuuuucagagccaccagaauu

SEQ ID NO: 13589 - RNA, 682 nt, Artificial Sequence
  mRNA product Design i-2 comprising derived and/or modified sequence from LASV(Lassa virus/H.sapiens-wt/NGA/2018/ISTH_0959;Clade II)__AVV65084__Z (opt11)
ggggcgcugccuacggagguggcagccaucuccuucucggcaucaagcuuaccaugggcaacaaacaagccaaauccaccaaagucgacgaacaccaacgcgcccaccucguccccgacgccucccaccucggcccccaauucugcaaauccugcugguucgaaaaccgcggccucgucgaaugcaacaaccacuaccucugccucaacugccucucccuccuccucuccgucuccucccgcugccccaucugcaaaaugccccuccccaccaaacucaaagccgccgcccaacccuccgcccccuccaccgaagccauccaauccaccacccccccccccuacacccccuaaggacuagugcaucacauuuaaaagcaucucagccuaccaugagaauaagagaaagaaaaugaagaucaauagcuuauucaucucuuuuucuuuuucguugguguaaagccaacacccugucuaaaaaacauaaauuucuuuaaucauuuugccucuuuucucugugcuucaauuaauaaaaaauggaaagaaccuagaucuaaaaaaaaaaaaaaaaaaaaaaaaaaaaaaaaaaaaaaaaaaaaaaaaaaaaaaaaaaaaaaaaugcaucccccccccccccccccccccccccccccccaaaggcucuuuucagagccaccagaauu

SEQ ID NO: 13590 - RNA, 682 nt, Artificial Sequence
  mRNA product Design i-2 comprising derived and/or modified sequence from LASV(LASV003-NIG-2008;Clade II)__AIT17578__Z (opt11)
ggggcgcugccuacggagguggcagccaucuccuucucggcaucaagcuuaccaugggcaaccgccaagccaaauccaccaaagucgacgaacaccaacgcgcccaccucguccccgacgccucccaccucggcccccaauucugcaaaucaugcugguucgaaaacaaaggccucgucgaaugcaacaaccacuaccucugccucaacugccucucacuccuccucuccgucuccucccgcugccccaucugcaaaaugccccuccccaccaaacuccgcgccgccgcccaacccuccgcccccuccaccgaauccgcccaaaacaccgcccccccccccuacgcccccuaaggacuagugcaucacauuuaaaagcaucucagccuaccaugagaauaagagaaagaaaaugaagaucaauagcuuauucaucucuuuuucuuuuucguugguguaaagccaacacccugucuaaaaaacauaaauuucuuuaaucauuuugccucuuuucucugugcuucaauuaauaaaaaauggaaagaaccuagaucuaaaaaaaaaaaaaaaaaaaaaaaaaaaaaaaaaaaaaaaaaaaaaaaaaaaaaaaaaaaaaaaaugcaucccccccccccccccccccccccccccccccaaaggcucuuuucagagccaccagaauu

SEQ ID NO: 13591 - RNA, 682 nt, Artificial Sequence
  mRNA product Design i-2 comprising derived and/or modified sequence from LASV(LASV035-NIG-2009;Clade II)__AIT17586__Z (opt11)
ggggcgcugccuacggagguggcagccaucuccuucucggcaucaagcuuaccaugggcaacaaacaagccaaauccaccaaagucgacgaacaccaacgcgcccaccucguccccgacgccucccaccucggcccccaauucugcaaauccugcugguucgaaaaccgcggccucgucgaaugcaacaaccacuaccucugccucaacugccucucccuccuccucuccgucuccucccgcugccccaucugcaaaaugccccuccccacccgccucaaagccgccgcccaacccuccgcccccuccaccgaagucacccaaaacaccacccccccccccuacacccccuaaggacuagugcaucacauuuaaaagcaucucagccuaccaugagaauaagagaaagaaaaugaagaucaauagcuuauucaucucuuuuucuuuuucguugguguaaagccaacacccugucuaaaaaacauaaauuucuuuaaucauuuugccucuuuucucugugcuucaauuaauaaaaaauggaaagaaccuagaucuaaaaaaaaaaaaaaaaaaaaaaaaaaaaaaaaaaaaaaaaaaaaaaaaaaaaaaaaaaaaaaaaugcaucccccccccccccccccccccccccccccccaaaggcucuuuucagagccaccagaauu

SEQ ID NO: 13592 - RNA, 682 nt, Artificial Sequence
  mRNA product Design i-2 comprising derived and/or modified sequence from LASV(LASV1000-NIG-2009;Clade II)__AIT17780__Z (opt11)
ggggcgcugccuacggagguggcagccaucuccuucucggcaucaagcuuaccaugggcaaccgccaaaccaaauccaccaaagucgacgaacaccaacgcgcauaccucguccccgacgccucccuccucggcccccaauucugcaaauccugcugguucgaaaacaaaggccucgucgaaugcaacaaccacuaccucugccucaacugccucucccuccuccucuccgucuccucccgcugccccaucugcaaaaugccccuccccacccgccucaaagccgccgcccaacccuccgccccccccacagaagccauccaaaacaccacccccccccccuacacccccuaaggacuagugcaucacauuuaaaagcaucucagccuaccaugagaauaagagaaagaaaaugaagaucaauagcuuauucaucucuuuuucuuuuucguugguguaaagccaacacccugucuaaaaaacauaaauuucuuuaaucauuuugccucuuuucucugugcuucaauuaauaaaaaauggaaagaaccuagaucuaaaaaaaaaaaaaaaaaaaaaaaaaaaaaaaaaaaaaaaaaaaaaaaaaaaaaaaaaaaaaaaaugcaucccccccccccccccccccccccccccccccaaaggcucuuuucagagccaccagaauu

SEQ ID NO: 13593 - RNA, 682 nt, Artificial Sequence
  mRNA product Design i-2 comprising derived and/or modified sequence from LASV(LASV221-NIG-2010;Clade II)__AIT17622__Z (opt11)
ggggcgcugccuacggagguggcagccaucuccuucucggcaucaagcuuaccaugggcaaccgccaagccaaauccaccaaagucgacgaacaccaacgcgcccaccucguccccgacgccucccaccucggcccccaauucugcaaauccugcugguucgaaaaccgcggccucgucgaaugcaacaaccacuaccucugccucaacugccuaucccuccuccucuccgucuccucccgcugccccaucugcaaaaugccccuccccaccaaacucaaagccgccacccaacccuccgcccccuccaccgaagucacccaaaacaccauccccccccccuacucccccuaaggacuagugcaucacauuuaaaagcaucucagccuaccaugagaauaagagaaagaaaaugaagaucaauagcuuauucaucucuuuuucuuuuucguugguguaaagccaacacccugucuaaaaaacauaaauuucuuuaaucauuuugccucuuuucucugugcuucaauuaauaaaaaauggaaagaaccuagaucuaaaaaaaaaaaaaaaaaaaaaaaaaaaaaaaaaaaaaaaaaaaaaaaaaaaaaaaaaaaaaaaaugcaucccccccccccccccccccccccccccccccaaaggcucuuuucagagccaccagaauu

SEQ ID NO: 13594 - RNA, 682 nt, Artificial Sequence
  mRNA product Design i-2 comprising derived and/or modified sequence from LASV(LASV237-NIG-2010;Clade II)__AIT17636__Z (opt11)
ggggcgcugccuacggagguggcagccaucuccuucucggcaucaagcuuaccaugggcaaccgccaagccaaauccaccaaagucgacgaacaccaacgcgcccaccuaguccccgacgccucacaccucggcccccaauucugcaaauccugcugguucgaaaaccgcggccucgucgaaugcaacaaccacuaccucugccucaacugccucucccuccuccucuccgucuccucccgcugccccaucugcaaaaugccccuccccaccaaacucaaagccgcagcccaacccuccgcccccucaaucgaaaccauccaaaacaccacacccccccccuacacccccuaaggacuagugcaucacauuuaaaagcaucucagccuaccaugagaauaagagaaagaaaaugaagaucaauagcuuauucaucucuuuuucuuuuucguugguguaaagccaacacccugucuaaaaaacauaaauuucuuuaaucauuuugccucuuuucucugugcuucaauuaauaaaaaauggaaagaaccuagaucuaaaaaaaaaaaaaaaaaaaaaaaaaaaaaaaaaaaaaaaaaaaaaaaaaaaaaaaaaaaaaaaaugcaucccccccccccccccccccccccccccccccaaaggcucuuuucagagccaccagaauu

SEQ ID NO: 13595 - RNA, 682 nt, Artificial Sequence
  mRNA product Design i-2 comprising derived and/or modified sequence from LASV(LASV253-NIG-2011;Clade II)__AIT17668__Z (opt11)
ggggcgcugccuacggagguggcagccaucuccuucucggcaucaagcuuaccaugggcaaccgccaagccaaauccacaaaagucgacgaacaccaacgcgcccaccucguccccgacgccucccaccucggcccccaauucugcaaauccugcugguucgaaaacaaaggccucgucgaaugcaacaaccacuaccucugccucaacugccucucccuccuccucuccgucuccucccgcugccccaucugcaaaaugccccuccccaccaaacucaaaaccaccgcccaacccuccgccccccccaccgaagccgccaaaaacaccgcccccccccccuacgcccccuaaggacuagugcaucacauuuaaaagcaucucagccuaccaugagaauaagagaaagaaaaugaagaucaauagcuuauucaucucuuuuucuuuuucguugguguaaagccaacacccugucuaaaaaacauaaauuucuuuaaucauuuugccucuuuucucugugcuucaauuaauaaaaaauggaaagaaccuagaucuaaaaaaaaaaaaaaaaaaaaaaaaaaaaaaaaaaaaaaaaaaaaaaaaaaaaaaaaaaaaaaaaugcaucccccccccccccccccccccccccccccccaaaggcucuuuucagagccaccagaauu

SEQ ID NO: 13596 - RNA, 682 nt, Artificial Sequence
  mRNA product Design i-2 comprising derived and/or modified sequence from LASV(G1180-SLE-2010;Clade IV)__AIT17166__Z (opt11)
ggggcgcugccuacggagguggcagccaucuccuucucggcaucaagcuuaccaugggcaacaaacaagccaaagcccccgaagccaaagacuccccccgcgccucccucauccccgacgccacccaccucggcccccaauucugcaaauccugcugguucgaaaccaaaggccucgucgaaugcaacaaccacuaccucugccucaacugccucacccuccuccucuccgucuccaaccgcugccccaucugcaaaaugccccuccccaccaaacuccgccccuccgccacccccaccgccccccccaccgaagccgccgacuccaucggccccccccccuacucccccuaaggacuagugcaucacauuuaaaagcaucucagccuaccaugagaauaagagaaagaaaaugaagaucaauagcuuauucaucucuuuuucuuuuucguugguguaaagccaacacccugucuaaaaaacauaaauuucuuuaaucauuuugccucuuuucucugugcuucaauuaauaaaaaauggaaagaaccuagaucuaaaaaaaaaaaaaaaaaaaaaaaaaaaaaaaaaaaaaaaaaaaaaaaaaaaaaaaaaaaaaaaaugcaucccccccccccccccccccccccccccccccaaaggcucuuuucagagccaccagaauu

SEQ ID NO: 13597 - RNA, 682 nt, Artificial Sequence
  mRNA product Design i-2 comprising derived and/or modified sequence from LASV(G1442-SLE-2011;Clade IV)__AIT17178__Z (opt11)
ggggcgcugccuacggagguggcagccaucuccuucucggcaucaagcuuaccaugggcaacaaacaagccaaagccuccgaagccaaagacuccccccgcgccucccucauccccgacgccacccaccucggcccccaauucugcaaauccugcugguucgaaaacaaaggccucgucgaaugcaacaaccacuaccucugccucaacugccucucccuccuccucuccgucuccucccgcugccccaucugcaaaaugccccuccccacccgccuccgccccuccaccgcccccaccgcaccccccgcccgcgccggcgacaacaucaaacccccccccuacucccccuaaggacuagugcaucacauuuaaaagcaucucagccuaccaugagaauaagagaaagaaaaugaagaucaauagcuuauucaucucuuuuucuuuuucguugguguaaagccaacacccugucuaaaaaacauaaauuucuuuaaucauuuugccucuuuucucugugcuucaauuaauaaaaaauggaaagaaccuagaucuaaaaaaaaaaaaaaaaaaaaaaaaaaaaaaaaaaaaaaaaaaaaaaaaaaaaaaaaaaaaaaaaugcaucccccccccccccccccccccccccccccccaaaggcucuuuucagagccaccagaauu

SEQ ID NO: 13598 - RNA, 682 nt, Artificial Sequence
  mRNA product Design i-2 comprising derived and/or modified sequence from LASV(G502-SLE-2009;Clade IV)__AIT17124__Z (opt11)
ggggcgcugccuacggagguggcagccaucuccuucucggcaucaagcuuaccaugggcaacaaacaagucaaaacccccgaagccaaagacuccccccgcgccucccucauccccgacgccacccaccucggcccccaauucugcaaauccugcugguucgaaaacaaaggccucgucgaaugcaacaaccacuaccucugccucaacugccucacccuccuccucuccgucggcaaccgcugccccaucugcaaaaugccccuccccaccaaacuccgccccuccgucacccccaccgccccccccacccgcgccgccgacuccaucggccccccccccuacucccccuaaggacuagugcaucacauuuaaaagcaucucagccuaccaugagaauaagagaaagaaaaugaagaucaauagcuuauucaucucuuuuucuuuuucguugguguaaagccaacacccugucuaaaaaacauaaauuucuuuaaucauuuugccucuuuucucugugcuucaauuaauaaaaaauggaaagaaccuagaucuaaaaaaaaaaaaaaaaaaaaaaaaaaaaaaaaaaaaaaaaaaaaaaaaaaaaaaaaaaaaaaaaugcaucccccccccccccccccccccccccccccccaaaggcucuuuucagagccaccagaauu

SEQ ID NO: 13599 - RNA, 682 nt, Artificial Sequence
  mRNA product Design i-2 comprising derived and/or modified sequence from LASV(G733-SLE-2010;Clade IV)__AIT17152__Z (opt11)
ggggcgcugccuacggagguggcagccaucuccuucucggcaucaagcuuaccaugggcaacaaacaagccaaaacccccgaaaccaaagacuccccccgcgccucacucauccccgacgccacccaccucggcccccaauucugcaaauccugcugguucgaaaacaaaggccucgucgaaugcaacaaccacuaccucugccucaacugccucacccuccuccucuccgucuccaaccgcugccccaucugcaaaaugccccuccccaccaaacuccgccccuccaccgcccccaccgccccccccgccggcgccgccgacaacacccgccccccccccuacucccccuaaggacuagugcaucacauuuaaaagcaucucagccuaccaugagaauaagagaaagaaaaugaagaucaauagcuuauucaucucuuuuucuuuuucguugguguaaagccaacacccugucuaaaaaacauaaauuucuuuaaucauuuugccucuuuucucugugcuucaauuaauaaaaaauggaaagaaccuagaucuaaaaaaaaaaaaaaaaaaaaaaaaaaaaaaaaaaaaaaaaaaaaaaaaaaaaaaaaaaaaaaaaugcaucccccccccccccccccccccccccccccccaaaggcucuuuucagagccaccagaauu

SEQ ID NO: 13600 - RNA, 694 nt, Artificial Sequence
  mRNA product Design i-2 comprising derived and/or modified sequence from MOPV/LASV reassortant(IGS-1;Clade IV)__AFY05533__Z (opt11)
ggggcgcugccuacggagguggcagccaucuccuucucggcaucaagcuuaccaugggcaaaacccaauccaaaggccaacccuccaccaaccuacucaaagaaaccgaaccccgccaccccgucauccccgacgcccgcggcaccggccccgaauucugcaaauccugcugguucgaacgccgcggccucguccgcugcaacgaccacuaccucugccucaacugccucacccuccuccacaccgucuccgaccgcugccccaucugcaaacacaaacuccccuuccgccucgaacuccaaacccaacccaccgccccccccgaaaucccccccucccaaaaccccccccccuacucccccuaaggacuagugcaucacauuuaaaagcaucucagccuaccaugagaauaagagaaagaaaaugaagaucaauagcuuauucaucucuuuuucuuuuucguugguguaaagccaacacccugucuaaaaaacauaaauuucuuuaaucauuuugccucuuuucucugugcuucaauuaauaaaaaauggaaagaaccuagaucuaaaaaaaaaaaaaaaaaaaaaaaaaaaaaaaaaaaaaaaaaaaaaaaaaaaaaaaaaaaaaaaaugcaucccccccccccccccccccccccccccccccaaaggcucuuuucagagccaccagaauu

SEQ ID NO: 13601 - RNA, 682 nt, Artificial Sequence
  mRNA product Design i-2 comprising derived and/or modified sequence from LASV(LM776-SLE-2012;Clade IV)__AIT17824__Z (opt11)
ggggcgcugccuacggagguggcagccaucuccuucucggcaucaagcuuaccaugggcaacaaacaagccaaagccuccgaagaaaaaaacuccccccgcgccucccucauccccgacgccacccaccucggcccccaauucugcaaauccugcugguucgaaaacaaaggccuagucgaaugcaacaaccacuaccucugccucaacugccucacccuccuccucucagucuccaaccgcugccccaucugcaaaaugccccuccccaccaaacuccgccccuccaccacccccaccgccccccccaccggcgccgccgacuccauccgccccccccccuacucccccuaaggacuagugcaucacauuuaaaagcaucucagccuaccaugagaauaagagaaagaaaaugaagaucaauagcuuauucaucucuuuuucuuuuucguugguguaaagccaacacccugucuaaaaaacauaaauuucuuuaaucauuuugccucuuuucucugugcuucaauuaauaaaaaauggaaagaaccuagaucuaaaaaaaaaaaaaaaaaaaaaaaaaaaaaaaaaaaaaaaaaaaaaaaaaaaaaaaaaaaaaaaaugcaucccccccccccccccccccccccccccccccaaaggcucuuuucagagccaccagaauu

SEQ ID NO: 13602 - RNA, 682 nt, Artificial Sequence
  mRNA product Design i-2 comprising derived and/or modified sequence from LASV(Mad39;Clade IV)__ANH09743__Z (opt11)
ggggcgcugccuacggagguggcagccaucuccuucucggcaucaagcuuaccaugggcaacaaacaagccaaagccuccgaagucgaagacggcccccgcgccucccucauccccgacgccacccaccucggcccccaauucugcaaauccugcugguucgaaaacaaaucccucgucgaaugcaacaaccacuaccucugccuaaacugccucacccuccuccucuccgucuccaaccgcugccccaucugcaaaaugccccuccccacccgccucaaacccuccgucguccccaccgccccccccacccgcgccggcgacggcacccgccccccccccuacucccccuaaggacuagugcaucacauuuaaaagcaucucagccuaccaugagaauaagagaaagaaaaugaagaucaauagcuuauucaucucuuuuucuuuuucguugguguaaagccaacacccugucuaaaaaacauaaauuucuuuaaucauuuugccucuuuucucugugcuucaauuaauaaaaaauggaaagaaccuagaucuaaaaaaaaaaaaaaaaaaaaaaaaaaaaaaaaaaaaaaaaaaaaaaaaaaaaaaaaaaaaaaaaugcaucccccccccccccccccccccccccccccccaaaggcucuuuucagagccaccagaauu

SEQ ID NO: 13603 - RNA, 682 nt, Artificial Sequence
  mRNA product Design i-2 comprising derived and/or modified sequence from LASV(Z0947-SLE-2011;Clade IV)__AIT17838__Z (opt11)
ggggcgcugccuacggagguggcagccaucuccuucucggcaucaagcuuaccaugggcaacaaacaagccaaaguccccgaauccaaagacuccccccgcgccucccucauccccgacgccacccaccucggcccccaauucugcaaauccugcugguucgaaaacaaaggccucgucgaaugcaacaaccacuaccucugccucaacugccucacccuccuccucuccgucuccaaccgcugccccaucugcaaaaugccccuccccaccaaacucaaacccuccgccgcccccaccgccccccccaccggcgccgccgacuccauccgccccccccccuacuccccauaaggacuagugcaucacauuuaaaagcaucucagccuaccaugagaauaagagaaagaaaaugaagaucaauagcuuauucaucucuuuuucuuuuucguugguguaaagccaacacccugucuaaaaaacauaaauuucuuuaaucauuuugccucuuuucucugugcuucaauuaauaaaaaauggaaagaaccuagaucuaaaaaaaaaaaaaaaaaaaaaaaaaaaaaaaaaaaaaaaaaaaaaaaaaaaaaaaaaaaaaaaaugcaucccccccccccccccccccccccccccccccaaaggcucuuuucagagccaccagaauu

SEQ ID NO: 13604 - RNA, 517 nt, Artificial Sequence
  mRNA product Design i-3 comprising derived and/or modified sequence from LASV(Josiah;Clade IV)__ADY11072/NP_694871__Z (wt)
gggagaaagcuuaccaugggaaacaagcaagccaaagccccagaaucaaaagacaguccgagagccagccugaucccagaugccacacaucuagggccacaguucuguaagagcugcugguucgaaaacaagggccugguugagugcaacaaccacuaucugugucucaacugccucaccuuacuucuaagugucagcaacaggugucccauuugcaagaugccucuccccacaaaacugagaccaucagccgcuccaacagcaccuccaaccggagcagcggacagcaucagacccccacccuacagucccugaggacuaguuauaagacugacuagcccgaugggccucccaacgggcccuccuccccuccuugcaccgagauuaauaaaaaaaaaaaaaaaaaaaaaaaaaaaaaaaaaaaaaaaaaaaaaaaaaaaaaaaaaaaaaaaaugcaucccccccccccccccccccccccccccccccaaaggcucuuuucagagccaccagaauu

SEQ ID NO: 13605 - RNA, 520 nt, Artificial Sequence
  mRNA product Design i-3 comprising derived and/or modified sequence from LASV(Pinneo-NIG-1969;Clade I)__AIT17834__Z (wt)
gggagaaagcuuaccaugggcaacaagcagaccagguccccacccaaaccagagcaccccagaccaacccugcuacccgacgcaucccaccugggcccccaauucugcaagagcugcugguuugagaacaagggacugguggaguguaauaaccauuaccucugucuaaacugucucacacugcuucucagcgugagcgacagauguccuauuuguaagaugccccuccccaccaagcuggcaguccgaacccaaccaagugcacccccacucaaccagggcaacacucaauccuccccgccccccuacagccccuaaggacuaguuauaagacugacuagcccgaugggccucccaacgggcccuccuccccuccuugcaccgagauuaauaaaaaaaaaaaaaaaaaaaaaaaaaaaaaaaaaaaaaaaaaaaaaaaaaaaaaaaaaaaaaaaaugcaucccccccccccccccccccccccccccccccaaaggcucuuuucagagccaccagaauu

SEQ ID NO: 13606 - RNA, 517 nt, Artificial Sequence
  mRNA product Design i-3 comprising derived and/or modified sequence from LASV(Nig08-04;Clade II)__ADU56612__Z (wt)
gggagaaagcuuaccaugggcaacaggcaaaccaggccaacugaagccacugaacagagcagggcucacuugguaccagacgcaucccaccugggaccccaauucugcaagagcuguugguuugaaaacagaggucuaguggagugcaacaaccacuaccugugucucaacugucucaguuugcuccucagugucagcagcagauguccaaucugcaagaugccccuucccaccaggcugaaggcaucagcacagcccagcgcacccccaaccgaagcaccccagaacacaacacccccaccauacaccccauaaggacuaguuauaagacugacuagcccgaugggccucccaacgggcccuccuccccuccuugcaccgagauuaauaaaaaaaaaaaaaaaaaaaaaaaaaaaaaaaaaaaaaaaaaaaaaaaaaaaaaaaaaaaaaaaaugcaucccccccccccccccccccccccccccccccaaaggcucuuuucagagccaccagaauu

SEQ ID NO: 13607 - RNA, 517 nt, Artificial Sequence
  mRNA product Design i-3 comprising derived and/or modified sequence from LASV(Nig08-A19;Clade III)__ADU56620__Z (wt)
gggagaaagcuuaccauggguggcaaacacaccaaaccacagagagaauccaacagucccagagccucucuaauucccgaugcaacacaccugggcccucaauuuugcaagaguuguugguuugagaacaaaggucugguggagugcaacaaccauuacuuaugccucaacugccuuacuuuacuccugucugucagcaacagaugccccaucuguaagaugccccuccccacgaggcugagagcaucaaccaacccaacagcaccccaggucgaacaagucggcccuacaaauccuccaccauacagucccuaaggacuaguuauaagacugacuagcccgaugggccucccaacgggcccuccuccccuccuugcaccgagauuaauaaaaaaaaaaaaaaaaaaaaaaaaaaaaaaaaaaaaaaaaaaaaaaaaaaaaaaaaaaaaaaaaugcaucccccccccccccccccccccccccccccccaaaggcucuuuucagagccaccagaauu

SEQ ID NO: 13608 - RNA, 517 nt, Artificial Sequence
  mRNA product Design i-3 comprising derived and/or modified sequence from LASV(AV;Clade V)__CCA30312__Z (wt)
gggagaaagcuuaccauggggaacagacaagccaaaaauccagagguggagaacagcccaagggcuagucuaauuccggaugccacgcaccuugggccacaguucugcaagagcugcugguucgaaaacaaagguuuaguugaguguaauaaccacuaucuuugccucaacugccucuccuugcuuuuaagcgucagcaacaggugcccuaucugcaagaugccccuucccacgaggcugagaccgacaaccacaccaacagcgccacagaucaucaaggaaaacaccaccaaccccccgccauacacacccuaaggacuaguuauaagacugacuagcccgaugggccucccaacgggcccuccuccccuccuugcaccgagauuaauaaaaaaaaaaaaaaaaaaaaaaaaaaaaaaaaaaaaaaaaaaaaaaaaaaaaaaaaaaaaaaaaugcaucccccccccccccccccccccccccccccccaaaggcucuuuucagagccaccagaauu

SEQ ID NO: 13609 - RNA, 517 nt, Artificial Sequence
  mRNA product Design i-3 comprising derived and/or modified sequence from LASV(Togo/2016/7082;Clade VI)__AMR44579__Z (wt)
gggagaaagcuuaccaugggagccagacagaccaagcaaccucagauugagggaucuccuagagccucucuggugcccgaugcaagccaucuaggaccccaguucugcaagagcugcugguuugagaacaaagggcuuguggaguguaacaaucauuaccuuugccucaauugccucagccuccuacucagugucagcaacaggugcccuaucugcaagaugccccuccccaccaagcugagagugucaagcgcucccagugcacccccagcggccacggcccaacccggaacuccuccaccauacagccccuagggacuaguuauaagacugacuagcccgaugggccucccaacgggcccuccuccccuccuugcaccgagauuaauaaaaaaaaaaaaaaaaaaaaaaaaaaaaaaaaaaaaaaaaaaaaaaaaaaaaaaaaaaaaaaaaugcaucccccccccccccccccccccccccccccccaaaggcucuuuucagagccaccagaauu

SEQ ID NO: 13610 - RNA, 517 nt, Artificial Sequence
  mRNA product Design i-3 comprising derived and/or modified sequence from LASV(KAK-428;Clade n.d. (VII))__ANH09761__Z (wt)
gggagaaagcuuaccaugggcaacaaagggaccaaacccacccagaacucagaacccagcagggccaaccuagugccugaugcaagcuacuuaggaccccaguucugcaagaguugcugguuugaaaacaaagggcugguggaguguaacaaucauuaucucugccucaacugucucacaaugcuucucucugucagcaacaggugcccaaucugcaaaaugccgcuucccaccaaaauaaaggccucaggaagccccagcgcuccuccgaccgaggccaacuccgcagucagccccccuccauacacccccuaaggacuaguuauaagacugacuagcccgaugggccucccaacgggcccuccuccccuccuugcaccgagauuaauaaaaaaaaaaaaaaaaaaaaaaaaaaaaaaaaaaaaaaaaaaaaaaaaaaaaaaaaaaaaaaaaugcaucccccccccccccccccccccccccccccccaaaggcucuuuucagagccaccagaauu

SEQ ID NO: 13611 - RNA, 517 nt, Artificial Sequence
  mRNA product Design i-3 comprising derived and/or modified sequence from LASV(ISTH0009-NIG-2011;Clade II)__AIT17402__Z (wt)
gggagaaagcuuaccaugggcaacagacaggcuaaaucgacaaaagucgaugaacaucaaagagcucaucuagugccagaugcaucccaucuaggcccccaguucugcaagaguugcugguuugagaacagaggguugguagaguguaacaaucacuaccugugucucaacugucucagccugcuucucagcgucagcaguagaugcccgaucugcaagaugccccuucccaccaagcuaaaggcagcagcacagccgagcgcaccaucaaccgagacgauccagaacacaacaccuccaccguacaccccauaaggacuaguuauaagacugacuagcccgaugggccucccaacgggcccuccuccccuccuugcaccgagauuaauaaaaaaaaaaaaaaaaaaaaaaaaaaaaaaaaaaaaaaaaaaaaaaaaaaaaaaaaaaaaaaaaugcaucccccccccccccccccccccccccccccccaaaggcucuuuucagagccaccagaauu

SEQ ID NO: 13612 - RNA, 517 nt, Artificial Sequence
  mRNA product Design i-3 comprising derived and/or modified sequence from LASV(ISTH2010-NIG-2012;Clade II)__AIT17480__Z (wt)
gggagaaagcuuaccauggguaacagacaugccaaaucgacaaaagucgaugaacaucaaagagcucaucuagugccagaugcaucccaucuaggcccccaguucugcaagaguugcugguuugagaauagaggguugguagagugcaacaaucacuaccugugucucaacugucucagccugcuccucagugucagcagcagaugcccgaucugcaagaugccccuucccaccaagcuaaaggcagcagcacagccgagcgcaccauccaccgaggugauccagagcacaacaccuccaccauacaccccauaaggacuaguuauaagacugacuagcccgaugggccucccaacgggcccuccuccccuccuugcaccgagauuaauaaaaaaaaaaaaaaaaaaaaaaaaaaaaaaaaaaaaaaaaaaaaaaaaaaaaaaaaaaaaaaaaugcaucccccccccccccccccccccccccccccccaaaggcucuuuucagagccaccagaauu

SEQ ID NO: 13613 - RNA, 517 nt, Artificial Sequence
  mRNA product Design i-3 comprising derived and/or modified sequence from LASV(Lassa virus/H.sapiens-wt/NGA/2016/ISTH_0017;Clade II)__AVO03713__Z (wt)
gggagaaagcuuaccaugggcaauagacaggccaagucgacaaaagucgaugaacaucaaagagcucaucuagugccagaugcaucccaucuaggcccccaguucugcaaaaguugcugguuugagaacaggggguuaguagagugcaacaaucacuaccugugucucaacugucucagccuacuccucagcgucaguagcagaugcccgaucugcaagaugccccuucccaccaagcuaaaggcggcaacacagccgagcgcaccaucaaccgaggugaaccagaauacaacaccuccaccguacacuccaugaggacuaguuauaagacugacuagcccgaugggccucccaacgggcccuccuccccuccuugcaccgagauuaauaaaaaaaaaaaaaaaaaaaaaaaaaaaaaaaaaaaaaaaaaaaaaaaaaaaaaaaaaaaaaaaaugcaucccccccccccccccccccccccccccccccaaaggcucuuuucagagccaccagaauu

SEQ ID NO: 13614 - RNA, 517 nt, Artificial Sequence
  mRNA product Design i-3 comprising derived and/or modified sequence from LASV(Lassa virus/H.sapiens-wt/NGA/2018/ISTH_0959;Clade II)__AVV65084__Z (wt)
gggagaaagcuuaccaugggcaacaaacaggccaaaucgacaaaagucgacgaacaucaaagggcucaucuaguaccggaugcaucccaucuaggcccccaguucugcaagaguugcugguuugagaacagaggguugguagagugcaacaaucacuaccugugucucaacugucucagccugcuucucagugucagcagcagaugcccgaucugcaagaugccccuucccaccaagcuaaaggcagcagcacagccgagcgcaccaucaacagaggcgauccagagcacaacaccuccaccguacacuccauaaggacuaguuauaagacugacuagcccgaugggccucccaacgggcccuccuccccuccuugcaccgagauuaauaaaaaaaaaaaaaaaaaaaaaaaaaaaaaaaaaaaaaaaaaaaaaaaaaaaaaaaaaaaaaaaaugcaucccccccccccccccccccccccccccccccaaaggcucuuuucagagccaccagaauu

SEQ ID NO: 13615 - RNA, 517 nt, Artificial Sequence
  mRNA product Design i-3 comprising derived and/or modified sequence from LASV(LASV003-NIG-2008;Clade II)__AIT17578__Z (wt)
gggagaaagcuuaccaugggcaacagacaggcuaaaucaacaaaagucgaugaacaucaaagagcucaucuagugccagaugcaucccaucuaggcccccaguuuugcaaaaguugcugguuugagaacaagggguugguggagugcaacaaccacuaccugugucucaacugucucagccugcuccucagcgucagcaguagaugcccgaucugcaagaugccccuucccaccaagcugagggcagcagcacagccgagcgcacccucaacugagucggcucagaacacagcaccuccaccguaugccccaugaggacuaguuauaagacugacuagcccgaugggccucccaacgggcccuccuccccuccuugcaccgagauuaauaaaaaaaaaaaaaaaaaaaaaaaaaaaaaaaaaaaaaaaaaaaaaaaaaaaaaaaaaaaaaaaaugcaucccccccccccccccccccccccccccccccaaaggcucuuuucagagccaccagaauu

SEQ ID NO: 13616 - RNA, 517 nt, Artificial Sequence
  mRNA product Design i-3 comprising derived and/or modified sequence from LASV(LASV035-NIG-2009;Clade II)__AIT17586__Z (wt)
gggagaaagcuuaccaugggcaacaaacaggccaaaucgacaaaagucgaugaacaucaaagagcucaucuagugccagaugcaucucaucuaggcccccaguucuguaagagcugcugguuugagaacagagggcugguagagugcaacaaccacuaccugugucucaacugucucagccugcuucucagcgucagcagcagguguccgaucugcaaaaugccccuucccaccaggcugaaggcagcagcacagccgagcgcacccucaaccgaggugacccagaacacaacaccuccaccguacaccccgugaggacuaguuauaagacugacuagcccgaugggccucccaacgggcccuccuccccuccuugcaccgagauuaauaaaaaaaaaaaaaaaaaaaaaaaaaaaaaaaaaaaaaaaaaaaaaaaaaaaaaaaaaaaaaaaaugcaucccccccccccccccccccccccccccccccaaaggcucuuuucagagccaccagaauu

SEQ ID NO: 13617 - RNA, 517 nt, Artificial Sequence
  mRNA product Design i-3 comprising derived and/or modified sequence from LASV(LASV1000-NIG-2009;Clade II)__AIT17780__Z (wt)
gggagaaagcuuaccaugggcaacagacagaccaaaucgacaaaagucgaugaacaucaaagagcuuaucuagugccagaugcaucccuucuaggcccccaguucugcaagaguugcugguuugagaacaaaggguugguagaaugcaacaaucacuaccugugucuuaacugucucagccugcuccucagcgucagcagcagaugcccgaucugcaagaugccucuucccaccaggcuaaaggcagcagcacagccgagugcaccaccaacugaggcgauccagaacacaacaccuccaccguacaccccauaaggacuaguuauaagacugacuagcccgaugggccucccaacgggcccuccuccccuccuugcaccgagauuaauaaaaaaaaaaaaaaaaaaaaaaaaaaaaaaaaaaaaaaaaaaaaaaaaaaaaaaaaaaaaaaaaugcaucccccccccccccccccccccccccccccccaaaggcucuuuucagagccaccagaauu

SEQ ID NO: 13618 - RNA, 517 nt, Artificial Sequence
  mRNA product Design i-3 comprising derived and/or modified sequence from LASV(LASV221-NIG-2010;Clade II)__AIT17622__Z (wt)
gggagaaagcuuaccaugggcaacagacaggccaaaucgacaaaagucgaugaacaucaaagagcucaucuagugccagaugcaucccaucucggcccucaauucugcaagaguugcugguuugagaacagagggcugguagagugcaacaaucacuaccugugucucaacugucucagccugcuccucagcgucagcagcagaugcccgaucugcaagaugccccuucccaccaagcuaaaagcagcaacacagccgagcgcaccaucaaccgaagugacccagaacacaauaccuccaccauacuccccaugaggacuaguuauaagacugacuagcccgaugggccucccaacgggcccuccuccccuccuugcaccgagauuaauaaaaaaaaaaaaaaaaaaaaaaaaaaaaaaaaaaaaaaaaaaaaaaaaaaaaaaaaaaaaaaaaugcaucccccccccccccccccccccccccccccccaaaggcucuuuucagagccaccagaauu

SEQ ID NO: 13619 - RNA, 517 nt, Artificial Sequence
  mRNA product Design i-3 comprising derived and/or modified sequence from LASV(LASV237-NIG-2010;Clade II)__AIT17636__Z (wt)
gggagaaagcuuaccaugggcaacagacaggcuaaaucgacaaaagucgaugaacaucaaagagcucaucuagugccagaugcaucccaucuaggcccccaguucugcaagaguuguugguuugagaacagaggguugguagaguguaacaaucacuaccugugucucaacugucucagccugcuucucagcgucagcaguagaugcccgaucugcaagaugccccuucccaccaagcuaaaggcagcagcacagccgagcgcaccaucaaucgagacgauccagaacacaacaccuccuccguacaccccauaaggacuaguuauaagacugacuagcccgaugggccucccaacgggcccuccuccccuccuugcaccgagauuaauaaaaaaaaaaaaaaaaaaaaaaaaaaaaaaaaaaaaaaaaaaaaaaaaaaaaaaaaaaaaaaaaugcaucccccccccccccccccccccccccccccccaaaggcucuuuucagagccaccagaauu

SEQ ID NO: 13620 - RNA, 517 nt, Artificial Sequence
  mRNA product Design i-3 comprising derived and/or modified sequence from LASV(LASV253-NIG-2011;Clade II)__AIT17668__Z (wt)
gggagaaagcuuaccauggguaacagacaggccaaaucaacaaaagucgaugaacaucaaagagcucaucuagugccagaugcaucccaucuaggcccccaguuuugcaaaaguugcugguuugagaacaagggguugguugagugcaacaaccacuaccugugucucaacugucucagccugcuccuuagcguuagcagcagaugcccgauuugcaagaugccccuccccaccaagcuaaagacaacagcacagccaagugcacccccgacugaggcggccaagaacacagcaccuccaccguaugccccaugaggacuaguuauaagacugacuagcccgaugggccucccaacgggcccuccuccccuccuugcaccgagauuaauaaaaaaaaaaaaaaaaaaaaaaaaaaaaaaaaaaaaaaaaaaaaaaaaaaaaaaaaaaaaaaaaugcaucccccccccccccccccccccccccccccccaaaggcucuuuucagagccaccagaauu

SEQ ID NO: 13621 - RNA, 517 nt, Artificial Sequence
  mRNA product Design i-3 comprising derived and/or modified sequence from LASV(G1180-SLE-2010;Clade IV)__AIT17166__Z (wt)
gggagaaagcuuaccaugggaaacaagcaagccaaagccccggaagcaaaagacaguccgagagccagccugaucccagaugccacacaccuagggccacaguuuugcaagagcugcugguucgaaaccaagggccugguugagugcaacaaccacuaucuaugucucaauugccucacuuuacuucuaagugucagcaauaggugccccauuugcaagaugccccuucccacaaaacugagaccgucagccacuccaacggcacccccaaccgaagcugcggacagcaucggacccccacccuacagucccugaggacuaguuauaagacugacuagcccgaugggccucccaacgggcccuccuccccuccuugcaccgagauuaauaaaaaaaaaaaaaaaaaaaaaaaaaaaaaaaaaaaaaaaaaaaaaaaaaaaaaaaaaaaaaaaaugcaucccccccccccccccccccccccccccccccaaaggcucuuuucagagccaccagaauu

SEQ ID NO: 13622 - RNA, 517 nt, Artificial Sequence
  mRNA product Design i-3 comprising derived and/or modified sequence from LASV(G1442-SLE-2011;Clade IV)__AIT17178__Z (wt)
gggagaaagcuuaccauggggaacaagcaagccaaagcuucagaagcaaaagacagcccgagggcuagucugauuccagaugccacacaccuaggaccacaguucuguaagagcuguugguuugagaacaagggccugguugaaugcaacaaucacuaucugugucucaacugccucagucugcuucugagugucagcagcaggugccccaucugcaaaaugccccucccgacaagacugaggccaucaacagccccaacagcacccccagccagagcaggggauaacaucaaacccccacccuacagucccugaggacuaguuauaagacugacuagcccgaugggccucccaacgggcccuccuccccuccuugcaccgagauuaauaaaaaaaaaaaaaaaaaaaaaaaaaaaaaaaaaaaaaaaaaaaaaaaaaaaaaaaaaaaaaaaaugcaucccccccccccccccccccccccccccccccaaaggcucuuuucagagccaccagaauu

SEQ ID NO: 13623 - RNA, 517 nt, Artificial Sequence
  mRNA product Design i-3 comprising derived and/or modified sequence from LASV(G502-SLE-2009;Clade IV)__AIT17124__Z (wt)
gggagaaagcuuaccaugggaaacaagcaagucaaaaccccggaagcaaaagacaguccgagagccagccugaucccagaugccacacaccuagggccacaguucugcaagagcugcugguucgaaaacaagggccugguugagugcaacaaccacuaucugugucucaacugccucacuuuacuucuaaguguuggcaacaggugccccauuugcaagaugccccuucccacaaaacugagaccaucagucacuccaacagcacccccaaccagagcagcggacagcaucggacccccacccuacagucccugaggacuaguuauaagacugacuagcccgaugggccucccaacgggcccuccuccccuccuugcaccgagauuaauaaaaaaaaaaaaaaaaaaaaaaaaaaaaaaaaaaaaaaaaaaaaaaaaaaaaaaaaaaaaaaaaugcaucccccccccccccccccccccccccccccccaaaggcucuuuucagagccaccagaauu

SEQ ID NO: 13624 - RNA, 517 nt, Artificial Sequence
  mRNA product Design i-3 comprising derived and/or modified sequence from LASV(G733-SLE-2010;Clade IV)__AIT17152__Z (wt)
gggagaaagcuuaccaugggaaacaagcaagccaagaccccagaaacaaaagacaguccgagagccagccugaucccagaugccacacaccuagggccacaguuuugcaagagcugcugguucgaaaacaagggccugguugagugcaauaaccacuaucugugccucaauugucuuacccuacuucuaagugucagcaacaggugucccauuugcaagaugccucuccccacaaaacugagaccaucaaccgccccaacagcacccccagccggagcagcggacaacaccagacccccacccuauagccccugaggacuaguuauaagacugacuagcccgaugggccucccaacgggcccuccuccccuccuugcaccgagauuaauaaaaaaaaaaaaaaaaaaaaaaaaaaaaaaaaaaaaaaaaaaaaaaaaaaaaaaaaaaaaaaaaugcaucccccccccccccccccccccccccccccccaaaggcucuuuucagagccaccagaauu

SEQ ID NO: 13625 - RNA, 529 nt, Artificial Sequence
  mRNA product Design i-3 comprising derived and/or modified sequence from MOPV/LASV reassortant(IGS-1;Clade IV)__AFY05533__Z (wt)
gggagaaagcuuaccauggggaaaacgcaguccaagggacagcccagcacaaaucuccucaaggagacagaaccaaggcauccaguaauaccagaugccaggggaacuggcccugaauucugcaagagcugcugguucgaaaggaggggguuagucaggugcaacgaucacuaccuauguuugaacugucuuacacuuuuacacacagugucagauaggugccccaucugcaaacacaaacuacccuucagacuagagcuccagacccagccgacagcaccaccagaaaucccaccaucccaaaaucccccacccuacagccccugaggacuaguuauaagacugacuagcccgaugggccucccaacgggcccuccuccccuccuugcaccgagauuaauaaaaaaaaaaaaaaaaaaaaaaaaaaaaaaaaaaaaaaaaaaaaaaaaaaaaaaaaaaaaaaaaugcaucccccccccccccccccccccccccccccccaaaggcucuuuucagagccaccagaauu

SEQ ID NO: 13626 - RNA, 517 nt, Artificial Sequence
  mRNA product Design i-3 comprising derived and/or modified sequence from LASV(LM776-SLE-2012;Clade IV)__AIT17824__Z (wt)
gggagaaagcuuaccaugggaaacaagcaagccaaagccucagaagaaaaaaacaguccgagagccagccugauuccagaugccacacaccuagggccacaauuuugcaagagcugcugguucgaaaacaagggccugguugagugcaacaaccacuaucugugucucaacugccucaccuuacuuuuaagugucagcaacaggugccccaucugcaagaugccucuucccacaaaacugagaccaucaaccacuccaacagcaccuccaaccggagcagcagacagcaucagacccccaccuuacagucccugaggacuaguuauaagacugacuagcccgaugggccucccaacgggcccuccuccccuccuugcaccgagauuaauaaaaaaaaaaaaaaaaaaaaaaaaaaaaaaaaaaaaaaaaaaaaaaaaaaaaaaaaaaaaaaaaugcaucccccccccccccccccccccccccccccccaaaggcucuuuucagagccaccagaauu

SEQ ID NO: 13627 - RNA, 517 nt, Artificial Sequence
  mRNA product Design i-3 comprising derived and/or modified sequence from LASV(Mad39;Clade IV)__ANH09743__Z (wt)
gggagaaagcuuaccaugggaaacaagcaggccaaagccucagaaguggaggaugguccaagggccagucugaucccagaugccacacaccuggggccacaguucugcaagagcugcugguucgaaaauaagagcuugguugagugcaacaaccauuaucugugccucaacugccucacucugcuucugagcgucagcaacaggugccccaucugcaaaaugccucucccaacaagacugaaaccaucagucgucccaacagcaccccccaccagagcaggagacggcaccaggcccccacccuacagucccuaaggacuaguuauaagacugacuagcccgaugggccucccaacgggcccuccuccccuccuugcaccgagauuaauaaaaaaaaaaaaaaaaaaaaaaaaaaaaaaaaaaaaaaaaaaaaaaaaaaaaaaaaaaaaaaaaugcaucccccccccccccccccccccccccccccccaaaggcucuuuucagagccaccagaauu

SEQ ID NO: 13628 - RNA, 517 nt, Artificial Sequence
  mRNA product Design i-3 comprising derived and/or modified sequence from LASV(Z0947-SLE-2011;Clade IV)__AIT17838__Z (wt)
gggagaaagcuuaccaugggaaacaaacaagccaaggucccagaaucaaaagacagcccgagagccagccuaaucccagaugccacacaucuagggccgcaauucuguaagaguugcugguucgaaaacaagggccugguugaguguaacaaccacuaucugugucucaacugccucaccuuacuuuugagugucagcaacaggugccccauuugcaagaugccucuccccacaaaacugaaaccaucagccgcuccaacagcacccccaacuggagcagcggacagcaucagacccccaccuuacagucccugaggacuaguuauaagacugacuagcccgaugggccucccaacgggcccuccuccccuccuugcaccgagauuaauaaaaaaaaaaaaaaaaaaaaaaaaaaaaaaaaaaaaaaaaaaaaaaaaaaaaaaaaaaaaaaaaugcaucccccccccccccccccccccccccccccccaaaggcucuuuucagagccaccagaauu

SEQ ID NO: 13629 - RNA, 517 nt, Artificial Sequence
  mRNA product Design i-3 comprising derived and/or modified sequence from LASV(Josiah;Clade IV)__ADY11072/NP_694871__Z (opt1)
gggagaaagcuuaccaugggcaacaagcaggccaaggcccccgagagcaaggacuccccgcgcgcgagccugauccccgacgccacccaccucgggccccaguucugcaaguccugcugguucgagaacaagggccugguggagugcaacaaccacuaccugugccucaacugccugacccugcuccugagcgucuccaaccggugccccaucugcaagaugccgcugcccacgaagcuccgccccagcgccgcccccaccgccccgcccaccggggcggccgacuccauccggcccccgcccuacagccccugaggacuaguuauaagacugacuagcccgaugggccucccaacgggcccuccuccccuccuugcaccgagauuaauaaaaaaaaaaaaaaaaaaaaaaaaaaaaaaaaaaaaaaaaaaaaaaaaaaaaaaaaaaaaaaaaugcaucccccccccccccccccccccccccccccccaaaggcucuuuucagagccaccagaauu

SEQ ID NO: 13630 - RNA, 520 nt, Artificial Sequence
  mRNA product Design i-3 comprising derived and/or modified sequence from LASV(Pinneo-NIG-1969;Clade I)__AIT17834__Z (opt1)
gggagaaagcuuaccaugggcaacaagcagacccgcagcccgcccaagcccgagcacccccggcccacccugcuccccgacgccucccaccuggggccccaguucugcaagagcugcugguucgagaacaagggccugguggagugcaacaaccacuaccucugccugaacugccugacgcuccugcuguccgucagcgaccgcugccccaucugcaagaugccccuccccaccaagcuggccgugcggacccagcccuccgcgccgccccugaaccaggggaacacccagagcagcccgccgcccuacucccccugaggacuaguuauaagacugacuagcccgaugggccucccaacgggcccuccuccccuccuugcaccgagauuaauaaaaaaaaaaaaaaaaaaaaaaaaaaaaaaaaaaaaaaaaaaaaaaaaaaaaaaaaaaaaaaaaugcaucccccccccccccccccccccccccccccccaaaggcucuuuucagagccaccagaauu

SEQ ID NO: 13631 - RNA, 517 nt, Artificial Sequence
  mRNA product Design i-3 comprising derived and/or modified sequence from LASV(Nig08-04;Clade II)__ADU56612__Z (opt1)
gggagaaagcuuaccaugggcaaccgccagacccggcccaccgaggccacggagcagagccgcgcccaccuggugccggacgccucccaccucgggccccaguucugcaagagcugcugguucgagaaccggggccuggucgagugcaacaaccacuaccugugccucaacugccugucccugcuccugagcguguccagccgcugccccaucugcaagaugccccugccgacccggcucaaggccuccgcccagcccagcgccccgcccaccgaggcgccccagaacaccacgcccccgcccuacacccccugaggacuaguuauaagacugacuagcccgaugggccucccaacgggcccuccuccccuccuugcaccgagauuaauaaaaaaaaaaaaaaaaaaaaaaaaaaaaaaaaaaaaaaaaaaaaaaaaaaaaaaaaaaaaaaaaugcaucccccccccccccccccccccccccccccccaaaggcucuuuucagagccaccagaauu

SEQ ID NO: 13632 - RNA, 517 nt, Artificial Sequence
  mRNA product Design i-3 comprising derived and/or modified sequence from LASV(Nig08-A19;Clade III)__ADU56620__Z (opt1)
gggagaaagcuuaccaugggcgggaagcacaccaagccccagcgcgagagcaacuccccgcgggccagccugauccccgacgccacccaccucggcccccaguucugcaaguccugcugguucgagaacaaggggcugguggagugcaacaaccacuaccugugccucaacugccugacgcugcuccugagcguguccaaccgcugccccaucugcaagaugccccugcccacccggcuccgcgccagcaccaaccccaccgcgccccagguggagcaggucggcccgacgaacccgccgcccuacucccccugaggacuaguuauaagacugacuagcccgaugggccucccaacgggcccuccuccccuccuugcaccgagauuaauaaaaaaaaaaaaaaaaaaaaaaaaaaaaaaaaaaaaaaaaaaaaaaaaaaaaaaaaaaaaaaaaugcaucccccccccccccccccccccccccccccccaaaggcucuuuucagagccaccagaauu

SEQ ID NO: 13633 - RNA, 517 nt, Artificial Sequence
  mRNA product Design i-3 comprising derived and/or modified sequence from LASV(AV;Clade V)__CCA30312__Z (opt1)
gggagaaagcuuaccaugggcaaccgccaggccaagaaccccgagguggagaacagcccccgggccucccugauccccgacgcgacccaccucgggccccaguucugcaagagcugcugguucgagaacaagggccuggucgagugcaacaaccacuaccugugccucaacugccugucccugcuccugagcguguccaaccgcugccccaucugcaagaugccgcugcccacccggcuccgccccacgaccacccccaccgccccgcagaucaucaaggagaacacgaccaacccgccgcccuacacccccugaggacuaguuauaagacugacuagcccgaugggccucccaacgggcccuccuccccuccuugcaccgagauuaauaaaaaaaaaaaaaaaaaaaaaaaaaaaaaaaaaaaaaaaaaaaaaaaaaaaaaaaaaaaaaaaaugcaucccccccccccccccccccccccccccccccaaaggcucuuuucagagccaccagaauu

SEQ ID NO: 13634 - RNA, 517 nt, Artificial Sequence
  mRNA product Design i-3 comprising derived and/or modified sequence from LASV(Togo/2016/7082;Clade VI)__AMR44579__Z (opt1)
gggagaaagcuuaccaugggcgcccgccagaccaagcagccccagaucgaggggagcccccgggccucccuggugcccgacgcgagccaccucggcccccaguucugcaaguccugcugguucgagaacaaggggcuggucgagugcaacaaccacuaccugugccucaacugccugagccugcuccuguccgugagcaaccgcugccccaucugcaagaugccgcugcccaccaagcuccggguguccagcgcccccuccgcgcccccggccgccacggcccagcccggcaccccgccgcccuacagccccugaggacuaguuauaagacugacuagcccgaugggccucccaacgggcccuccuccccuccuugcaccgagauuaauaaaaaaaaaaaaaaaaaaaaaaaaaaaaaaaaaaaaaaaaaaaaaaaaaaaaaaaaaaaaaaaaugcaucccccccccccccccccccccccccccccccaaaggcucuuuucagagccaccagaauu

SEQ ID NO: 13635 - RNA, 517 nt, Artificial Sequence
  mRNA product Design i-3 comprising derived and/or modified sequence from LASV(KAK-428;Clade n.d. (VII))__ANH09761__Z (opt1)
gggagaaagcuuaccaugggcaacaaggggaccaagcccacccagaacagcgagcccucccgcgccaaccuggugcccgacgccagcuaccucggcccccaguucugcaaguccugcugguucgagaacaaggggcuggucgagugcaacaaccacuaccugugccucaacugccugacgaugcugcucagcguguccaaccggugccccaucugcaagaugccgcugcccaccaagaucaaggccagcggcucccccagcgcgcccccgaccgaggccaacuccgccgugagcccgccgcccuacacccccugaggacuaguuauaagacugacuagcccgaugggccucccaacgggcccuccuccccuccuugcaccgagauuaauaaaaaaaaaaaaaaaaaaaaaaaaaaaaaaaaaaaaaaaaaaaaaaaaaaaaaaaaaaaaaaaaugcaucccccccccccccccccccccccccccccccaaaggcucuuuucagagccaccagaauu

SEQ ID NO: 13636 - RNA, 517 nt, Artificial Sequence
  mRNA product Design i-3 comprising derived and/or modified sequence from LASV(ISTH0009-NIG-2011;Clade II)__AIT17402__Z (opt1)
gggagaaagcuuaccaugggcaaccgccaggccaagagcaccaagguggacgagcaccagcgggcccaccugguccccgacgcgucccaccucgggccccaguucugcaagagcugcugguucgagaaccgcggccugguggagugcaacaaccacuaccugugccucaacugccugucccugcuccugagcguguccagccggugccccaucugcaagaugccccugcccaccaagcucaaggccgccgcccagccguccgcccccagcacggagaccauccagaacaccaccccgccgcccuacacgcccugaggacuaguuauaagacugacuagcccgaugggccucccaacgggcccuccuccccuccuugcaccgagauuaauaaaaaaaaaaaaaaaaaaaaaaaaaaaaaaaaaaaaaaaaaaaaaaaaaaaaaaaaaaaaaaaaugcaucccccccccccccccccccccccccccccccaaaggcucuuuucagagccaccagaauu

SEQ ID NO: 13637 - RNA, 517 nt, Artificial Sequence
  mRNA product Design i-3 comprising derived and/or modified sequence from LASV(ISTH2010-NIG-2012;Clade II)__AIT17480__Z (opt1)
gggagaaagcuuaccaugggcaaccgccacgccaagagcaccaagguggacgagcaccagcgggcccaccugguccccgacgcgucccaccucgggccccaguucugcaagagcugcugguucgagaaccgcggccugguggagugcaacaaccacuaccugugccucaacugccugucccugcuccugagcguguccagccggugccccaucugcaagaugccccugcccaccaagcucaaggccgccgcccagccguccgcccccagcacggaggucauccaguccaccaccccgccgcccuacacccccugaggacuaguuauaagacugacuagcccgaugggccucccaacgggcccuccuccccuccuugcaccgagauuaauaaaaaaaaaaaaaaaaaaaaaaaaaaaaaaaaaaaaaaaaaaaaaaaaaaaaaaaaaaaaaaaaugcaucccccccccccccccccccccccccccccccaaaggcucuuuucagagccaccagaauu

SEQ ID NO: 13638 - RNA, 517 nt, Artificial Sequence
  mRNA product Design i-3 comprising derived and/or modified sequence from LASV(Lassa virus/H.sapiens-wt/NGA/2016/ISTH_0017;Clade II)__AVO03713__Z (opt1)
gggagaaagcuuaccaugggcaaccgccaggccaagagcaccaagguggacgagcaccagcgggcccaccugguccccgacgcgucccaccucgggccccaguucugcaagagcugcugguucgagaaccgcggccugguggagugcaacaaccacuaccugugccucaacugccugucccugcuccugagcguguccagccggugccccaucugcaagaugccccugcccaccaagcucaaggccgccacgcagccguccgcccccagcaccgaggucaaccagaacaccaccccgccgcccuacacgcccugaggacuaguuauaagacugacuagcccgaugggccucccaacgggcccuccuccccuccuugcaccgagauuaauaaaaaaaaaaaaaaaaaaaaaaaaaaaaaaaaaaaaaaaaaaaaaaaaaaaaaaaaaaaaaaaaugcaucccccccccccccccccccccccccccccccaaaggcucuuuucagagccaccagaauu

SEQ ID NO: 13639 - RNA, 517 nt, Artificial Sequence
  mRNA product Design i-3 comprising derived and/or modified sequence from LASV(Lassa virus/H.sapiens-wt/NGA/2018/ISTH_0959;Clade II)__AVV65084__Z (opt1)
gggagaaagcuuaccaugggcaacaagcaggccaagagcaccaagguggacgagcaccagcgcgcccaccugguccccgacgcgucccaccucgggccccaguucugcaagagcugcugguucgagaaccggggccugguggagugcaacaaccacuaccugugccucaacugccugucccugcuccugagcguguccagccgcugccccaucugcaagaugccccugcccaccaagcucaaggccgccgcccagccguccgcccccagcacggaggcgauccaguccaccaccccgccgcccuacacccccugaggacuaguuauaagacugacuagcccgaugggccucccaacgggcccuccuccccuccuugcaccgagauuaauaaaaaaaaaaaaaaaaaaaaaaaaaaaaaaaaaaaaaaaaaaaaaaaaaaaaaaaaaaaaaaaaugcaucccccccccccccccccccccccccccccccaaaggcucuuuucagagccaccagaauu

SEQ ID NO: 13640 - RNA, 517 nt, Artificial Sequence
  mRNA product Design i-3 comprising derived and/or modified sequence from LASV(LASV003-NIG-2008;Clade II)__AIT17578__Z (opt1)
gggagaaagcuuaccaugggcaaccgccaggccaagagcaccaagguggacgagcaccagcgggcccaccugguccccgacgcgucccaccucgggccccaguucugcaagagcugcugguucgagaacaagggccugguggagugcaacaaccacuaccugugccucaacugccugucccugcuccugagcguguccagccgcugccccaucugcaagaugccccugcccaccaagcuccgggccgccgcccagccguccgcccccagcacggaguccgcgcagaacaccgccccgccgcccuacgcccccugaggacuaguuauaagacugacuagcccgaugggccucccaacgggcccuccuccccuccuugcaccgagauuaauaaaaaaaaaaaaaaaaaaaaaaaaaaaaaaaaaaaaaaaaaaaaaaaaaaaaaaaaaaaaaaaaugcaucccccccccccccccccccccccccccccccaaaggcucuuuucagagccaccagaauu

SEQ ID NO: 13641 - RNA, 517 nt, Artificial Sequence
  mRNA product Design i-3 comprising derived and/or modified sequence from LASV(LASV035-NIG-2009;Clade II)__AIT17586__Z (opt1)
gggagaaagcuuaccaugggcaacaagcaggccaagagcaccaagguggacgagcaccagcgcgcccaccugguccccgacgcgucccaccucgggccccaguucugcaagagcugcugguucgagaaccggggccugguggagugcaacaaccacuaccugugccucaacugccugucccugcuccugagcguguccagccgcugccccaucugcaagaugccccugcccacccggcucaaggccgccgcccagccguccgcccccagcacggaggucacccagaacaccaccccgccgcccuacacgcccugaggacuaguuauaagacugacuagcccgaugggccucccaacgggcccuccuccccuccuugcaccgagauuaauaaaaaaaaaaaaaaaaaaaaaaaaaaaaaaaaaaaaaaaaaaaaaaaaaaaaaaaaaaaaaaaaugcaucccccccccccccccccccccccccccccccaaaggcucuuuucagagccaccagaauu

SEQ ID NO: 13642 - RNA, 517 nt, Artificial Sequence
  mRNA product Design i-3 comprising derived and/or modified sequence from LASV(LASV1000-NIG-2009;Clade II)__AIT17780__Z (opt1)
gggagaaagcuuaccaugggcaaccgccagaccaagagcaccaagguggacgagcaccagcgggccuaccugguccccgacgccucccuccuggggccccaguucugcaagagcugcugguucgagaacaagggccugguggagugcaacaaccacuaccucugccugaacugccugucccuccugcugagcguguccagccgcugccccaucugcaagaugccccuccccacgcggcugaaggcggccgcccagcccuccgccccgcccaccgaggccauccagaacaccacgccgccgcccuacacccccugaggacuaguuauaagacugacuagcccgaugggccucccaacgggcccuccuccccuccuugcaccgagauuaauaaaaaaaaaaaaaaaaaaaaaaaaaaaaaaaaaaaaaaaaaaaaaaaaaaaaaaaaaaaaaaaaugcaucccccccccccccccccccccccccccccccaaaggcucuuuucagagccaccagaauu

SEQ ID NO: 13643 - RNA, 517 nt, Artificial Sequence
  mRNA product Design i-3 comprising derived and/or modified sequence from LASV(LASV221-NIG-2010;Clade II)__AIT17622__Z (opt1)
gggagaaagcuuaccaugggcaaccgccaggccaagagcaccaagguggacgagcaccagcgggcccaccugguccccgacgcgucccaccucgggccccaguucugcaagagcugcugguucgagaaccgcggccugguggagugcaacaaccacuaccugugccucaacugccugucccugcuccugagcguguccagccggugccccaucugcaagaugccccugcccaccaagcucaaggccgccacgcagccguccgcccccagcaccgaggucacccagaacaccaucccgccgcccuacucccccugaggacuaguuauaagacugacuagcccgaugggccucccaacgggcccuccuccccuccuugcaccgagauuaauaaaaaaaaaaaaaaaaaaaaaaaaaaaaaaaaaaaaaaaaaaaaaaaaaaaaaaaaaaaaaaaaugcaucccccccccccccccccccccccccccccccaaaggcucuuuucagagccaccagaauu

SEQ ID NO: 13644 - RNA, 517 nt, Artificial Sequence
  mRNA product Design i-3 comprising derived and/or modified sequence from LASV(LASV237-NIG-2010;Clade II)__AIT17636__Z (opt1)
gggagaaagcuuaccaugggcaaccgccaggccaagagcaccaagguggacgagcaccagcgggcccaccugguccccgacgcgucccaccucgggccccaguucugcaagagcugcugguucgagaaccgcggccugguggagugcaacaaccacuaccugugccucaacugccugucccugcuccugagcguguccagccggugccccaucugcaagaugccccugcccaccaagcucaaggccgccgcccagccguccgcccccagcaucgagacgauccagaacaccaccccgccgcccuacacccccugaggacuaguuauaagacugacuagcccgaugggccucccaacgggcccuccuccccuccuugcaccgagauuaauaaaaaaaaaaaaaaaaaaaaaaaaaaaaaaaaaaaaaaaaaaaaaaaaaaaaaaaaaaaaaaaaugcaucccccccccccccccccccccccccccccccaaaggcucuuuucagagccaccagaauu

SEQ ID NO: 13645 - RNA, 517 nt, Artificial Sequence
  mRNA product Design i-3 comprising derived and/or modified sequence from LASV(LASV253-NIG-2011;Clade II)__AIT17668__Z (opt1)
gggagaaagcuuaccaugggcaaccgccaggccaagagcaccaagguggacgagcaccagcgggcccaccugguccccgacgcgucccaccucgggccccaguucugcaagagcugcugguucgagaacaagggccugguggagugcaacaaccacuaccugugccucaacugccugucccugcuccugagcguguccagccgcugccccaucugcaagaugccccugcccaccaagcucaagacgaccgcccagccguccgccccgcccaccgaggccgccaagaacaccgcgcccccgcccuacgcccccugaggacuaguuauaagacugacuagcccgaugggccucccaacgggcccuccuccccuccuugcaccgagauuaauaaaaaaaaaaaaaaaaaaaaaaaaaaaaaaaaaaaaaaaaaaaaaaaaaaaaaaaaaaaaaaaaugcaucccccccccccccccccccccccccccccccaaaggcucuuuucagagccaccagaauu

SEQ ID NO: 13646 - RNA, 517 nt, Artificial Sequence
  mRNA product Design i-3 comprising derived and/or modified sequence from LASV(G1180-SLE-2010;Clade IV)__AIT17166__Z (opt1)
gggagaaagcuuaccaugggcaacaagcaggccaaggcccccgaggcgaaggacagcccgcgcgccucccugauccccgacgccacccaccucgggccccaguucugcaagagcugcugguucgagaccaagggccugguggagugcaacaaccacuaccugugccucaacugccugacgcugcuccuguccgucagcaaccggugccccaucugcaagaugccgcugcccaccaagcuccgccccuccgccacccccaccgccccgcccacggaggcggccgacagcaucgggcccccgcccuacucccccugaggacuaguuauaagacugacuagcccgaugggccucccaacgggcccuccuccccuccuugcaccgagauuaauaaaaaaaaaaaaaaaaaaaaaaaaaaaaaaaaaaaaaaaaaaaaaaaaaaaaaaaaaaaaaaaaugcaucccccccccccccccccccccccccccccccaaaggcucuuuucagagccaccagaauu

SEQ ID NO: 13647 - RNA, 517 nt, Artificial Sequence
  mRNA product Design i-3 comprising derived and/or modified sequence from LASV(G1442-SLE-2011;Clade IV)__AIT17178__Z (opt1)
gggagaaagcuuaccaugggcaacaagcaggccaaggccagcgaggcgaaggacagcccccgcgccucccugaucccggacgccacccaccucgggccccaguucugcaaguccugcugguucgagaacaagggccugguggagugcaacaaccacuaccugugccucaacugccugagccugcuccuguccgucagcucccggugccccaucugcaagaugccccugccgacccgccuccggcccagcacggcccccaccgcgcccccggcccgcgccggggacaacaucaagcccccgcccuacucccccugaggacuaguuauaagacugacuagcccgaugggccucccaacgggcccuccuccccuccuugcaccgagauuaauaaaaaaaaaaaaaaaaaaaaaaaaaaaaaaaaaaaaaaaaaaaaaaaaaaaaaaaaaaaaaaaaugcaucccccccccccccccccccccccccccccccaaaggcucuuuucagagccaccagaauu

SEQ ID NO: 13648 - RNA, 517 nt, Artificial Sequence
  mRNA product Design i-3 comprising derived and/or modified sequence from LASV(G502-SLE-2009;Clade IV)__AIT17124__Z (opt1)
gggagaaagcuuaccaugggcaacaagcaggucaagacccccgaggccaaggacagcccccgcgccucccugauccccgacgcgacccaccucgggccccaguucugcaagagcugcugguucgagaacaagggccugguggagugcaacaaccacuaccugugccucaacugccugacgcugcuccuguccguggggaaccggugccccaucugcaagaugccgcugcccaccaagcuccgccccagcgugacccccaccgccccgcccacgcgggccgccgacuccaucggcccgccgcccuacagccccugaggacuaguuauaagacugacuagcccgaugggccucccaacgggcccuccuccccuccuugcaccgagauuaauaaaaaaaaaaaaaaaaaaaaaaaaaaaaaaaaaaaaaaaaaaaaaaaaaaaaaaaaaaaaaaaaugcaucccccccccccccccccccccccccccccccaaaggcucuuuucagagccaccagaauu

SEQ ID NO: 13649 - RNA, 517 nt, Artificial Sequence
  mRNA product Design i-3 comprising derived and/or modified sequence from LASV(G733-SLE-2010;Clade IV)__AIT17152__Z (opt1)
gggagaaagcuuaccaugggcaacaagcaggccaagacccccgagaccaaggacagcccgcgcgccucccugauccccgacgcgacgcaccucgggccccaguucugcaagagcugcugguucgagaacaagggccugguggagugcaacaaccacuaccugugccucaacugccugacccugcuccuguccgucagcaaccggugccccaucugcaagaugccgcugcccaccaagcuccgccccuccaccgcccccacggccccgcccgccggggccgcggacaacacccggcccccgcccuacagccccugaggacuaguuauaagacugacuagcccgaugggccucccaacgggcccuccuccccuccuugcaccgagauuaauaaaaaaaaaaaaaaaaaaaaaaaaaaaaaaaaaaaaaaaaaaaaaaaaaaaaaaaaaaaaaaaaugcaucccccccccccccccccccccccccccccccaaaggcucuuuucagagccaccagaauu

SEQ ID NO: 13650 - RNA, 529 nt, Artificial Sequence
  mRNA product Design i-3 comprising derived and/or modified sequence from MOPV/LASV reassortant(IGS-1;Clade IV)__AFY05533__Z (opt1)
gggagaaagcuuaccaugggcaagacccagagcaaggggcagcccuccaccaaccugcucaaggagacggagccccgccaccccgugauccccgacgcccggggcaccgggcccgaguucugcaagagcugcugguucgagcgccggggccugguccgcugcaacgaccacuaccugugccucaacugccugacccugcuccacaccguguccgaccggugccccaucugcaagcacaagcugcccuuccgccuggagcuccagacgcagcccaccgccccgcccgagaucccgcccagccagaacccgccgcccuacucccccugaggacuaguuauaagacugacuagcccgaugggccucccaacgggcccuccuccccuccuugcaccgagauuaauaaaaaaaaaaaaaaaaaaaaaaaaaaaaaaaaaaaaaaaaaaaaaaaaaaaaaaaaaaaaaaaaugcaucccccccccccccccccccccccccccccccaaaggcucuuuucagagccaccagaauu

SEQ ID NO: 13651 - RNA, 517 nt, Artificial Sequence
  mRNA product Design i-3 comprising derived and/or modified sequence from LASV(LM776-SLE-2012;Clade IV)__AIT17824__Z (opt1)
gggagaaagcuuaccaugggcaacaagcaggccaaggccagcgaggagaagaacagcccccgcgccucccugaucccggacgccacccaccucgggccccaguucugcaaguccugcugguucgagaacaagggccugguggagugcaacaaccacuaccugugccucaacugccugacccugcuccugagcgucuccaaccggugccccaucugcaagaugccccugccgacgaagcuccgccccagcaccacccccaccgcgcccccgacgggggccgccgacuccauccggcccccgcccuacagccccugaggacuaguuauaagacugacuagcccgaugggccucccaacgggcccuccuccccuccuugcaccgagauuaauaaaaaaaaaaaaaaaaaaaaaaaaaaaaaaaaaaaaaaaaaaaaaaaaaaaaaaaaaaaaaaaaugcaucccccccccccccccccccccccccccccccaaaggcucuuuucagagccaccagaauu

SEQ ID NO: 13652 - RNA, 517 nt, Artificial Sequence
  mRNA product Design i-3 comprising derived and/or modified sequence from LASV(Mad39;Clade IV)__ANH09743__Z (opt1)
gggagaaagcuuaccaugggcaacaagcaggccaaggccagcgagguggaggacgggccccgcgccucccugauccccgacgccacccaccucggcccccaguucugcaagagcugcugguucgagaacaagucccuggucgagugcaacaaccacuaccugugccucaacugccugacccugcuccugagcguguccaaccggugccccaucugcaagaugccccugccgacgcgccucaagcccagcgugguccccaccgcgcccccgacccgggccggggacggcacccgcccgccgcccuacucccccugaggacuaguuauaagacugacuagcccgaugggccucccaacgggcccuccuccccuccuugcaccgagauuaauaaaaaaaaaaaaaaaaaaaaaaaaaaaaaaaaaaaaaaaaaaaaaaaaaaaaaaaaaaaaaaaaugcaucccccccccccccccccccccccccccccccaaaggcucuuuucagagccaccagaauu

SEQ ID NO: 13653 - RNA, 517 nt, Artificial Sequence
  mRNA product Design i-3 comprising derived and/or modified sequence from LASV(Z0947-SLE-2011;Clade IV)__AIT17838__Z (opt1)
gggagaaagcuuaccaugggcaacaagcaggccaaggugcccgagagcaaggacuccccgcgcgccagccugauccccgacgcgacccaccucgggccccaguucugcaaguccugcugguucgagaacaagggccuggucgagugcaacaaccacuaccugugccucaacugccugacccugcuccugagcguguccaaccgcugccccaucugcaagaugccgcugcccacgaagcucaagcccagcgccgcccccaccgccccgcccaccggggccgcggacuccauccggcccccgcccuacagccccugaggacuaguuauaagacugacuagcccgaugggccucccaacgggcccuccuccccuccuugcaccgagauuaauaaaaaaaaaaaaaaaaaaaaaaaaaaaaaaaaaaaaaaaaaaaaaaaaaaaaaaaaaaaaaaaaugcaucccccccccccccccccccccccccccccccaaaggcucuuuucagagccaccagaauu

SEQ ID NO: 13654 - RNA, 517 nt, Artificial Sequence
  mRNA product Design i-3 comprising derived and/or modified sequence from LASV(Josiah;Clade IV)__ADY11072/NP_694871__Z (opt2)
gggagaaagcuuaccaugggcaacaagcaggccaaggcccccgaguccaaggacuccccccgcgccucccucauccccgacgccacccaccucggcccccaguucugcaaguccugcugguucgagaacaagggccucgucgagugcaacaaccacuaccucugccucaacugccucacccuccuccucuccgucuccaaccgcugccccaucugcaagaugccccuccccaccaagcuccgccccuccgccgcccccaccgccccccccaccggcgccgccgacuccauccgccccccccccuacucccccugaggacuaguuauaagacugacuagcccgaugggccucccaacgggcccuccuccccuccuugcaccgagauuaauaaaaaaaaaaaaaaaaaaaaaaaaaaaaaaaaaaaaaaaaaaaaaaaaaaaaaaaaaaaaaaaaugcaucccccccccccccccccccccccccccccccaaaggcucuuuucagagccaccagaauu

SEQ ID NO: 13655 - RNA, 520 nt, Artificial Sequence
  mRNA product Design i-3 comprising derived and/or modified sequence from LASV(Pinneo-NIG-1969;Clade I)__AIT17834__Z (opt2)
gggagaaagcuuaccaugggcaacaagcagacccgcuccccccccaagcccgagcacccccgccccacccuccuccccgacgccucccaccucggcccccaguucugcaaguccugcugguucgagaacaagggccucgucgagugcaacaaccacuaccucugccucaacugccucacccuccuccucuccgucuccgaccgcugccccaucugcaagaugccccuccccaccaagcucgccguccgcacccagcccuccgcccccccccucaaccagggcaacacccaguccucccccccccccuacucccccugaggacuaguuauaagacugacuagcccgaugggccucccaacgggcccuccuccccuccuugcaccgagauuaauaaaaaaaaaaaaaaaaaaaaaaaaaaaaaaaaaaaaaaaaaaaaaaaaaaaaaaaaaaaaaaaaugcaucccccccccccccccccccccccccccccccaaaggcucuuuucagagccaccagaauu

SEQ ID NO: 13656 - RNA, 517 nt, Artificial Sequence
  mRNA product Design i-3 comprising derived and/or modified sequence from LASV(Nig08-04;Clade II)__ADU56612__Z (opt2)
gggagaaagcuuaccaugggcaaccgccagacccgccccaccgaggccaccgagcagucccgcgcccaccucguccccgacgccucccaccucggcccccaguucugcaaguccugcugguucgagaaccgcggccucgucgagugcaacaaccacuaccucugccucaacugccucucccuccuccucuccgucuccucccgcugccccaucugcaagaugccccuccccacccgccucaaggccuccgcccagcccuccgccccccccaccgaggccccccagaacaccacccccccccccuacacccccugaggacuaguuauaagacugacuagcccgaugggccucccaacgggcccuccuccccuccuugcaccgagauuaauaaaaaaaaaaaaaaaaaaaaaaaaaaaaaaaaaaaaaaaaaaaaaaaaaaaaaaaaaaaaaaaaugcaucccccccccccccccccccccccccccccccaaaggcucuuuucagagccaccagaauu

SEQ ID NO: 13657 - RNA, 517 nt, Artificial Sequence
  mRNA product Design i-3 comprising derived and/or modified sequence from LASV(Nig08-A19;Clade III)__ADU56620__Z (opt2)
gggagaaagcuuaccaugggcggcaagcacaccaagccccagcgcgaguccaacuccccccgcgccucccucauccccgacgccacccaccucggcccccaguucugcaaguccugcugguucgagaacaagggccucgucgagugcaacaaccacuaccucugccucaacugccucacccuccuccucuccgucuccaaccgcugccccaucugcaagaugccccuccccacccgccuccgcgccuccaccaaccccaccgccccccaggucgagcaggucggccccaccaaccccccccccuacucccccugaggacuaguuauaagacugacuagcccgaugggccucccaacgggcccuccuccccuccuugcaccgagauuaauaaaaaaaaaaaaaaaaaaaaaaaaaaaaaaaaaaaaaaaaaaaaaaaaaaaaaaaaaaaaaaaaugcaucccccccccccccccccccccccccccccccaaaggcucuuuucagagccaccagaauu

SEQ ID NO: 13658 - RNA, 517 nt, Artificial Sequence
  mRNA product Design i-3 comprising derived and/or modified sequence from LASV(AV;Clade V)__CCA30312__Z (opt2)
gggagaaagcuuaccaugggcaaccgccaggccaagaaccccgaggucgagaacuccccccgcgccucccucauccccgacgccacccaccucggcccccaguucugcaaguccugcugguucgagaacaagggccucgucgagugcaacaaccacuaccucugccucaacugccucucccuccuccucuccgucuccaaccgcugccccaucugcaagaugccccuccccacccgccuccgccccaccaccacccccaccgccccccagaucaucaaggagaacaccaccaaccccccccccuacacccccugaggacuaguuauaagacugacuagcccgaugggccucccaacgggcccuccuccccuccuugcaccgagauuaauaaaaaaaaaaaaaaaaaaaaaaaaaaaaaaaaaaaaaaaaaaaaaaaaaaaaaaaaaaaaaaaaugcaucccccccccccccccccccccccccccccccaaaggcucuuuucagagccaccagaauu

SEQ ID NO: 13659 - RNA, 517 nt, Artificial Sequence
  mRNA product Design i-3 comprising derived and/or modified sequence from LASV(Togo/2016/7082;Clade VI)__AMR44579__Z (opt2)
gggagaaagcuuaccaugggcgcccgccagaccaagcagccccagaucgagggcuccccccgcgccucccucguccccgacgccucccaccucggcccccaguucugcaaguccugcugguucgagaacaagggccucgucgagugcaacaaccacuaccucugccucaacugccucucccuccuccucuccgucuccaaccgcugccccaucugcaagaugccccuccccaccaagcuccgcgucuccuccgcccccuccgccccccccgccgccaccgcccagcccggcacccccccccccuacucccccugaggacuaguuauaagacugacuagcccgaugggccucccaacgggcccuccuccccuccuugcaccgagauuaauaaaaaaaaaaaaaaaaaaaaaaaaaaaaaaaaaaaaaaaaaaaaaaaaaaaaaaaaaaaaaaaaugcaucccccccccccccccccccccccccccccccaaaggcucuuuucagagccaccagaauu

SEQ ID NO: 13660 - RNA, 517 nt, Artificial Sequence
  mRNA product Design i-3 comprising derived and/or modified sequence from LASV(KAK-428;Clade n.d. (VII))__ANH09761__Z (opt2)
gggagaaagcuuaccaugggcaacaagggcaccaagcccacccagaacuccgagcccucccgcgccaaccucguccccgacgccuccuaccucggcccccaguucugcaaguccugcugguucgagaacaagggccucgucgagugcaacaaccacuaccucugccucaacugccucaccaugcuccucuccgucuccaaccgcugccccaucugcaagaugccccuccccaccaagaucaaggccuccggcucccccuccgccccccccaccgaggccaacuccgccgucucccccccccccuacacccccugaggacuaguuauaagacugacuagcccgaugggccucccaacgggcccuccuccccuccuugcaccgagauuaauaaaaaaaaaaaaaaaaaaaaaaaaaaaaaaaaaaaaaaaaaaaaaaaaaaaaaaaaaaaaaaaaugcaucccccccccccccccccccccccccccccccaaaggcucuuuucagagccaccagaauu

SEQ ID NO: 13661 - RNA, 517 nt, Artificial Sequence
  mRNA product Design i-3 comprising derived and/or modified sequence from LASV(ISTH0009-NIG-2011;Clade II)__AIT17402__Z (opt2)
gggagaaagcuuaccaugggcaaccgccaggccaaguccaccaaggucgacgagcaccagcgcgcccaccucguccccgacgccucccaccucggcccccaguucugcaaguccugcugguucgagaaccgcggccucgucgagugcaacaaccacuaccucugccucaacugccucucccuccuccucuccgucuccucccgcugccccaucugcaagaugccccuccccaccaagcucaaggccgccgcccagcccuccgcccccuccaccgagaccauccagaacaccacccccccccccuacacccccugaggacuaguuauaagacugacuagcccgaugggccucccaacgggcccuccuccccuccuugcaccgagauuaauaaaaaaaaaaaaaaaaaaaaaaaaaaaaaaaaaaaaaaaaaaaaaaaaaaaaaaaaaaaaaaaaugcaucccccccccccccccccccccccccccccccaaaggcucuuuucagagccaccagaauu

SEQ ID NO: 13662 - RNA, 517 nt, Artificial Sequence
  mRNA product Design i-3 comprising derived and/or modified sequence from LASV(ISTH2010-NIG-2012;Clade II)__AIT17480__Z (opt2)
gggagaaagcuuaccaugggcaaccgccacgccaaguccaccaaggucgacgagcaccagcgcgcccaccucguccccgacgccucccaccucggcccccaguucugcaaguccugcugguucgagaaccgcggccucgucgagugcaacaaccacuaccucugccucaacugccucucccuccuccucuccgucuccucccgcugccccaucugcaagaugccccuccccaccaagcucaaggccgccgcccagcccuccgcccccuccaccgaggucauccaguccaccacccccccccccuacacccccugaggacuaguuauaagacugacuagcccgaugggccucccaacgggcccuccuccccuccuugcaccgagauuaauaaaaaaaaaaaaaaaaaaaaaaaaaaaaaaaaaaaaaaaaaaaaaaaaaaaaaaaaaaaaaaaaugcaucccccccccccccccccccccccccccccccaaaggcucuuuucagagccaccagaauu

SEQ ID NO: 13663 - RNA, 517 nt, Artificial Sequence
  mRNA product Design i-3 comprising derived and/or modified sequence from LASV(Lassa virus/H.sapiens-wt/NGA/2016/ISTH_0017;Clade II)__AVO03713__Z (opt2)
gggagaaagcuuaccaugggcaaccgccaggccaaguccaccaaggucgacgagcaccagcgcgcccaccucguccccgacgccucccaccucggcccccaguucugcaaguccugcugguucgagaaccgcggccucgucgagugcaacaaccacuaccucugccucaacugccucucccuccuccucuccgucuccucccgcugccccaucugcaagaugccccuccccaccaagcucaaggccgccacccagcccuccgcccccuccaccgaggucaaccagaacaccacccccccccccuacacccccugaggacuaguuauaagacugacuagcccgaugggccucccaacgggcccuccuccccuccuugcaccgagauuaauaaaaaaaaaaaaaaaaaaaaaaaaaaaaaaaaaaaaaaaaaaaaaaaaaaaaaaaaaaaaaaaaugcaucccccccccccccccccccccccccccccccaaaggcucuuuucagagccaccagaauu

SEQ ID NO: 13664 - RNA, 517 nt, Artificial Sequence
  mRNA product Design i-3 comprising derived and/or modified sequence from LASV(Lassa virus/H.sapiens-wt/NGA/2018/ISTH_0959;Clade II)__AVV65084__Z (opt2)
gggagaaagcuuaccaugggcaacaagcaggccaaguccaccaaggucgacgagcaccagcgcgcccaccucguccccgacgccucccaccucggcccccaguucugcaaguccugcugguucgagaaccgcggccucgucgagugcaacaaccacuaccucugccucaacugccucucccuccuccucuccgucuccucccgcugccccaucugcaagaugccccuccccaccaagcucaaggccgccgcccagcccuccgcccccuccaccgaggccauccaguccaccacccccccccccuacacccccugaggacuaguuauaagacugacuagcccgaugggccucccaacgggcccuccuccccuccuugcaccgagauuaauaaaaaaaaaaaaaaaaaaaaaaaaaaaaaaaaaaaaaaaaaaaaaaaaaaaaaaaaaaaaaaaaugcaucccccccccccccccccccccccccccccccaaaggcucuuuucagagccaccagaauu

SEQ ID NO: 13665 - RNA, 517 nt, Artificial Sequence
  mRNA product Design i-3 comprising derived and/or modified sequence from LASV(LASV003-NIG-2008;Clade II)__AIT17578__Z (opt2)
gggagaaagcuuaccaugggcaaccgccaggccaaguccaccaaggucgacgagcaccagcgcgcccaccucguccccgacgccucccaccucggcccccaguucugcaaguccugcugguucgagaacaagggccucgucgagugcaacaaccacuaccucugccucaacugccucucccuccuccucuccgucuccucccgcugccccaucugcaagaugccccuccccaccaagcuccgcgccgccgcccagcccuccgcccccuccaccgaguccgcccagaacaccgcccccccccccuacgcccccugaggacuaguuauaagacugacuagcccgaugggccucccaacgggcccuccuccccuccuugcaccgagauuaauaaaaaaaaaaaaaaaaaaaaaaaaaaaaaaaaaaaaaaaaaaaaaaaaaaaaaaaaaaaaaaaaugcaucccccccccccccccccccccccccccccccaaaggcucuuuucagagccaccagaauu

SEQ ID NO: 13666 - RNA, 517 nt, Artificial Sequence
  mRNA product Design i-3 comprising derived and/or modified sequence from LASV(LASV035-NIG-2009;Clade II)__AIT17586__Z (opt2)
gggagaaagcuuaccaugggcaacaagcaggccaaguccaccaaggucgacgagcaccagcgcgcccaccucguccccgacgccucccaccucggcccccaguucugcaaguccugcugguucgagaaccgcggccucgucgagugcaacaaccacuaccucugccucaacugccucucccuccuccucuccgucuccucccgcugccccaucugcaagaugccccuccccacccgccucaaggccgccgcccagcccuccgcccccuccaccgaggucacccagaacaccacccccccccccuacacccccugaggacuaguuauaagacugacuagcccgaugggccucccaacgggcccuccuccccuccuugcaccgagauuaauaaaaaaaaaaaaaaaaaaaaaaaaaaaaaaaaaaaaaaaaaaaaaaaaaaaaaaaaaaaaaaaaugcaucccccccccccccccccccccccccccccccaaaggcucuuuucagagccaccagaauu

SEQ ID NO: 13667 - RNA, 517 nt, Artificial Sequence
  mRNA product Design i-3 comprising derived and/or modified sequence from LASV(LASV1000-NIG-2009;Clade II)__AIT17780__Z (opt2)
gggagaaagcuuaccaugggcaaccgccagaccaaguccaccaaggucgacgagcaccagcgcgccuaccucguccccgacgccucccuccucggcccccaguucugcaaguccugcugguucgagaacaagggccucgucgagugcaacaaccacuaccucugccucaacugccucucccuccuccucuccgucuccucccgcugccccaucugcaagaugccccuccccacccgccucaaggccgccgcccagcccuccgccccccccaccgaggccauccagaacaccacccccccccccuacacccccugaggacuaguuauaagacugacuagcccgaugggccucccaacgggcccuccuccccuccuugcaccgagauuaauaaaaaaaaaaaaaaaaaaaaaaaaaaaaaaaaaaaaaaaaaaaaaaaaaaaaaaaaaaaaaaaaugcaucccccccccccccccccccccccccccccccaaaggcucuuuucagagccaccagaauu

SEQ ID NO: 13668 - RNA, 517 nt, Artificial Sequence
  mRNA product Design i-3 comprising derived and/or modified sequence from LASV(LASV221-NIG-2010;Clade II)__AIT17622__Z (opt2)
gggagaaagcuuaccaugggcaaccgccaggccaaguccaccaaggucgacgagcaccagcgcgcccaccucguccccgacgccucccaccucggcccccaguucugcaaguccugcugguucgagaaccgcggccucgucgagugcaacaaccacuaccucugccucaacugccucucccuccuccucuccgucuccucccgcugccccaucugcaagaugccccuccccaccaagcucaaggccgccacccagcccuccgcccccuccaccgaggucacccagaacaccauccccccccccuacucccccugaggacuaguuauaagacugacuagcccgaugggccucccaacgggcccuccuccccuccuugcaccgagauuaauaaaaaaaaaaaaaaaaaaaaaaaaaaaaaaaaaaaaaaaaaaaaaaaaaaaaaaaaaaaaaaaaugcaucccccccccccccccccccccccccccccccaaaggcucuuuucagagccaccagaauu

SEQ ID NO: 13669 - RNA, 517 nt, Artificial Sequence
  mRNA product Design i-3 comprising derived and/or modified sequence from LASV(LASV237-NIG-2010;Clade II)__AIT17636__Z (opt2)
gggagaaagcuuaccaugggcaaccgccaggccaaguccaccaaggucgacgagcaccagcgcgcccaccucguccccgacgccucccaccucggcccccaguucugcaaguccugcugguucgagaaccgcggccucgucgagugcaacaaccacuaccucugccucaacugccucucccuccuccucuccgucuccucccgcugccccaucugcaagaugccccuccccaccaagcucaaggccgccgcccagcccuccgcccccuccaucgagaccauccagaacaccacccccccccccuacacccccugaggacuaguuauaagacugacuagcccgaugggccucccaacgggcccuccuccccuccuugcaccgagauuaauaaaaaaaaaaaaaaaaaaaaaaaaaaaaaaaaaaaaaaaaaaaaaaaaaaaaaaaaaaaaaaaaugcaucccccccccccccccccccccccccccccccaaaggcucuuuucagagccaccagaauu

SEQ ID NO: 13670 - RNA, 517 nt, Artificial Sequence
  mRNA product Design i-3 comprising derived and/or modified sequence from LASV(LASV253-NIG-2011;Clade II)__AIT17668__Z (opt2)
gggagaaagcuuaccaugggcaaccgccaggccaaguccaccaaggucgacgagcaccagcgcgcccaccucguccccgacgccucccaccucggcccccaguucugcaaguccugcugguucgagaacaagggccucgucgagugcaacaaccacuaccucugccucaacugccucucccuccuccucuccgucuccucccgcugccccaucugcaagaugccccuccccaccaagcucaagaccaccgcccagcccuccgccccccccaccgaggccgccaagaacaccgcccccccccccuacgcccccugaggacuaguuauaagacugacuagcccgaugggccucccaacgggcccuccuccccuccuugcaccgagauuaauaaaaaaaaaaaaaaaaaaaaaaaaaaaaaaaaaaaaaaaaaaaaaaaaaaaaaaaaaaaaaaaaugcaucccccccccccccccccccccccccccccccaaaggcucuuuucagagccaccagaauu

SEQ ID NO: 13671 - RNA, 517 nt, Artificial Sequence
  mRNA product Design i-3 comprising derived and/or modified sequence from LASV(G1180-SLE-2010;Clade IV)__AIT17166__Z (opt2)
gggagaaagcuuaccaugggcaacaagcaggccaaggcccccgaggccaaggacuccccccgcgccucccucauccccgacgccacccaccucggcccccaguucugcaaguccugcugguucgagaccaagggccucgucgagugcaacaaccacuaccucugccucaacugccucacccuccuccucuccgucuccaaccgcugccccaucugcaagaugccccuccccaccaagcuccgccccuccgccacccccaccgccccccccaccgaggccgccgacuccaucggccccccccccuacucccccugaggacuaguuauaagacugacuagcccgaugggccucccaacgggcccuccuccccuccuugcaccgagauuaauaaaaaaaaaaaaaaaaaaaaaaaaaaaaaaaaaaaaaaaaaaaaaaaaaaaaaaaaaaaaaaaaugcaucccccccccccccccccccccccccccccccaaaggcucuuuucagagccaccagaauu

SEQ ID NO: 13672 - RNA, 517 nt, Artificial Sequence
  mRNA product Design i-3 comprising derived and/or modified sequence from LASV(G1442-SLE-2011;Clade IV)__AIT17178__Z (opt2)
gggagaaagcuuaccaugggcaacaagcaggccaaggccuccgaggccaaggacuccccccgcgccucccucauccccgacgccacccaccucggcccccaguucugcaaguccugcugguucgagaacaagggccucgucgagugcaacaaccacuaccucugccucaacugccucucccuccuccucuccgucuccucccgcugccccaucugcaagaugccccuccccacccgccuccgccccuccaccgcccccaccgccccccccgcccgcgccggcgacaacaucaagcccccccccuacucccccugaggacuaguuauaagacugacuagcccgaugggccucccaacgggcccuccuccccuccuugcaccgagauuaauaaaaaaaaaaaaaaaaaaaaaaaaaaaaaaaaaaaaaaaaaaaaaaaaaaaaaaaaaaaaaaaaugcaucccccccccccccccccccccccccccccccaaaggcucuuuucagagccaccagaauu

SEQ ID NO: 13673 - RNA, 517 nt, Artificial Sequence
  mRNA product Design i-3 comprising derived and/or modified sequence from LASV(G502-SLE-2009;Clade IV)__AIT17124__Z (opt2)
gggagaaagcuuaccaugggcaacaagcaggucaagacccccgaggccaaggacuccccccgcgccucccucauccccgacgccacccaccucggcccccaguucugcaaguccugcugguucgagaacaagggccucgucgagugcaacaaccacuaccucugccucaacugccucacccuccuccucuccgucggcaaccgcugccccaucugcaagaugccccuccccaccaagcuccgccccuccgucacccccaccgccccccccacccgcgccgccgacuccaucggccccccccccuacucccccugaggacuaguuauaagacugacuagcccgaugggccucccaacgggcccuccuccccuccuugcaccgagauuaauaaaaaaaaaaaaaaaaaaaaaaaaaaaaaaaaaaaaaaaaaaaaaaaaaaaaaaaaaaaaaaaaugcaucccccccccccccccccccccccccccccccaaaggcucuuuucagagccaccagaauu

SEQ ID NO: 13674 - RNA, 517 nt, Artificial Sequence
  mRNA product Design i-3 comprising derived and/or modified sequence from LASV(G733-SLE-2010;Clade IV)__AIT17152__Z (opt2)
gggagaaagcuuaccaugggcaacaagcaggccaagacccccgagaccaaggacuccccccgcgccucccucauccccgacgccacccaccucggcccccaguucugcaaguccugcugguucgagaacaagggccucgucgagugcaacaaccacuaccucugccucaacugccucacccuccuccucuccgucuccaaccgcugccccaucugcaagaugccccuccccaccaagcuccgccccuccaccgcccccaccgccccccccgccggcgccgccgacaacacccgccccccccccuacucccccugaggacuaguuauaagacugacuagcccgaugggccucccaacgggcccuccuccccuccuugcaccgagauuaauaaaaaaaaaaaaaaaaaaaaaaaaaaaaaaaaaaaaaaaaaaaaaaaaaaaaaaaaaaaaaaaaugcaucccccccccccccccccccccccccccccccaaaggcucuuuucagagccaccagaauu

SEQ ID NO: 13675 - RNA, 529 nt, Artificial Sequence
  mRNA product Design i-3 comprising derived and/or modified sequence from MOPV/LASV reassortant(IGS-1;Clade IV)__AFY05533__Z (opt2)
gggagaaagcuuaccaugggcaagacccaguccaagggccagcccuccaccaaccuccucaaggagaccgagccccgccaccccgucauccccgacgcccgcggcaccggccccgaguucugcaaguccugcugguucgagcgccgcggccucguccgcugcaacgaccacuaccucugccucaacugccucacccuccuccacaccgucuccgaccgcugccccaucugcaagcacaagcuccccuuccgccucgagcuccagacccagcccaccgccccccccgagaucccccccucccagaaccccccccccuacucccccugaggacuaguuauaagacugacuagcccgaugggccucccaacgggcccuccuccccuccuugcaccgagauuaauaaaaaaaaaaaaaaaaaaaaaaaaaaaaaaaaaaaaaaaaaaaaaaaaaaaaaaaaaaaaaaaaugcaucccccccccccccccccccccccccccccccaaaggcucuuuucagagccaccagaauu

SEQ ID NO: 13676 - RNA, 517 nt, Artificial Sequence
  mRNA product Design i-3 comprising derived and/or modified sequence from LASV(LM776-SLE-2012;Clade IV)__AIT17824__Z (opt2)
gggagaaagcuuaccaugggcaacaagcaggccaaggccuccgaggagaagaacuccccccgcgccucccucauccccgacgccacccaccucggcccccaguucugcaaguccugcugguucgagaacaagggccucgucgagugcaacaaccacuaccucugccucaacugccucacccuccuccucuccgucuccaaccgcugccccaucugcaagaugccccuccccaccaagcuccgccccuccaccacccccaccgccccccccaccggcgccgccgacuccauccgccccccccccuacucccccugaggacuaguuauaagacugacuagcccgaugggccucccaacgggcccuccuccccuccuugcaccgagauuaauaaaaaaaaaaaaaaaaaaaaaaaaaaaaaaaaaaaaaaaaaaaaaaaaaaaaaaaaaaaaaaaaugcaucccccccccccccccccccccccccccccccaaaggcucuuuucagagccaccagaauu

SEQ ID NO: 13677 - RNA, 517 nt, Artificial Sequence
  mRNA product Design i-3 comprising derived and/or modified sequence from LASV(Mad39;Clade IV)__ANH09743__Z (opt2)
gggagaaagcuuaccaugggcaacaagcaggccaaggccuccgaggucgaggacggcccccgcgccucccucauccccgacgccacccaccucggcccccaguucugcaaguccugcugguucgagaacaagucccucgucgagugcaacaaccacuaccucugccucaacugccucacccuccuccucuccgucuccaaccgcugccccaucugcaagaugccccuccccacccgccucaagcccuccgucguccccaccgccccccccacccgcgccggcgacggcacccgccccccccccuacucccccugaggacuaguuauaagacugacuagcccgaugggccucccaacgggcccuccuccccuccuugcaccgagauuaauaaaaaaaaaaaaaaaaaaaaaaaaaaaaaaaaaaaaaaaaaaaaaaaaaaaaaaaaaaaaaaaaugcaucccccccccccccccccccccccccccccccaaaggcucuuuucagagccaccagaauu

SEQ ID NO: 13678 - RNA, 517 nt, Artificial Sequence
  mRNA product Design i-3 comprising derived and/or modified sequence from LASV(Z0947-SLE-2011;Clade IV)__AIT17838__Z (opt2)
gggagaaagcuuaccaugggcaacaagcaggccaagguccccgaguccaaggacuccccccgcgccucccucauccccgacgccacccaccucggcccccaguucugcaaguccugcugguucgagaacaagggccucgucgagugcaacaaccacuaccucugccucaacugccucacccuccuccucuccgucuccaaccgcugccccaucugcaagaugccccuccccaccaagcucaagcccuccgccgcccccaccgccccccccaccggcgccgccgacuccauccgccccccccccuacucccccugaggacuaguuauaagacugacuagcccgaugggccucccaacgggcccuccuccccuccuugcaccgagauuaauaaaaaaaaaaaaaaaaaaaaaaaaaaaaaaaaaaaaaaaaaaaaaaaaaaaaaaaaaaaaaaaaugcaucccccccccccccccccccccccccccccccaaaggcucuuuucagagccaccagaauu

SEQ ID NO: 13679 - RNA, 517 nt, Artificial Sequence
  mRNA product Design i-3 comprising derived and/or modified sequence from LASV(Josiah;Clade IV)__ADY11072/NP_694871__Z (opt3)
gggagaaagcuuaccaugggcaacaagcaggccaaggcucccgagagcaaggacuccccuagagcaucucugaucccagaugccacccaccucgggccgcaauucugcaaaucauguugguuugaaaauaagggacuuguggagugcaacaaucauuaccuguguuugaacugcuuaacacugcuacucagugucagcaauaggugucccauuugcaaaaugccucugccaacuaaacuucggcccuccgcggcuccuacggccccacccaccggugcagccgacucuauacgcccuccaccguauucgcccugaggacuaguuauaagacugacuagcccgaugggccucccaacgggcccuccuccccuccuugcaccgagauuaauaaaaaaaaaaaaaaaaaaaaaaaaaaaaaaaaaaaaaaaaaaaaaaaaaaaaaaaaaaaaaaaaugcaucccccccccccccccccccccccccccccccaaaggcucuuuucagagccaccagaauu

SEQ ID NO: 13680 - RNA, 520 nt, Artificial Sequence
  mRNA product Design i-3 comprising derived and/or modified sequence from LASV(Pinneo-NIG-1969;Clade I)__AIT17834__Z (opt3)
gggagaaagcuuaccaugggcaacaagcagaccagaagcccucccaaaccagagcacccgaggcccacacugcucccugacgccucccaucuugggccacaauucugcaagucuuguugguuugaaaauaaaggacugguggagugcaacaaucacuacuuguguuuaaacugccugacucuacuccugucagucagugaucggugucccaucugcaagaugccucuuccaacgaaacuggcuguucgcacccagcccagcgcaccuccauugaaucaggguaacacacaguccucuccgcccccuuauucgccaugaggacuaguuauaagacugacuagcccgaugggccucccaacgggcccuccuccccuccuugcaccgagauuaauaaaaaaaaaaaaaaaaaaaaaaaaaaaaaaaaaaaaaaaaaaaaaaaaaaaaaaaaaaaaaaaaugcaucccccccccccccccccccccccccccccccaaaggcucuuuucagagccaccagaauu

SEQ ID NO: 13681 - RNA, 517 nt, Artificial Sequence
  mRNA product Design i-3 comprising derived and/or modified sequence from LASV(Nig08-04;Clade II)__ADU56612__Z (opt3)
gggagaaagcuuaccaugggcaacagacagaccaggcccacagaggccacugaacaaagccgggcucaccuggugccugacgcaucccaucucgggccacaguucugcaagucuuguugguuugagaaucgcggacuugucgaaugcaacaaucacuaccuguguuugaacugcuuaucacugcuacucaguguuagcucccgauguccgaucugcaaaaugccccugccuacgcgucuuaaggccucugcgcagccaucggcucccccuaccgaggccccacagaauacaacucccccuccauauaccccgugaggacuaguuauaagacugacuagcccgaugggccucccaacgggcccuccuccccuccuugcaccgagauuaauaaaaaaaaaaaaaaaaaaaaaaaaaaaaaaaaaaaaaaaaaaaaaaaaaaaaaaaaaaaaaaaaugcaucccccccccccccccccccccccccccccccaaaggcucuuuucagagccaccagaauu

SEQ ID NO: 13682 - RNA, 517 nt, Artificial Sequence
  mRNA product Design i-3 comprising derived and/or modified sequence from LASV(Nig08-A19;Clade III)__ADU56620__Z (opt3)
gggagaaagcuuaccaugggcgggaagcacaccaaaccccagagagagagcaacuccccuagggccucucugaucccagacgcuacacaucucggaccgcaauucugcaagucauguugguuugaaaauaaaggucuuguggagugcaacaaucacuaccuguguuugaacugcuuaacucugcuacucagugucagcaaucggugucccauuugcaagaugccucugccaacgcgccuucgagcauccaccaaccccacagccccucagguugaacaggugggcccaacuaaucccccuccauauucuccgugaggacuaguuauaagacugacuagcccgaugggccucccaacgggcccuccuccccuccuugcaccgagauuaauaaaaaaaaaaaaaaaaaaaaaaaaaaaaaaaaaaaaaaaaaaaaaaaaaaaaaaaaaaaaaaaaugcaucccccccccccccccccccccccccccccccaaaggcucuuuucagagccaccagaauu

SEQ ID NO: 13683 - RNA, 517 nt, Artificial Sequence
  mRNA product Design i-3 comprising derived and/or modified sequence from LASV(AV;Clade V)__CCA30312__Z (opt3)
gggagaaagcuuaccaugggcaacagacaggccaagaaucccgagguggaaaacagcccuagggcuucccugaucccagacgcaacccaccucgggccgcaauucugcaaaucuuguugguuugagaauaagggacuugucgaaugcaacaaucauuaccuguguuugaacugcuuaucacugcuacucaguguuagcaaucggugucccauuugcaaaaugccucugccaacacgccuucgacccacuacgaccccuacagccccacagauaaucaaggagaacacuaccaaucccccuccauauacaccgugaggacuaguuauaagacugacuagcccgaugggccucccaacgggcccuccuccccuccuugcaccgagauuaauaaaaaaaaaaaaaaaaaaaaaaaaaaaaaaaaaaaaaaaaaaaaaaaaaaaaaaaaaaaaaaaaugcaucccccccccccccccccccccccccccccccaaaggcucuuuucagagccaccagaauu

SEQ ID NO: 13684 - RNA, 517 nt, Artificial Sequence
  mRNA product Design i-3 comprising derived and/or modified sequence from LASV(Togo/2016/7082;Clade VI)__AMR44579__Z (opt3)
gggagaaagcuuaccaugggcgccagacagaccaagcaaccccagaucgaggggagcccuagggcuucccuggugccagacgcaucucaccucggaccgcaguucugcaagucauguugguuugaaaacaagggucuugucgagugcaauaaccauuaccuguguuugaauugcuuaagucugcuacucagcguuuccaaccggugucccauuugcaaaaugccucugccaacaaaacuucgcgugucuucggcccccucagcgccuccagcugccacugcacagcccggcacgccuccaccguauagccccugaggacuaguuauaagacugacuagcccgaugggccucccaacgggcccuccuccccuccuugcaccgagauuaauaaaaaaaaaaaaaaaaaaaaaaaaaaaaaaaaaaaaaaaaaaaaaaaaaaaaaaaaaaaaaaaaugcaucccccccccccccccccccccccccccccccaaaggcucuuuucagagccaccagaauu

SEQ ID NO: 13685 - RNA, 517 nt, Artificial Sequence
  mRNA product Design i-3 comprising derived and/or modified sequence from LASV(KAK-428;Clade n.d. (VII))__ANH09761__Z (opt3)
gggagaaagcuuaccaugggcaacaaggggaccaaacccacacagaauagcgagccuuccagagccaaccuggugccagacgcuucuuaccucggaccgcaauucugcaagucauguugguuugaaaauaaaggucuugucgagugcaacaaucacuaucuguguuugaacugcuuaacuaugcugcuaaguguuagcaauaggugucccaucugcaagaugccucucccaacgaaaauuaaggcauccggcucucccucggccccuccaaccgaagcgaacucagcugugagcccucccccauacacaccgugaggacuaguuauaagacugacuagcccgaugggccucccaacgggcccuccuccccuccuugcaccgagauuaauaaaaaaaaaaaaaaaaaaaaaaaaaaaaaaaaaaaaaaaaaaaaaaaaaaaaaaaaaaaaaaaaugcaucccccccccccccccccccccccccccccccaaaggcucuuuucagagccaccagaauu

SEQ ID NO: 13686 - RNA, 517 nt, Artificial Sequence
  mRNA product Design i-3 comprising derived and/or modified sequence from LASV(ISTH0009-NIG-2011;Clade II)__AIT17402__Z (opt3)
gggagaaagcuuaccaugggcaacagacaggccaagagcaccaaaguggacgagcaccaaagggcucaucugguccccgaugcaucccaccucgggccucaguucugcaagucuuguugguuugaaaaucggggacuuguugagugcaacaaucauuaccuguguuugaacugcuuaucacugcuacucagugugagcucccgcuguccaaucugcaaaaugccgcugcccacaaaacuuaaggccgcggcucagccuucugccccaucgacugaaacgauucagaauaccacacccccuccauauacucccugaggacuaguuauaagacugacuagcccgaugggccucccaacgggcccuccuccccuccuugcaccgagauuaauaaaaaaaaaaaaaaaaaaaaaaaaaaaaaaaaaaaaaaaaaaaaaaaaaaaaaaaaaaaaaaaaugcaucccccccccccccccccccccccccccccccaaaggcucuuuucagagccaccagaauu

SEQ ID NO: 13687 - RNA, 517 nt, Artificial Sequence
  mRNA product Design i-3 comprising derived and/or modified sequence from LASV(ISTH2010-NIG-2012;Clade II)__AIT17480__Z (opt3)
gggagaaagcuuaccaugggcaacagacacgccaagagcaccaaaguggacgagcaucagagggcucaccugguccccgaugcaucccaucucgggccucaauucugcaagucuuguugguuugaaaaucggggacuuguugagugcaacaaucacuaccuguguuugaacugcuuaucacugcuacucagugugagcucccgcuguccaaucugcaaaaugccgcugcccacaaaacuuaaggccgcggcucagccuucugccccaucgacugaaguaauucagucaacgacacccccuccauauacccccugaggacuaguuauaagacugacuagcccgaugggccucccaacgggcccuccuccccuccuugcaccgagauuaauaaaaaaaaaaaaaaaaaaaaaaaaaaaaaaaaaaaaaaaaaaaaaaaaaaaaaaaaaaaaaaaaugcaucccccccccccccccccccccccccccccccaaaggcucuuuucagagccaccagaauu

SEQ ID NO: 13688 - RNA, 517 nt, Artificial Sequence
  mRNA product Design i-3 comprising derived and/or modified sequence from LASV(Lassa virus/H.sapiens-wt/NGA/2016/ISTH_0017;Clade II)__AVO03713__Z (opt3)
gggagaaagcuuaccaugggcaacagacaggccaagagcaccaaaguggacgagcaccaaagggcucaucugguccccgaugcaucccaccucgggccucaguucugcaagucuuguugguuugaaaaucggggacuuguugagugcaacaaucauuaccuguguuugaacugcuuaucacugcuacucagugugagcucccgcuguccaaucugcaaaaugccgcugcccacaaaacuuaaggccgcgacucagccuucugcuccaucgacggaaguaaaucagaacaccacacccccuccauauacucccugaggacuaguuauaagacugacuagcccgaugggccucccaacgggcccuccuccccuccuugcaccgagauuaauaaaaaaaaaaaaaaaaaaaaaaaaaaaaaaaaaaaaaaaaaaaaaaaaaaaaaaaaaaaaaaaaugcaucccccccccccccccccccccccccccccccaaaggcucuuuucagagccaccagaauu

SEQ ID NO: 13689 - RNA, 517 nt, Artificial Sequence
  mRNA product Design i-3 comprising derived and/or modified sequence from LASV(Lassa virus/H.sapiens-wt/NGA/2018/ISTH_0959;Clade II)__AVV65084__Z (opt3)
gggagaaagcuuaccaugggcaacaagcaggccaaaagcaccaagguggacgagcaccaaagagcucaucugguccccgaugcaucccaccucgggccucaguucugcaaaucuuguugguuugaaaauaggggacuuguugagugcaacaaucauuaccuguguuugaacugcuuaucacugcuacucagugugagcucccgguguccaaucugcaagaugccgcugcccacaaaacuuaaggccgcggcucagccuucugccccaucgacugaagcaauucagucaacgacacccccuccauauacccccugaggacuaguuauaagacugacuagcccgaugggccucccaacgggcccuccuccccuccuugcaccgagauuaauaaaaaaaaaaaaaaaaaaaaaaaaaaaaaaaaaaaaaaaaaaaaaaaaaaaaaaaaaaaaaaaaugcaucccccccccccccccccccccccccccccccaaaggcucuuuucagagccaccagaauu

SEQ ID NO: 13690 - RNA, 517 nt, Artificial Sequence
  mRNA product Design i-3 comprising derived and/or modified sequence from LASV(LASV003-NIG-2008;Clade II)__AIT17578__Z (opt3)
gggagaaagcuuaccaugggcaacagacaggccaagagcaccaaaguggacgagcaccaaagggcucaucugguccccgaugcaucccaccucgggccucaguucugcaagucuuguugguuugaaaauaaaggacuuguugagugcaacaaucauuaccuguguuugaacugcuuaucacugcuacucagugugagcucccgguguccaaucugcaagaugccgcugcccacaaaacuucgcgccgcggcucagccuucugccccaucgacugaaucagcacagaauacggcucccccuccauaugcccccugaggacuaguuauaagacugacuagcccgaugggccucccaacgggcccuccuccccuccuugcaccgagauuaauaaaaaaaaaaaaaaaaaaaaaaaaaaaaaaaaaaaaaaaaaaaaaaaaaaaaaaaaaaaaaaaaugcaucccccccccccccccccccccccccccccccaaaggcucuuuucagagccaccagaauu

SEQ ID NO: 13691 - RNA, 517 nt, Artificial Sequence
  mRNA product Design i-3 comprising derived and/or modified sequence from LASV(LASV035-NIG-2009;Clade II)__AIT17586__Z (opt3)
gggagaaagcuuaccaugggcaacaagcaggccaaaagcaccaagguggacgagcaccaaagagcucaucugguccccgaugcaucccaccucgggccucaguucugcaaaucuuguugguuugaaaauaggggacuuguugagugcaacaaucauuaccuguguuugaacugcuuaucacugcuacucagugugagcucccgguguccaaucugcaagaugccgcugcccacacgccuuaaagccgcggcucagccuucugccccaucgacugaaguaacgcagaauaccacacccccuccauauacucccugaggacuaguuauaagacugacuagcccgaugggccucccaacgggcccuccuccccuccuugcaccgagauuaauaaaaaaaaaaaaaaaaaaaaaaaaaaaaaaaaaaaaaaaaaaaaaaaaaaaaaaaaaaaaaaaaugcaucccccccccccccccccccccccccccccccaaaggcucuuuucagagccaccagaauu

SEQ ID NO: 13692 - RNA, 517 nt, Artificial Sequence
  mRNA product Design i-3 comprising derived and/or modified sequence from LASV(LASV1000-NIG-2009;Clade II)__AIT17780__Z (opt3)
gggagaaagcuuaccaugggcaacagacagaccaagagcacaaaaguggacgagcaccaaagggccuaccugguccccgaugcuucccuccuugggccucaguucugcaagucuuguugguuugaaaauaaaggacugguugagugcaacaaucauuauuuguguuuaaacugccugucacuacuccugagugugagcucccgguguccaaucugcaagaugccgcuucccacucgccugaaagcagccgcgcagccuucugcuccacccacggaagccauucagaauaccacaccuccacccuacacuccuugaggacuaguuauaagacugacuagcccgaugggccucccaacgggcccuccuccccuccuugcaccgagauuaauaaaaaaaaaaaaaaaaaaaaaaaaaaaaaaaaaaaaaaaaaaaaaaaaaaaaaaaaaaaaaaaaugcaucccccccccccccccccccccccccccccccaaaggcucuuuucagagccaccagaauu

SEQ ID NO: 13693 - RNA, 517 nt, Artificial Sequence
  mRNA product Design i-3 comprising derived and/or modified sequence from LASV(LASV221-NIG-2010;Clade II)__AIT17622__Z (opt3)
gggagaaagcuuaccaugggcaacagacaggccaagagcaccaaaguggacgagcaccaaagggcucaucugguccccgaugcaucccaccucgggccucaguucugcaagucuuguugguuugaaaaucggggacuuguugagugcaacaaucauuaccuguguuugaacugcuuaucacugcuacucagugugagcucccgcuguccaaucugcaaaaugccgcugcccacaaaacuuaaggccgcgacucagccuucugcuccaucgacggaaguaacccagaauacaauucccccuccauauucacccugaggacuaguuauaagacugacuagcccgaugggccucccaacgggcccuccuccccuccuugcaccgagauuaauaaaaaaaaaaaaaaaaaaaaaaaaaaaaaaaaaaaaaaaaaaaaaaaaaaaaaaaaaaaaaaaaugcaucccccccccccccccccccccccccccccccaaaggcucuuuucagagccaccagaauu

SEQ ID NO: 13694 - RNA, 517 nt, Artificial Sequence
  mRNA product Design i-3 comprising derived and/or modified sequence from LASV(LASV237-NIG-2010;Clade II)__AIT17636__Z (opt3)
gggagaaagcuuaccaugggcaacagacaggccaagagcaccaaaguggacgagcaccaaagggcucaucugguccccgaugcaucccaccucgggccucaguucugcaagucuuguugguuugaaaaucggggacuuguugagugcaacaaucauuaccuguguuugaacugcuuaucacugcuacucagugugagcucccgcuguccaaucugcaaaaugccgcugcccacaaaacuuaaggccgcggcucagccuucugccccaucgauugaaacuauacagaauacgacacccccuccauauacccccugaggacuaguuauaagacugacuagcccgaugggccucccaacgggcccuccuccccuccuugcaccgagauuaauaaaaaaaaaaaaaaaaaaaaaaaaaaaaaaaaaaaaaaaaaaaaaaaaaaaaaaaaaaaaaaaaugcaucccccccccccccccccccccccccccccccaaaggcucuuuucagagccaccagaauu

SEQ ID NO: 13695 - RNA, 517 nt, Artificial Sequence
  mRNA product Design i-3 comprising derived and/or modified sequence from LASV(LASV253-NIG-2011;Clade II)__AIT17668__Z (opt3)
gggagaaagcuuaccaugggcaacagacaggccaagagcaccaaaguggacgagcaccaaagggcucaucugguccccgaugcaucccaccucgggccucaguucugcaagucuuguugguuugaaaauaaaggacuuguugagugcaacaaucauuaccuguguuugaacugcuuaucacugcuacucagugugagcucccgguguccaaucugcaagaugccgcugcccacaaaacuuaagacuacggcccagccuucugcgccacccaccgaagcugccaagaauacagcaccuccacccuaugccccuugaggacuaguuauaagacugacuagcccgaugggccucccaacgggcccuccuccccuccuugcaccgagauuaauaaaaaaaaaaaaaaaaaaaaaaaaaaaaaaaaaaaaaaaaaaaaaaaaaaaaaaaaaaaaaaaaugcaucccccccccccccccccccccccccccccccaaaggcucuuuucagagccaccagaauu

SEQ ID NO: 13696 - RNA, 517 nt, Artificial Sequence
  mRNA product Design i-3 comprising derived and/or modified sequence from LASV(G1180-SLE-2010;Clade IV)__AIT17166__Z (opt3)
gggagaaagcuuaccaugggcaacaagcaggccaaggcucccgaggcaaaggacagcccuagagccucccugaucccagaugcgacccaccucgggccgcaauucugcaaaucuuguugguuugaaacaaagggacuuguggagugcaauaaccauuaccuguguuugaauugcuuaacucugcuacucucagucaguaacaggugucccauuugcaaaaugccucugccaacgaaacuucggcccagcgcuaccccuacagccccacccacugaagcagccgacuccauagguccuccaccguauucucccugaggacuaguuauaagacugacuagcccgaugggccucccaacgggcccuccuccccuccuugcaccgagauuaauaaaaaaaaaaaaaaaaaaaaaaaaaaaaaaaaaaaaaaaaaaaaaaaaaaaaaaaaaaaaaaaaugcaucccccccccccccccccccccccccccccccaaaggcucuuuucagagccaccagaauu

SEQ ID NO: 13697 - RNA, 517 nt, Artificial Sequence
  mRNA product Design i-3 comprising derived and/or modified sequence from LASV(G1442-SLE-2011;Clade IV)__AIT17178__Z (opt3)
gggagaaagcuuaccaugggcaacaagcaggccaaagcuagcgaggcaaaggacucccccagagccucucugaucccugaugcgacccaccucgggccacaauucugcaaaucauguugguuugaaaauaagggacuuguggagugcaacaaucauuaccuguguuugaacugcuuaagucugcuacucagcgucuccucuagguguccgauuugcaaaaugccccugccuacacggcuucgcccaucgacugcucccacggccccuccagcacgagccggugacaauauaaagcccccuccauauucaccgugaggacuaguuauaagacugacuagcccgaugggccucccaacgggcccuccuccccuccuugcaccgagauuaauaaaaaaaaaaaaaaaaaaaaaaaaaaaaaaaaaaaaaaaaaaaaaaaaaaaaaaaaaaaaaaaaugcaucccccccccccccccccccccccccccccccaaaggcucuuuucagagccaccagaauu

SEQ ID NO: 13698 - RNA, 517 nt, Artificial Sequence
  mRNA product Design i-3 comprising derived and/or modified sequence from LASV(G502-SLE-2009;Clade IV)__AIT17124__Z (opt3)
gggagaaagcuuaccaugggcaacaaacaggugaagacccccgaggccaaggacagcccuagagcuucccugaucccagaugcaacacaccucgggccgcaauucugcaagucuuguugguuugaaaauaagggacuugucgagugcaacaaucauuaccuguguuugaacugcuuaacucugcuacucucaguugguaauaggugucccauuugcaaaaugccucugccaacgaaacuucggcccagugugaccccuacagccccacccacucgcgcggcugacagcauaggcccuccaccguauucccccugaggacuaguuauaagacugacuagcccgaugggccucccaacgggcccuccuccccuccuugcaccgagauuaauaaaaaaaaaaaaaaaaaaaaaaaaaaaaaaaaaaaaaaaaaaaaaaaaaaaaaaaaaaaaaaaaugcaucccccccccccccccccccccccccccccccaaaggcucuuuucagagccaccagaauu

SEQ ID NO: 13699 - RNA, 517 nt, Artificial Sequence
  mRNA product Design i-3 comprising derived and/or modified sequence from LASV(G733-SLE-2010;Clade IV)__AIT17152__Z (opt3)
gggagaaagcuuaccaugggcaacaagcaggccaagacccccgagacaaaggacagcccuagagcuucccugaucccagaugcaacucaccucgggccgcaauucugcaaaucuuguugguuugaaaauaagggacuuguggagugcaacaaucauuaccuguguuugaacugcuuaacgcugcuacucucagucaguaauaggugucccauuugcaaaaugccucugccaaccaaacuucggcccagcacagccccuacugcgccacccgcuggugccgcagacaacacccgcccuccaccguauucccccugaggacuaguuauaagacugacuagcccgaugggccucccaacgggcccuccuccccuccuugcaccgagauuaauaaaaaaaaaaaaaaaaaaaaaaaaaaaaaaaaaaaaaaaaaaaaaaaaaaaaaaaaaaaaaaaaugcaucccccccccccccccccccccccccccccccaaaggcucuuuucagagccaccagaauu

SEQ ID NO: 13700 - RNA, 529 nt, Artificial Sequence
  mRNA product Design i-3 comprising derived and/or modified sequence from MOPV/LASV reassortant(IGS-1;Clade IV)__AFY05533__Z (opt3)
gggagaaagcuuaccaugggcaagacccagagcaaagggcaacccuccacaaaccugcucaaggagacugaaccuagacacccagugaucccggacgccaggggaacgggucccgaguucugcaaaucuuguugguuugaacggcgcggccuuguccgaugcaaugaucauuaccuguguuugaacugcuuaacccugcuacacacaguuucagaccguuguccuauuugcaagcauaaacucccauucagacuggagcuucagacucagcccaccgcuccuccagaaauacccccuagucagaauccaccgcccuauagcccuugaggacuaguuauaagacugacuagcccgaugggccucccaacgggcccuccuccccuccuugcaccgagauuaauaaaaaaaaaaaaaaaaaaaaaaaaaaaaaaaaaaaaaaaaaaaaaaaaaaaaaaaaaaaaaaaaugcaucccccccccccccccccccccccccccccccaaaggcucuuuucagagccaccagaauu

SEQ ID NO: 13701 - RNA, 517 nt, Artificial Sequence
  mRNA product Design i-3 comprising derived and/or modified sequence from LASV(LM776-SLE-2012;Clade IV)__AIT17824__Z (opt3)
gggagaaagcuuaccaugggcaacaagcaggccaaggcuagcgaggaaaagaacucccccagagcaucucugaucccugacgccacccaccucgggccacaauucugcaaaucauguugguuugagaauaagggacuuguggaaugcaauaaccauuaccuguguuugaauugcuuaacacugcuacucagugucagcaacagguguccgauuugcaaaaugccccugccuacuaaacuucggccauccacgacccccacagcgccuccaacuggugcugccgauucuauacgcccucccccauauucgccgugaggacuaguuauaagacugacuagcccgaugggccucccaacgggcccuccuccccuccuugcaccgagauuaauaaaaaaaaaaaaaaaaaaaaaaaaaaaaaaaaaaaaaaaaaaaaaaaaaaaaaaaaaaaaaaaaugcaucccccccccccccccccccccccccccccccaaaggcucuuuucagagccaccagaauu

SEQ ID NO: 13702 - RNA, 517 nt, Artificial Sequence
  mRNA product Design i-3 comprising derived and/or modified sequence from LASV(Mad39;Clade IV)__ANH09743__Z (opt3)
gggagaaagcuuaccaugggcaacaagcaggccaaagcuagcgagguggaagacgggcccagagcaucccugaucccugaugccacccaccucggaccacaauucugcaagucuuguugguuugagaauaaaucacuugucgaaugcaacaaucauuaccuguguuugaacugcuuaacacugcuacucaguguuagcaauagguguccgauuugcaagaugccccugccuacucggcuuaaaccauccgugguacccacggcgccuccaacccgcgcuggugacggcacacgacccccuccauauucuccgugaggacuaguuauaagacugacuagcccgaugggccucccaacgggcccuccuccccuccuugcaccgagauuaauaaaaaaaaaaaaaaaaaaaaaaaaaaaaaaaaaaaaaaaaaaaaaaaaaaaaaaaaaaaaaaaaugcaucccccccccccccccccccccccccccccccaaaggcucuuuucagagccaccagaauu

SEQ ID NO: 13703 - RNA, 517 nt, Artificial Sequence
  mRNA product Design i-3 comprising derived and/or modified sequence from LASV(Z0947-SLE-2011;Clade IV)__AIT17838__Z (opt3)
gggagaaagcuuaccaugggcaacaagcaggccaaggugcccgagagcaaggacuccccuagagcuucucugaucccagaugcaacccaccucgggccgcaauucugcaaaucauguugguuugaaaauaagggacuugucgagugcaacaaucauuaccuguguuugaacugcuuaacacugcuacucaguguuagcaauaggugucccauuugcaaaaugccucugccaacuaaacuuaagcccuccgccgcgccuacggcuccacccaccggugccgcagacucuauacggccuccaccguauucgcccugaggacuaguuauaagacugacuagcccgaugggccucccaacgggcccuccuccccuccuugcaccgagauuaauaaaaaaaaaaaaaaaaaaaaaaaaaaaaaaaaaaaaaaaaaaaaaaaaaaaaaaaaaaaaaaaaugcaucccccccccccccccccccccccccccccccaaaggcucuuuucagagccaccagaauu

SEQ ID NO: 13704 - RNA, 517 nt, Artificial Sequence
  mRNA product Design i-3 comprising derived and/or modified sequence from LASV(Josiah;Clade IV)__ADY11072/NP_694871__Z (opt4)
gggagaaagcuuaccaugggcaacaagcaggccaaggcccccgagagcaaggacagccccagagccagccugauccccgacgccacccaccugggcccccaguucugcaagagcugcugguucgagaacaagggccugguggagugcaacaaccacuaccugugccugaacugccugacccugcugcugagcgugagcaacagaugccccaucugcaagaugccccugcccaccaagcugagacccagcgccgcccccaccgccccccccaccggcgccgccgacagcaucagacccccccccuacagccccugaggacuaguuauaagacugacuagcccgaugggccucccaacgggcccuccuccccuccuugcaccgagauuaauaaaaaaaaaaaaaaaaaaaaaaaaaaaaaaaaaaaaaaaaaaaaaaaaaaaaaaaaaaaaaaaaugcaucccccccccccccccccccccccccccccccaaaggcucuuuucagagccaccagaauu

SEQ ID NO: 13705 - RNA, 520 nt, Artificial Sequence
  mRNA product Design i-3 comprising derived and/or modified sequence from LASV(Pinneo-NIG-1969;Clade I)__AIT17834__Z (opt4)
gggagaaagcuuaccaugggcaacaagcagaccagaagcccccccaagcccgagcaccccagacccacccugcugcccgacgccagccaccugggcccccaguucugcaagagcugcugguucgagaacaagggccugguggagugcaacaaccacuaccugugccugaacugccugacccugcugcugagcgugagcgacagaugccccaucugcaagaugccccugcccaccaagcuggccgugagaacccagcccagcgcccccccccugaaccagggcaacacccagagcagccccccccccuacagccccugaggacuaguuauaagacugacuagcccgaugggccucccaacgggcccuccuccccuccuugcaccgagauuaauaaaaaaaaaaaaaaaaaaaaaaaaaaaaaaaaaaaaaaaaaaaaaaaaaaaaaaaaaaaaaaaaugcaucccccccccccccccccccccccccccccccaaaggcucuuuucagagccaccagaauu

SEQ ID NO: 13706 - RNA, 517 nt, Artificial Sequence
  mRNA product Design i-3 comprising derived and/or modified sequence from LASV(Nig08-04;Clade II)__ADU56612__Z (opt4)
gggagaaagcuuaccaugggcaacagacagaccagacccaccgaggccaccgagcagagcagagcccaccuggugcccgacgccagccaccugggcccccaguucugcaagagcugcugguucgagaacagaggccugguggagugcaacaaccacuaccugugccugaacugccugagccugcugcugagcgugagcagcagaugccccaucugcaagaugccccugcccaccagacugaaggccagcgcccagcccagcgccccccccaccgaggccccccagaacaccacccccccccccuacacccccugaggacuaguuauaagacugacuagcccgaugggccucccaacgggcccuccuccccuccuugcaccgagauuaauaaaaaaaaaaaaaaaaaaaaaaaaaaaaaaaaaaaaaaaaaaaaaaaaaaaaaaaaaaaaaaaaugcaucccccccccccccccccccccccccccccccaaaggcucuuuucagagccaccagaauu

SEQ ID NO: 13707 - RNA, 517 nt, Artificial Sequence
  mRNA product Design i-3 comprising derived and/or modified sequence from LASV(Nig08-A19;Clade III)__ADU56620__Z (opt4)
gggagaaagcuuaccaugggcggcaagcacaccaagccccagagagagagcaacagccccagagccagccugauccccgacgccacccaccugggcccccaguucugcaagagcugcugguucgagaacaagggccugguggagugcaacaaccacuaccugugccugaacugccugacccugcugcugagcgugagcaacagaugccccaucugcaagaugccccugcccaccagacugagagccagcaccaaccccaccgccccccagguggagcaggugggccccaccaaccccccccccuacagccccugaggacuaguuauaagacugacuagcccgaugggccucccaacgggcccuccuccccuccuugcaccgagauuaauaaaaaaaaaaaaaaaaaaaaaaaaaaaaaaaaaaaaaaaaaaaaaaaaaaaaaaaaaaaaaaaaugcaucccccccccccccccccccccccccccccccaaaggcucuuuucagagccaccagaauu

SEQ ID NO: 13708 - RNA, 517 nt, Artificial Sequence
  mRNA product Design i-3 comprising derived and/or modified sequence from LASV(AV;Clade V)__CCA30312__Z (opt4)
gggagaaagcuuaccaugggcaacagacaggccaagaaccccgagguggagaacagccccagagccagccugauccccgacgccacccaccugggcccccaguucugcaagagcugcugguucgagaacaagggccugguggagugcaacaaccacuaccugugccugaacugccugagccugcugcugagcgugagcaacagaugccccaucugcaagaugccccugcccaccagacugagacccaccaccacccccaccgccccccagaucaucaaggagaacaccaccaaccccccccccuacacccccugaggacuaguuauaagacugacuagcccgaugggccucccaacgggcccuccuccccuccuugcaccgagauuaauaaaaaaaaaaaaaaaaaaaaaaaaaaaaaaaaaaaaaaaaaaaaaaaaaaaaaaaaaaaaaaaaugcaucccccccccccccccccccccccccccccccaaaggcucuuuucagagccaccagaauu

SEQ ID NO: 13709 - RNA, 517 nt, Artificial Sequence
  mRNA product Design i-3 comprising derived and/or modified sequence from LASV(Togo/2016/7082;Clade VI)__AMR44579__Z (opt4)
gggagaaagcuuaccaugggcgccagacagaccaagcagccccagaucgagggcagccccagagccagccuggugcccgacgccagccaccugggcccccaguucugcaagagcugcugguucgagaacaagggccugguggagugcaacaaccacuaccugugccugaacugccugagccugcugcugagcgugagcaacagaugccccaucugcaagaugccccugcccaccaagcugagagugagcagcgcccccagcgccccccccgccgccaccgcccagcccggcacccccccccccuacagccccugaggacuaguuauaagacugacuagcccgaugggccucccaacgggcccuccuccccuccuugcaccgagauuaauaaaaaaaaaaaaaaaaaaaaaaaaaaaaaaaaaaaaaaaaaaaaaaaaaaaaaaaaaaaaaaaaugcaucccccccccccccccccccccccccccccccaaaggcucuuuucagagccaccagaauu

SEQ ID NO: 13710 - RNA, 517 nt, Artificial Sequence
  mRNA product Design i-3 comprising derived and/or modified sequence from LASV(KAK-428;Clade n.d. (VII))__ANH09761__Z (opt4)
gggagaaagcuuaccaugggcaacaagggcaccaagcccacccagaacagcgagcccagcagagccaaccuggugcccgacgccagcuaccugggcccccaguucugcaagagcugcugguucgagaacaagggccugguggagugcaacaaccacuaccugugccugaacugccugaccaugcugcugagcgugagcaacagaugccccaucugcaagaugccccugcccaccaagaucaaggccagcggcagccccagcgccccccccaccgaggccaacagcgccgugagccccccccccuacacccccugaggacuaguuauaagacugacuagcccgaugggccucccaacgggcccuccuccccuccuugcaccgagauuaauaaaaaaaaaaaaaaaaaaaaaaaaaaaaaaaaaaaaaaaaaaaaaaaaaaaaaaaaaaaaaaaaugcaucccccccccccccccccccccccccccccccaaaggcucuuuucagagccaccagaauu

SEQ ID NO: 13711 - RNA, 517 nt, Artificial Sequence
  mRNA product Design i-3 comprising derived and/or modified sequence from LASV(ISTH0009-NIG-2011;Clade II)__AIT17402__Z (opt4)
gggagaaagcuuaccaugggcaacagacaggccaagagcaccaagguggacgagcaccagagagcccaccuggugcccgacgccagccaccugggcccccaguucugcaagagcugcugguucgagaacagaggccugguggagugcaacaaccacuaccugugccugaacugccugagccugcugcugagcgugagcagcagaugccccaucugcaagaugccccugcccaccaagcugaaggccgccgcccagcccagcgcccccagcaccgagaccauccagaacaccacccccccccccuacacccccugaggacuaguuauaagacugacuagcccgaugggccucccaacgggcccuccuccccuccuugcaccgagauuaauaaaaaaaaaaaaaaaaaaaaaaaaaaaaaaaaaaaaaaaaaaaaaaaaaaaaaaaaaaaaaaaaugcaucccccccccccccccccccccccccccccccaaaggcucuuuucagagccaccagaauu

SEQ ID NO: 13712 - RNA, 517 nt, Artificial Sequence
  mRNA product Design i-3 comprising derived and/or modified sequence from LASV(ISTH2010-NIG-2012;Clade II)__AIT17480__Z (opt4)
gggagaaagcuuaccaugggcaacagacacgccaagagcaccaagguggacgagcaccagagagcccaccuggugcccgacgccagccaccugggcccccaguucugcaagagcugcugguucgagaacagaggccugguggagugcaacaaccacuaccugugccugaacugccugagccugcugcugagcgugagcagcagaugccccaucugcaagaugccccugcccaccaagcugaaggccgccgcccagcccagcgcccccagcaccgaggugauccagagcaccacccccccccccuacacccccugaggacuaguuauaagacugacuagcccgaugggccucccaacgggcccuccuccccuccuugcaccgagauuaauaaaaaaaaaaaaaaaaaaaaaaaaaaaaaaaaaaaaaaaaaaaaaaaaaaaaaaaaaaaaaaaaugcaucccccccccccccccccccccccccccccccaaaggcucuuuucagagccaccagaauu

SEQ ID NO: 13713 - RNA, 517 nt, Artificial Sequence
  mRNA product Design i-3 comprising derived and/or modified sequence from LASV(Lassa virus/H.sapiens-wt/NGA/2016/ISTH_0017;Clade II)__AVO03713__Z (opt4)
gggagaaagcuuaccaugggcaacagacaggccaagagcaccaagguggacgagcaccagagagcccaccuggugcccgacgccagccaccugggcccccaguucugcaagagcugcugguucgagaacagaggccugguggagugcaacaaccacuaccugugccugaacugccugagccugcugcugagcgugagcagcagaugccccaucugcaagaugccccugcccaccaagcugaaggccgccacccagcccagcgcccccagcaccgaggugaaccagaacaccacccccccccccuacacccccugaggacuaguuauaagacugacuagcccgaugggccucccaacgggcccuccuccccuccuugcaccgagauuaauaaaaaaaaaaaaaaaaaaaaaaaaaaaaaaaaaaaaaaaaaaaaaaaaaaaaaaaaaaaaaaaaugcaucccccccccccccccccccccccccccccccaaaggcucuuuucagagccaccagaauu

SEQ ID NO: 13714 - RNA, 517 nt, Artificial Sequence
  mRNA product Design i-3 comprising derived and/or modified sequence from LASV(Lassa virus/H.sapiens-wt/NGA/2018/ISTH_0959;Clade II)__AVV65084__Z (opt4)
gggagaaagcuuaccaugggcaacaagcaggccaagagcaccaagguggacgagcaccagagagcccaccuggugcccgacgccagccaccugggcccccaguucugcaagagcugcugguucgagaacagaggccugguggagugcaacaaccacuaccugugccugaacugccugagccugcugcugagcgugagcagcagaugccccaucugcaagaugccccugcccaccaagcugaaggccgccgcccagcccagcgcccccagcaccgaggccauccagagcaccacccccccccccuacacccccugaggacuaguuauaagacugacuagcccgaugggccucccaacgggcccuccuccccuccuugcaccgagauuaauaaaaaaaaaaaaaaaaaaaaaaaaaaaaaaaaaaaaaaaaaaaaaaaaaaaaaaaaaaaaaaaaugcaucccccccccccccccccccccccccccccccaaaggcucuuuucagagccaccagaauu

SEQ ID NO: 13715 - RNA, 517 nt, Artificial Sequence
  mRNA product Design i-3 comprising derived and/or modified sequence from LASV(LASV003-NIG-2008;Clade II)__AIT17578__Z (opt4)
gggagaaagcuuaccaugggcaacagacaggccaagagcaccaagguggacgagcaccagagagcccaccuggugcccgacgccagccaccugggcccccaguucugcaagagcugcugguucgagaacaagggccugguggagugcaacaaccacuaccugugccugaacugccugagccugcugcugagcgugagcagcagaugccccaucugcaagaugccccugcccaccaagcugagagccgccgcccagcccagcgcccccagcaccgagagcgcccagaacaccgcccccccccccuacgcccccugaggacuaguuauaagacugacuagcccgaugggccucccaacgggcccuccuccccuccuugcaccgagauuaauaaaaaaaaaaaaaaaaaaaaaaaaaaaaaaaaaaaaaaaaaaaaaaaaaaaaaaaaaaaaaaaaugcaucccccccccccccccccccccccccccccccaaaggcucuuuucagagccaccagaauu

SEQ ID NO: 13716 - RNA, 517 nt, Artificial Sequence
  mRNA product Design i-3 comprising derived and/or modified sequence from LASV(LASV035-NIG-2009;Clade II)__AIT17586__Z (opt4)
gggagaaagcuuaccaugggcaacaagcaggccaagagcaccaagguggacgagcaccagagagcccaccuggugcccgacgccagccaccugggcccccaguucugcaagagcugcugguucgagaacagaggccugguggagugcaacaaccacuaccugugccugaacugccugagccugcugcugagcgugagcagcagaugccccaucugcaagaugccccugcccaccagacugaaggccgccgcccagcccagcgcccccagcaccgaggugacccagaacaccacccccccccccuacacccccugaggacuaguuauaagacugacuagcccgaugggccucccaacgggcccuccuccccuccuugcaccgagauuaauaaaaaaaaaaaaaaaaaaaaaaaaaaaaaaaaaaaaaaaaaaaaaaaaaaaaaaaaaaaaaaaaugcaucccccccccccccccccccccccccccccccaaaggcucuuuucagagccaccagaauu

SEQ ID NO: 13717 - RNA, 517 nt, Artificial Sequence
  mRNA product Design i-3 comprising derived and/or modified sequence from LASV(LASV1000-NIG-2009;Clade II)__AIT17780__Z (opt4)
gggagaaagcuuaccaugggcaacagacagaccaagagcaccaagguggacgagcaccagagagccuaccuggugcccgacgccagccugcugggcccccaguucugcaagagcugcugguucgagaacaagggccugguggagugcaacaaccacuaccugugccugaacugccugagccugcugcugagcgugagcagcagaugccccaucugcaagaugccccugcccaccagacugaaggccgccgcccagcccagcgccccccccaccgaggccauccagaacaccacccccccccccuacacccccugaggacuaguuauaagacugacuagcccgaugggccucccaacgggcccuccuccccuccuugcaccgagauuaauaaaaaaaaaaaaaaaaaaaaaaaaaaaaaaaaaaaaaaaaaaaaaaaaaaaaaaaaaaaaaaaaugcaucccccccccccccccccccccccccccccccaaaggcucuuuucagagccaccagaauu

SEQ ID NO: 13718 - RNA, 517 nt, Artificial Sequence
  mRNA product Design i-3 comprising derived and/or modified sequence from LASV(LASV221-NIG-2010;Clade II)__AIT17622__Z (opt4)
gggagaaagcuuaccaugggcaacagacaggccaagagcaccaagguggacgagcaccagagagcccaccuggugcccgacgccagccaccugggcccccaguucugcaagagcugcugguucgagaacagaggccugguggagugcaacaaccacuaccugugccugaacugccugagccugcugcugagcgugagcagcagaugccccaucugcaagaugccccugcccaccaagcugaaggccgccacccagcccagcgcccccagcaccgaggugacccagaacaccauccccccccccuacagccccugaggacuaguuauaagacugacuagcccgaugggccucccaacgggcccuccuccccuccuugcaccgagauuaauaaaaaaaaaaaaaaaaaaaaaaaaaaaaaaaaaaaaaaaaaaaaaaaaaaaaaaaaaaaaaaaaugcaucccccccccccccccccccccccccccccccaaaggcucuuuucagagccaccagaauu

SEQ ID NO: 13719 - RNA, 517 nt, Artificial Sequence
  mRNA product Design i-3 comprising derived and/or modified sequence from LASV(LASV237-NIG-2010;Clade II)__AIT17636__Z (opt4)
gggagaaagcuuaccaugggcaacagacaggccaagagcaccaagguggacgagcaccagagagcccaccuggugcccgacgccagccaccugggcccccaguucugcaagagcugcugguucgagaacagaggccugguggagugcaacaaccacuaccugugccugaacugccugagccugcugcugagcgugagcagcagaugccccaucugcaagaugccccugcccaccaagcugaaggccgccgcccagcccagcgcccccagcaucgagaccauccagaacaccacccccccccccuacacccccugaggacuaguuauaagacugacuagcccgaugggccucccaacgggcccuccuccccuccuugcaccgagauuaauaaaaaaaaaaaaaaaaaaaaaaaaaaaaaaaaaaaaaaaaaaaaaaaaaaaaaaaaaaaaaaaaugcaucccccccccccccccccccccccccccccccaaaggcucuuuucagagccaccagaauu

SEQ ID NO: 13720 - RNA, 517 nt, Artificial Sequence
  mRNA product Design i-3 comprising derived and/or modified sequence from LASV(LASV253-NIG-2011;Clade II)__AIT17668__Z (opt4)
gggagaaagcuuaccaugggcaacagacaggccaagagcaccaagguggacgagcaccagagagcccaccuggugcccgacgccagccaccugggcccccaguucugcaagagcugcugguucgagaacaagggccugguggagugcaacaaccacuaccugugccugaacugccugagccugcugcugagcgugagcagcagaugccccaucugcaagaugccccugcccaccaagcugaagaccaccgcccagcccagcgccccccccaccgaggccgccaagaacaccgcccccccccccuacgcccccugaggacuaguuauaagacugacuagcccgaugggccucccaacgggcccuccuccccuccuugcaccgagauuaauaaaaaaaaaaaaaaaaaaaaaaaaaaaaaaaaaaaaaaaaaaaaaaaaaaaaaaaaaaaaaaaaugcaucccccccccccccccccccccccccccccccaaaggcucuuuucagagccaccagaauu

SEQ ID NO: 13721 - RNA, 517 nt, Artificial Sequence
  mRNA product Design i-3 comprising derived and/or modified sequence from LASV(G1180-SLE-2010;Clade IV)__AIT17166__Z (opt4)
gggagaaagcuuaccaugggcaacaagcaggccaaggcccccgaggccaaggacagccccagagccagccugauccccgacgccacccaccugggcccccaguucugcaagagcugcugguucgagaccaagggccugguggagugcaacaaccacuaccugugccugaacugccugacccugcugcugagcgugagcaacagaugccccaucugcaagaugccccugcccaccaagcugagacccagcgccacccccaccgccccccccaccgaggccgccgacagcaucggccccccccccuacagccccugaggacuaguuauaagacugacuagcccgaugggccucccaacgggcccuccuccccuccuugcaccgagauuaauaaaaaaaaaaaaaaaaaaaaaaaaaaaaaaaaaaaaaaaaaaaaaaaaaaaaaaaaaaaaaaaaugcaucccccccccccccccccccccccccccccccaaaggcucuuuucagagccaccagaauu

SEQ ID NO: 13722 - RNA, 517 nt, Artificial Sequence
  mRNA product Design i-3 comprising derived and/or modified sequence from LASV(G1442-SLE-2011;Clade IV)__AIT17178__Z (opt4)
gggagaaagcuuaccaugggcaacaagcaggccaaggccagcgaggccaaggacagccccagagccagccugauccccgacgccacccaccugggcccccaguucugcaagagcugcugguucgagaacaagggccugguggagugcaacaaccacuaccugugccugaacugccugagccugcugcugagcgugagcagcagaugccccaucugcaagaugccccugcccaccagacugagacccagcaccgcccccaccgccccccccgccagagccggcgacaacaucaagcccccccccuacagccccugaggacuaguuauaagacugacuagcccgaugggccucccaacgggcccuccuccccuccuugcaccgagauuaauaaaaaaaaaaaaaaaaaaaaaaaaaaaaaaaaaaaaaaaaaaaaaaaaaaaaaaaaaaaaaaaaugcaucccccccccccccccccccccccccccccccaaaggcucuuuucagagccaccagaauu

SEQ ID NO: 13723 - RNA, 517 nt, Artificial Sequence
  mRNA product Design i-3 comprising derived and/or modified sequence from LASV(G502-SLE-2009;Clade IV)__AIT17124__Z (opt4)
gggagaaagcuuaccaugggcaacaagcaggugaagacccccgaggccaaggacagccccagagccagccugauccccgacgccacccaccugggcccccaguucugcaagagcugcugguucgagaacaagggccugguggagugcaacaaccacuaccugugccugaacugccugacccugcugcugagcgugggcaacagaugccccaucugcaagaugccccugcccaccaagcugagacccagcgugacccccaccgccccccccaccagagccgccgacagcaucggccccccccccuacagccccugaggacuaguuauaagacugacuagcccgaugggccucccaacgggcccuccuccccuccuugcaccgagauuaauaaaaaaaaaaaaaaaaaaaaaaaaaaaaaaaaaaaaaaaaaaaaaaaaaaaaaaaaaaaaaaaaugcaucccccccccccccccccccccccccccccccaaaggcucuuuucagagccaccagaauu

SEQ ID NO: 13724 - RNA, 517 nt, Artificial Sequence
  mRNA product Design i-3 comprising derived and/or modified sequence from LASV(G733-SLE-2010;Clade IV)__AIT17152__Z (opt4)
gggagaaagcuuaccaugggcaacaagcaggccaagacccccgagaccaaggacagccccagagccagccugauccccgacgccacccaccugggcccccaguucugcaagagcugcugguucgagaacaagggccugguggagugcaacaaccacuaccugugccugaacugccugacccugcugcugagcgugagcaacagaugccccaucugcaagaugccccugcccaccaagcugagacccagcaccgcccccaccgccccccccgccggcgccgccgacaacaccagacccccccccuacagccccugaggacuaguuauaagacugacuagcccgaugggccucccaacgggcccuccuccccuccuugcaccgagauuaauaaaaaaaaaaaaaaaaaaaaaaaaaaaaaaaaaaaaaaaaaaaaaaaaaaaaaaaaaaaaaaaaugcaucccccccccccccccccccccccccccccccaaaggcucuuuucagagccaccagaauu

SEQ ID NO: 13725 - RNA, 529 nt, Artificial Sequence
  mRNA product Design i-3 comprising derived and/or modified sequence from MOPV/LASV reassortant(IGS-1;Clade IV)__AFY05533__Z (opt4)
gggagaaagcuuaccaugggcaagacccagagcaagggccagcccagcaccaaccugcugaaggagaccgagcccagacaccccgugauccccgacgccagaggcaccggccccgaguucugcaagagcugcugguucgagagaagaggccuggugagaugcaacgaccacuaccugugccugaacugccugacccugcugcacaccgugagcgacagaugccccaucugcaagcacaagcugcccuucagacuggagcugcagacccagcccaccgccccccccgagaucccccccagccagaaccccccccccuacagccccugaggacuaguuauaagacugacuagcccgaugggccucccaacgggcccuccuccccuccuugcaccgagauuaauaaaaaaaaaaaaaaaaaaaaaaaaaaaaaaaaaaaaaaaaaaaaaaaaaaaaaaaaaaaaaaaaugcaucccccccccccccccccccccccccccccccaaaggcucuuuucagagccaccagaauu

SEQ ID NO: 13726 - RNA, 517 nt, Artificial Sequence
  mRNA product Design i-3 comprising derived and/or modified sequence from LASV(LM776-SLE-2012;Clade IV)__AIT17824__Z (opt4)
gggagaaagcuuaccaugggcaacaagcaggccaaggccagcgaggagaagaacagccccagagccagccugauccccgacgccacccaccugggcccccaguucugcaagagcugcugguucgagaacaagggccugguggagugcaacaaccacuaccugugccugaacugccugacccugcugcugagcgugagcaacagaugccccaucugcaagaugccccugcccaccaagcugagacccagcaccacccccaccgccccccccaccggcgccgccgacagcaucagacccccccccuacagccccugaggacuaguuauaagacugacuagcccgaugggccucccaacgggcccuccuccccuccuugcaccgagauuaauaaaaaaaaaaaaaaaaaaaaaaaaaaaaaaaaaaaaaaaaaaaaaaaaaaaaaaaaaaaaaaaaugcaucccccccccccccccccccccccccccccccaaaggcucuuuucagagccaccagaauu

SEQ ID NO: 13727 - RNA, 517 nt, Artificial Sequence
  mRNA product Design i-3 comprising derived and/or modified sequence from LASV(Mad39;Clade IV)__ANH09743__Z (opt4)
gggagaaagcuuaccaugggcaacaagcaggccaaggccagcgagguggaggacggccccagagccagccugauccccgacgccacccaccugggcccccaguucugcaagagcugcugguucgagaacaagagccugguggagugcaacaaccacuaccugugccugaacugccugacccugcugcugagcgugagcaacagaugccccaucugcaagaugccccugcccaccagacugaagcccagcguggugcccaccgccccccccaccagagccggcgacggcaccagacccccccccuacagccccugaggacuaguuauaagacugacuagcccgaugggccucccaacgggcccuccuccccuccuugcaccgagauuaauaaaaaaaaaaaaaaaaaaaaaaaaaaaaaaaaaaaaaaaaaaaaaaaaaaaaaaaaaaaaaaaaugcaucccccccccccccccccccccccccccccccaaaggcucuuuucagagccaccagaauu

SEQ ID NO: 13728 - RNA, 517 nt, Artificial Sequence
  mRNA product Design i-3 comprising derived and/or modified sequence from LASV(Z0947-SLE-2011;Clade IV)__AIT17838__Z (opt4)
gggagaaagcuuaccaugggcaacaagcaggccaaggugcccgagagcaaggacagccccagagccagccugauccccgacgccacccaccugggcccccaguucugcaagagcugcugguucgagaacaagggccugguggagugcaacaaccacuaccugugccugaacugccugacccugcugcugagcgugagcaacagaugccccaucugcaagaugccccugcccaccaagcugaagcccagcgccgcccccaccgccccccccaccggcgccgccgacagcaucagacccccccccuacagccccugaggacuaguuauaagacugacuagcccgaugggccucccaacgggcccuccuccccuccuugcaccgagauuaauaaaaaaaaaaaaaaaaaaaaaaaaaaaaaaaaaaaaaaaaaaaaaaaaaaaaaaaaaaaaaaaaugcaucccccccccccccccccccccccccccccccaaaggcucuuuucagagccaccagaauu

SEQ ID NO: 13729 - RNA, 517 nt, Artificial Sequence
  mRNA product Design i-3 comprising derived and/or modified sequence from LASV(Josiah;Clade IV)__ADY11072/NP_694871__Z (opt5)
gggagaaagcuuaccaugggcaacaagcaggccaaagcucccgagagcaaggacuccccuagagccucucugaucccggaugcgacccaccucgggccccaauucugcaaaagcuguugguuugaaaauaagggacugguggagugcaacaaucauuaccuuugucugaacugccucacacugcuucuguccgucucuaaucgguguccuauuugcaaaaugccccucccuacgaagcugcgccccagcgcugccccuaccgccccgcccacaggcgcugccgacuccaucagaccucccccuuauucucccugaggacuaguuauaagacugacuagcccgaugggccucccaacgggcccuccuccccuccuugcaccgagauuaauaaaaaaaaaaaaaaaaaaaaaaaaaaaaaaaaaaaaaaaaaaaaaaaaaaaaaaaaaaaaaaaaugcaucccccccccccccccccccccccccccccccaaaggcucuuuucagagccaccagaauu

SEQ ID NO: 13730 - RNA, 520 nt, Artificial Sequence
  mRNA product Design i-3 comprising derived and/or modified sequence from LASV(Pinneo-NIG-1969;Clade I)__AIT17834__Z (opt5)
gggagaaagcuuaccaugggcaacaagcagaccagaagcccucccaaaccggagcacccccggccuacacugcuccccgacgccucccaucuggggccucaauucugcaagucuuguugguuugaaaauaaaggacuuguggagugcaacaaucacuaccugugucucaacugccugacgcuucugcucagcgucuccgaucgcugucccaucugcaagaugccucugccgaccaaacuggcuguuagaacacagcccucugccccuccccucaaucagggcaacacccagagcuccccucccccguauucuccuugaggacuaguuauaagacugacuagcccgaugggccucccaacgggcccuccuccccuccuugcaccgagauuaauaaaaaaaaaaaaaaaaaaaaaaaaaaaaaaaaaaaaaaaaaaaaaaaaaaaaaaaaaaaaaaaaugcaucccccccccccccccccccccccccccccccaaaggcucuuuucagagccaccagaauu

SEQ ID NO: 13731 - RNA, 517 nt, Artificial Sequence
  mRNA product Design i-3 comprising derived and/or modified sequence from LASV(Nig08-04;Clade II)__ADU56612__Z (opt5)
gggagaaagcuuaccaugggcaacagacagacccggcccacagaggccacggaacaaagccgcgcccaccuggugccugacgccucccaucucgggccgcaguucugcaagucuuguugguuugagaauagaggacuggucgaaugcaacaaucacuaccuuugucugaacugccucagccugcuucuguccguuucuagccggugucccaucugcaaaaugccucuccccacccgccugaaggcguccgcucagccuucugcucccccuacagaggccccgcagaauaccacacccccucccuauaccccuugaggacuaguuauaagacugacuagcccgaugggccucccaacgggcccuccuccccuccuugcaccgagauuaauaaaaaaaaaaaaaaaaaaaaaaaaaaaaaaaaaaaaaaaaaaaaaaaaaaaaaaaaaaaaaaaaugcaucccccccccccccccccccccccccccccccaaaggcucuuuucagagccaccagaauu

SEQ ID NO: 13732 - RNA, 517 nt, Artificial Sequence
  mRNA product Design i-3 comprising derived and/or modified sequence from LASV(Nig08-A19;Clade III)__ADU56620__Z (opt5)
gggagaaagcuuaccaugggcgggaagcacaccaaaccccagagagagagcaacuccccucgggccucucugaucccggacgcuacacaucucggaccccaauucugcaagagcuguugguuugaaaauaaaggccugguggagugcaacaaucacuaccuuugucugaacugccucacgcugcuucuguccgucucuaaucgcuguccuauuugcaagaugccccucccuaccagacugcgggccagcacaaaccccaccgcgccucagguugaacagguggggccgacaaaucccccucccuauuccccuugaggacuaguuauaagacugacuagcccgaugggccucccaacgggcccuccuccccuccuugcaccgagauuaauaaaaaaaaaaaaaaaaaaaaaaaaaaaaaaaaaaaaaaaaaaaaaaaaaaaaaaaaaaaaaaaaugcaucccccccccccccccccccccccccccccccaaaggcucuuuucagagccaccagaauu

SEQ ID NO: 13733 - RNA, 517 nt, Artificial Sequence
  mRNA product Design i-3 comprising derived and/or modified sequence from LASV(AV;Clade V)__CCA30312__Z (opt5)
gggagaaagcuuaccaugggcaacagacaggccaagaaucccgagguggaaaacagcccucgggcuucccugaucccggacgccacccaccucgggccccaauucugcaaaucuuguugguuugagaauaagggacuggucgaaugcaacaaucauuaccuuugucugaacugccucagccugcuucuguccguuucuaaucgcuguccuauuugcaaaaugccccucccuacaagacugcggcccacgaccacaccuaccgcgccgcagaucauuaaggagaacacaaccaaucccccucccuauacaccuugaggacuaguuauaagacugacuagcccgaugggccucccaacgggcccuccuccccuccuugcaccgagauuaauaaaaaaaaaaaaaaaaaaaaaaaaaaaaaaaaaaaaaaaaaaaaaaaaaaaaaaaaaaaaaaaaugcaucccccccccccccccccccccccccccccccaaaggcucuuuucagagccaccagaauu

SEQ ID NO: 13734 - RNA, 517 nt, Artificial Sequence
  mRNA product Design i-3 comprising derived and/or modified sequence from LASV(Togo/2016/7082;Clade VI)__AMR44579__Z (opt5)
gggagaaagcuuaccaugggcgccagacagaccaagcaaccccagaucgaggggagcccucgggcuucccuggugccggacgccucucaccucggaccccaguucugcaaaagcuguugguuugaaaacaagggccuggucgagugcaauaaccauuaccuuugucugaauugccucucccugcuucugucuguuagcaaccgcuguccuauuugcaaaaugccccucccuacaaagcugagaguguccucugcgcccagcgcuccuccggccgccacggcucagcccgggaccccucccccuuauucccccugaggacuaguuauaagacugacuagcccgaugggccucccaacgggcccuccuccccuccuugcaccgagauuaauaaaaaaaaaaaaaaaaaaaaaaaaaaaaaaaaaaaaaaaaaaaaaaaaaaaaaaaaaaaaaaaaugcaucccccccccccccccccccccccccccccccaaaggcucuuuucagagccaccagaauu

SEQ ID NO: 13735 - RNA, 517 nt, Artificial Sequence
  mRNA product Design i-3 comprising derived and/or modified sequence from LASV(KAK-428;Clade n.d. (VII))__ANH09761__Z (opt5)
gggagaaagcuuaccaugggcaacaaggggaccaaacccacacagaauagcgagccuuccagagccaaccuggugccggacgcuucuuaccucggaccccaauucugcaagagcuguugguuugaaaauaaaggccuggucgagugcaacaaucacuaucuuugucugaacugccucacgaugcugcuuuccguuuccaaucgguguccuaucugcaagaugccccugccuaccaaaauuaaggccagcgggucccccucugcgccuccgacagaagcuaacagcgccgugucucccccucccuacaccccuugaggacuaguuauaagacugacuagcccgaugggccucccaacgggcccuccuccccuccuugcaccgagauuaauaaaaaaaaaaaaaaaaaaaaaaaaaaaaaaaaaaaaaaaaaaaaaaaaaaaaaaaaaaaaaaaaugcaucccccccccccccccccccccccccccccccaaaggcucuuuucagagccaccagaauu

SEQ ID NO: 13736 - RNA, 517 nt, Artificial Sequence
  mRNA product Design i-3 comprising derived and/or modified sequence from LASV(ISTH0009-NIG-2011;Clade II)__AIT17402__Z (opt5)
gggagaaagcuuaccaugggcaacagacaggccaagagcaccaaaguggacgagcaccaacgggcucaucugguccccgaugccucccaccucgggccucaguucugcaagucuuguugguuugaaaaucgcggacugguugagugcaacaaucauuaccuuugucugaacugccucagccugcuucuguccgugucuagcagauguccgaucugcaaaaugccccucccuacaaagcugaaagcggcugcccagcccuccgccccuucuacggaaaccauucagaauacaacacccccuccguauacccccugaggacuaguuauaagacugacuagcccgaugggccucccaacgggcccuccuccccuccuugcaccgagauuaauaaaaaaaaaaaaaaaaaaaaaaaaaaaaaaaaaaaaaaaaaaaaaaaaaaaaaaaaaaaaaaaaugcaucccccccccccccccccccccccccccccccaaaggcucuuuucagagccaccagaauu

SEQ ID NO: 13737 - RNA, 517 nt, Artificial Sequence
  mRNA product Design i-3 comprising derived and/or modified sequence from LASV(ISTH2010-NIG-2012;Clade II)__AIT17480__Z (opt5)
gggagaaagcuuaccaugggcaacagacacgccaagagcaccaaaguggacgagcaucagcgggcucaccugguccccgaugccucccaucucgggccucaauucugcaagucuuguugguuugaaaaucgcggacugguugagugcaacaaucacuaccuuugucugaacugccucagccugcuucuguccgugucuagcagauguccgaucugcaaaaugccccucccuacaaagcugaaagcggcugcccagcccuccgccccuucuacggaagugauucagagcaccacacccccuccguauacccccugaggacuaguuauaagacugacuagcccgaugggccucccaacgggcccuccuccccuccuugcaccgagauuaauaaaaaaaaaaaaaaaaaaaaaaaaaaaaaaaaaaaaaaaaaaaaaaaaaaaaaaaaaaaaaaaaugcaucccccccccccccccccccccccccccccccaaaggcucuuuucagagccaccagaauu

SEQ ID NO: 13738 - RNA, 517 nt, Artificial Sequence
  mRNA product Design i-3 comprising derived and/or modified sequence from LASV(Lassa virus/H.sapiens-wt/NGA/2016/ISTH_0017;Clade II)__AVO03713__Z (opt5)
gggagaaagcuuaccaugggcaacagacaggccaagagcaccaaaguggacgagcaccaacgggcucaucugguccccgaugccucccaccucgggccucaguucugcaagucuuguugguuugaaaaucgcggacugguugagugcaacaaucauuaccuuugucugaacugccucagccugcuucuguccgugucuagcagauguccgaucugcaaaaugccccucccuacaaagcugaaagcggcuacgcagcccuccgccccuucuaccgaagugaaucagaacacaacacccccuccguauacccccugaggacuaguuauaagacugacuagcccgaugggccucccaacgggcccuccuccccuccuugcaccgagauuaauaaaaaaaaaaaaaaaaaaaaaaaaaaaaaaaaaaaaaaaaaaaaaaaaaaaaaaaaaaaaaaaaugcaucccccccccccccccccccccccccccccccaaaggcucuuuucagagccaccagaauu

SEQ ID NO: 13739 - RNA, 517 nt, Artificial Sequence
  mRNA product Design i-3 comprising derived and/or modified sequence from LASV(Lassa virus/H.sapiens-wt/NGA/2018/ISTH_0959;Clade II)__AVV65084__Z (opt5)
gggagaaagcuuaccaugggcaacaagcaggccaaaagcaccaagguggacgagcaccaaagagcucaucugguccccgaugccucccaccucgggccucaguucugcaaaucuuguugguuugaaaaucggggacugguugagugcaacaaucauuaccuuugucugaacugccucagccugcuucuguccgugucuagccgcuguccgaucugcaagaugccccucccuacaaaacugaaggcggcugcccagcccuccgccccuucuacggaagcuauucagagcaccacacccccuccguauacccccugaggacuaguuauaagacugacuagcccgaugggccucccaacgggcccuccuccccuccuugcaccgagauuaauaaaaaaaaaaaaaaaaaaaaaaaaaaaaaaaaaaaaaaaaaaaaaaaaaaaaaaaaaaaaaaaaugcaucccccccccccccccccccccccccccccccaaaggcucuuuucagagccaccagaauu

SEQ ID NO: 13740 - RNA, 517 nt, Artificial Sequence
  mRNA product Design i-3 comprising derived and/or modified sequence from LASV(LASV003-NIG-2008;Clade II)__AIT17578__Z (opt5)
gggagaaagcuuaccaugggcaacagacaggccaagagcaccaaaguggacgagcaccaacgggcucaucugguccccgaugccucccaccucgggccucaguucugcaagucuuguugguuugaaaauaaaggacugguugagugcaacaaucauuaccuuugucugaacugccucagccugcuucuguccgugucuagccgcuguccgaucugcaagaugccccucccuacaaaacugagagcggcugcccagcccuccgccccuucuacggaaagcgcucagaauaccgcucccccuccguaugcccccugaggacuaguuauaagacugacuagcccgaugggccucccaacgggcccuccuccccuccuugcaccgagauuaauaaaaaaaaaaaaaaaaaaaaaaaaaaaaaaaaaaaaaaaaaaaaaaaaaaaaaaaaaaaaaaaaugcaucccccccccccccccccccccccccccccccaaaggcucuuuucagagccaccagaauu

SEQ ID NO: 13741 - RNA, 517 nt, Artificial Sequence
  mRNA product Design i-3 comprising derived and/or modified sequence from LASV(LASV035-NIG-2009;Clade II)__AIT17586__Z (opt5)
gggagaaagcuuaccaugggcaacaagcaggccaaaagcaccaagguggacgagcaccaaagagcucaucugguccccgaugccucccaccucgggccucaguucugcaaaucuuguugguuugaaaaucggggacugguugagugcaacaaucauuaccuuugucugaacugccucagccugcuucuguccgugucuagccgcuguccgaucugcaagaugccccucccuacaagacugaaagcggcugcccagcccuccgccccuucuacggaagugacccagaauacaacacccccuccguauacccccugaggacuaguuauaagacugacuagcccgaugggccucccaacgggcccuccuccccuccuugcaccgagauuaauaaaaaaaaaaaaaaaaaaaaaaaaaaaaaaaaaaaaaaaaaaaaaaaaaaaaaaaaaaaaaaaaugcaucccccccccccccccccccccccccccccccaaaggcucuuuucagagccaccagaauu

SEQ ID NO: 13742 - RNA, 517 nt, Artificial Sequence
  mRNA product Design i-3 comprising derived and/or modified sequence from LASV(LASV1000-NIG-2009;Clade II)__AIT17780__Z (opt5)
gggagaaagcuuaccaugggcaacagacagaccaagagcacaaaaguggacgagcaccaacgggccuaccugguccccgaugcuucccuccuggggccucaguucugcaagucuuguugguuugaaaauaaaggacuuguugagugcaacaaucauuaucugugucucaacugccugagccuucugcucuccgugucuagccgcuguccgaucugcaagaugccccugccuacgagacugaaagccgcggcucagcccuccgccccucccaccgaagccauucagaauacaaccccuccgcccuacacaccuugaggacuaguuauaagacugacuagcccgaugggccucccaacgggcccuccuccccuccuugcaccgagauuaauaaaaaaaaaaaaaaaaaaaaaaaaaaaaaaaaaaaaaaaaaaaaaaaaaaaaaaaaaaaaaaaaugcaucccccccccccccccccccccccccccccccaaaggcucuuuucagagccaccagaauu

SEQ ID NO: 13743 - RNA, 517 nt, Artificial Sequence
  mRNA product Design i-3 comprising derived and/or modified sequence from LASV(LASV221-NIG-2010;Clade II)__AIT17622__Z (opt5)
gggagaaagcuuaccaugggcaacagacaggccaagagcaccaaaguggacgagcaccaacgggcucaucugguccccgaugccucccaccucgggccucaguucugcaagucuuguugguuugaaaaucgcggacugguugagugcaacaaucauuaccuuugucugaacugccucagccugcuucuguccgugucuagcagauguccgaucugcaaaaugccccucccuacaaagcugaaagcggcuacgcagcccuccgccccuucuaccgaagugacacagaauaccauucccccuccguauagccccugaggacuaguuauaagacugacuagcccgaugggccucccaacgggcccuccuccccuccuugcaccgagauuaauaaaaaaaaaaaaaaaaaaaaaaaaaaaaaaaaaaaaaaaaaaaaaaaaaaaaaaaaaaaaaaaaugcaucccccccccccccccccccccccccccccccaaaggcucuuuucagagccaccagaauu

SEQ ID NO: 13744 - RNA, 517 nt, Artificial Sequence
  mRNA product Design i-3 comprising derived and/or modified sequence from LASV(LASV237-NIG-2010;Clade II)__AIT17636__Z (opt5)
gggagaaagcuuaccaugggcaacagacaggccaagagcaccaaaguggacgagcaccaacgggcucaucugguccccgaugccucccaccucgggccucaguucugcaagucuuguugguuugaaaaucgcggacugguugagugcaacaaucauuaccuuugucugaacugccucagccugcuucuguccgugucuagcagauguccgaucugcaaaaugccccucccuacaaagcugaaagcggcugcccagcccuccgccccuucuauugaaacgauccagaauaccacacccccuccguauacccccugaggacuaguuauaagacugacuagcccgaugggccucccaacgggcccuccuccccuccuugcaccgagauuaauaaaaaaaaaaaaaaaaaaaaaaaaaaaaaaaaaaaaaaaaaaaaaaaaaaaaaaaaaaaaaaaaugcaucccccccccccccccccccccccccccccccaaaggcucuuuucagagccaccagaauu

SEQ ID NO: 13745 - RNA, 517 nt, Artificial Sequence
  mRNA product Design i-3 comprising derived and/or modified sequence from LASV(LASV253-NIG-2011;Clade II)__AIT17668__Z (opt5)
gggagaaagcuuaccaugggcaacagacaggccaagagcaccaaaguggacgagcaccaacgggcucaucugguccccgaugccucccaccucgggccucaguucugcaagucuuguugguuugaaaauaaaggacugguugagugcaacaaucauuaccuuugucugaacugccucagccugcuucuguccgugucuagccgcuguccgaucugcaagaugccccucccuacaaaacugaagacgaccgcgcagcccuccgcuccucccacagaagccgccaagaauaccgcuccuccgcccuaugccccuugaggacuaguuauaagacugacuagcccgaugggccucccaacgggcccuccuccccuccuugcaccgagauuaauaaaaaaaaaaaaaaaaaaaaaaaaaaaaaaaaaaaaaaaaaaaaaaaaaaaaaaaaaaaaaaaaugcaucccccccccccccccccccccccccccccccaaaggcucuuuucagagccaccagaauu

SEQ ID NO: 13746 - RNA, 517 nt, Artificial Sequence
  mRNA product Design i-3 comprising derived and/or modified sequence from LASV(G1180-SLE-2010;Clade IV)__AIT17166__Z (opt5)
gggagaaagcuuaccaugggcaacaagcaggccaaagcucccgaggccaaggacagcccuagagcgucccugaucccggaugcuacccaccucgggccccaauucugcaaaucuuguugguuugaaacaaagggacugguggagugcaauaaccauuaccuuugucugaauugccucacgcugcuucugagcgucuccaaccgguguccuauuugcaaaaugccccucccuaccaagcugcgccccucugccacaccuaccgccccgcccacagaagcugccgacagcaucggcccucccccuuauucccccugaggacuaguuauaagacugacuagcccgaugggccucccaacgggcccuccuccccuccuugcaccgagauuaauaaaaaaaaaaaaaaaaaaaaaaaaaaaaaaaaaaaaaaaaaaaaaaaaaaaaaaaaaaaaaaaaugcaucccccccccccccccccccccccccccccccaaaggcucuuuucagagccaccagaauu

SEQ ID NO: 13747 - RNA, 517 nt, Artificial Sequence
  mRNA product Design i-3 comprising derived and/or modified sequence from LASV(G1442-SLE-2011;Clade IV)__AIT17178__Z (opt5)
gggagaaagcuuaccaugggcaacaagcaggccaaagcuagcgaggccaaggacucccccagagcgucucugaucccugaugcuacccaccucgggccgcaauucugcaaaagcuguugguuugaaaauaagggacugguggagugcaacaaucauuaccuuugucugaacugccucucccugcuucugucugucagcucccggugucccauuugcaaaaugccucuccccacacgccugagaccuucuacggcccccaccgccccuccggcucgggccggcgacaauaucaagcccccucccuauagcccuugaggacuaguuauaagacugacuagcccgaugggccucccaacgggcccuccuccccuccuugcaccgagauuaauaaaaaaaaaaaaaaaaaaaaaaaaaaaaaaaaaaaaaaaaaaaaaaaaaaaaaaaaaaaaaaaaugcaucccccccccccccccccccccccccccccccaaaggcucuuuucagagccaccagaauu

SEQ ID NO: 13748 - RNA, 517 nt, Artificial Sequence
  mRNA product Design i-3 comprising derived and/or modified sequence from LASV(G502-SLE-2009;Clade IV)__AIT17124__Z (opt5)
gggagaaagcuuaccaugggcaacaaacaggugaagacccccgaggccaaggacagcccuagagcuucccugaucccggaugccacacaccucgggccccaauucugcaaaucuuguugguuugaaaauaagggacuggucgagugcaacaaucauuaccuuugucugaacugccucacgcugcuucugagcguuggcaaucgguguccuauuugcaaaaugccccucccuaccaagcugcgccccuccgugacaccuaccgcgccgcccacaagagcugccgacucuaucgggccucccccuuauagccccugaggacuaguuauaagacugacuagcccgaugggccucccaacgggcccuccuccccuccuugcaccgagauuaauaaaaaaaaaaaaaaaaaaaaaaaaaaaaaaaaaaaaaaaaaaaaaaaaaaaaaaaaaaaaaaaaugcaucccccccccccccccccccccccccccccccaaaggcucuuuucagagccaccagaauu

SEQ ID NO: 13749 - RNA, 517 nt, Artificial Sequence
  mRNA product Design i-3 comprising derived and/or modified sequence from LASV(G733-SLE-2010;Clade IV)__AIT17152__Z (opt5)
gggagaaagcuuaccaugggcaacaagcaggccaaaacccccgagacaaaggacagcccuagagcuucccugaucccggaugccacgcaccucgggccccaauucugcaaaucuuguugguuugaaaauaagggacugguggagugcaacaaucauuaccuuugucugaacugccucacccugcuucugagcgucuccaaucgguguccuauuugcaaaaugccccucccuacaaagcugcgccccucuaccgcgccuacagcuccgcccgccggcgccgcugacaacaccagaccucccccuuauagccccugaggacuaguuauaagacugacuagcccgaugggccucccaacgggcccuccuccccuccuugcaccgagauuaauaaaaaaaaaaaaaaaaaaaaaaaaaaaaaaaaaaaaaaaaaaaaaaaaaaaaaaaaaaaaaaaaugcaucccccccccccccccccccccccccccccccaaaggcucuuuucagagccaccagaauu

SEQ ID NO: 13750 - RNA, 529 nt, Artificial Sequence
  mRNA product Design i-3 comprising derived and/or modified sequence from MOPV/LASV reassortant(IGS-1;Clade IV)__AFY05533__Z (opt5)
gggagaaagcuuaccaugggcaagacccagagcaaagggcaacccuccacaaaccugcucaaggagacggaaccuagacacccggugauccccgacgcccggggaaccggcccugaguucugcaaaucuuguugguuugaacgcagagggcugguccggugcaaugaucauuaccuuugucugaacugccucacacugcuucacaccguuagcgaccgcugucccaucugcaagcauaaacugccuuucagacucgagcugcagacacagcccaccgcuccuccggaaauucccccuucccagaaucccccucccuauucuccgugaggacuaguuauaagacugacuagcccgaugggccucccaacgggcccuccuccccuccuugcaccgagauuaauaaaaaaaaaaaaaaaaaaaaaaaaaaaaaaaaaaaaaaaaaaaaaaaaaaaaaaaaaaaaaaaaugcaucccccccccccccccccccccccccccccccaaaggcucuuuucagagccaccagaauu

SEQ ID NO: 13751 - RNA, 517 nt, Artificial Sequence
  mRNA product Design i-3 comprising derived and/or modified sequence from LASV(LM776-SLE-2012;Clade IV)__AIT17824__Z (opt5)
gggagaaagcuuaccaugggcaacaagcaggccaaagcuagcgaggaaaagaacucccccagagccucucugaucccugacgcgacccaccucgggccgcaauucugcaaaagcuguugguuugagaauaagggacugguggaaugcaauaaccauuaccuuugucugaauugccucacacugcuucuguccgucucuaaccggugucccauuugcaaaaugccucuccccacgaagcugcgcccuagcaccacacccaccgcuccuccgacaggcgccgccgauuccaucagacccccucccuauucuccuugaggacuaguuauaagacugacuagcccgaugggccucccaacgggcccuccuccccuccuugcaccgagauuaauaaaaaaaaaaaaaaaaaaaaaaaaaaaaaaaaaaaaaaaaaaaaaaaaaaaaaaaaaaaaaaaaugcaucccccccccccccccccccccccccccccccaaaggcucuuuucagagccaccagaauu

SEQ ID NO: 13752 - RNA, 517 nt, Artificial Sequence
  mRNA product Design i-3 comprising derived and/or modified sequence from LASV(Mad39;Clade IV)__ANH09743__Z (opt5)
gggagaaagcuuaccaugggcaacaagcaggccaaagcuagcgagguggaagacgggcccagagccucccugaucccugaugcgacccaccucggaccgcaauucugcaagucuuguugguuugagaauaaaagccuggucgaaugcaacaaucauuaccuuugucugaacugccucacacugcuucuguccguuucuaaucggugucccauuugcaagaugccucuccccacgcgccugaaaccuagcguggugcccaccgcuccuccgacaagagccggcgacgggacccggcccccucccuauuccccuugaggacuaguuauaagacugacuagcccgaugggccucccaacgggcccuccuccccuccuugcaccgagauuaauaaaaaaaaaaaaaaaaaaaaaaaaaaaaaaaaaaaaaaaaaaaaaaaaaaaaaaaaaaaaaaaaugcaucccccccccccccccccccccccccccccccaaaggcucuuuucagagccaccagaauu

SEQ ID NO: 13753 - RNA, 517 nt, Artificial Sequence
  mRNA product Design i-3 comprising derived and/or modified sequence from LASV(Z0947-SLE-2011;Clade IV)__AIT17838__Z (opt5)
gggagaaagcuuaccaugggcaacaagcaggccaaagugcccgagagcaaggacuccccuagagcuucucugaucccggaugccacccaccucgggccccaauucugcaaaagcuguugguuugaaaauaagggacuggucgagugcaacaaucauuaccuuugucugaacugccucacacugcuucuguccguuucuaaucgguguccuauuugcaaaaugccccucccuacgaagcugaagcccagcgcggcuccuaccgccccgcccacaggcgccgcugacuccauccgcccucccccuuauucucccugaggacuaguuauaagacugacuagcccgaugggccucccaacgggcccuccuccccuccuugcaccgagauuaauaaaaaaaaaaaaaaaaaaaaaaaaaaaaaaaaaaaaaaaaaaaaaaaaaaaaaaaaaaaaaaaaugcaucccccccccccccccccccccccccccccccaaaggcucuuuucagagccaccagaauu

SEQ ID NO: 13754 - RNA, 517 nt, Artificial Sequence
  mRNA product Design i-3 comprising derived and/or modified sequence from LASV(Josiah;Clade IV)__ADY11072/NP_694871__Z (opt6)
gggagaaagcuuaccaugggaaacaaacaagcaaaagcaccagaaucaaaagacucaccaagagcaucacuaauaccagacgcaacacaccuaggaccacaauucugcaaaucaugcugguucgaaaacaaaggacuuguagaaugcaacaaccacuaccuaugccuaaacugccuaacacuacuacuaucaguaucaaacagaugcccaauaugcaaaaugccacuaccaacaaaacuaagaccaucagcagcaccaacagcaccaccaacaggagcagcagacucaauaagaccaccaccauacucaccauaaggacuaguuauaagacugacuagcccgaugggccucccaacgggcccuccuccccuccuugcaccgagauuaauaaaaaaaaaaaaaaaaaaaaaaaaaaaaaaaaaaaaaaaaaaaaaaaaaaaaaaaaaaaaaaaaugcaucccccccccccccccccccccccccccccccaaaggcucuuuucagagccaccagaauu

SEQ ID NO: 13755 - RNA, 520 nt, Artificial Sequence
  mRNA product Design i-3 comprising derived and/or modified sequence from LASV(Pinneo-NIG-1969;Clade I)__AIT17834__Z (opt6)
gggagaaagcuuaccaugggaaacaaacaaacaagaucaccaccaaaaccagaacacccaagaccaacacuacuaccagacgcaucacaccuaggaccacaauucugcaaaucaugcugguucgaaaacaaaggacuaguagaaugcaacaaccacuaccuaugccuaaacugccuaacacuacuacuaucaguaucagacagaugcccaauaugcaaaaugccacuaccaacaaaacuagcaguaagaacacaaccaucagcaccaccacuaaaccaaggaaacacacaaucaucaccaccaccauacucaccauaaggacuaguuauaagacugacuagcccgaugggccucccaacgggcccuccuccccuccuugcaccgagauuaauaaaaaaaaaaaaaaaaaaaaaaaaaaaaaaaaaaaaaaaaaaaaaaaaaaaaaaaaaaaaaaaaugcaucccccccccccccccccccccccccccccccaaaggcucuuuucagagccaccagaauu

SEQ ID NO: 13756 - RNA, 517 nt, Artificial Sequence
  mRNA product Design i-3 comprising derived and/or modified sequence from LASV(Nig08-04;Clade II)__ADU56612__Z (opt6)
gggagaaagcuuaccaugggaaacagacaaacaagaccaacagaagcaacagaacaaucaagagcacaccuaguaccagacgcaucacaccuaggaccacaauucugcaaaucaugcugguucgaaaacagaggacuaguagaaugcaacaaccacuaccuaugccuaaacugccuaucacuacuacuaucaguaucaucaagaugcccaauaugcaaaaugccacuaccaacaagacuaaaagcaucagcacaaccaucagcaccaccaacagaagcaccacaaaacacaacaccaccaccauacacaccauaaggacuaguuauaagacugacuagcccgaugggccucccaacgggcccuccuccccuccuugcaccgagauuaauaaaaaaaaaaaaaaaaaaaaaaaaaaaaaaaaaaaaaaaaaaaaaaaaaaaaaaaaaaaaaaaaugcaucccccccccccccccccccccccccccccccaaaggcucuuuucagagccaccagaauu

SEQ ID NO: 13757 - RNA, 517 nt, Artificial Sequence
  mRNA product Design i-3 comprising derived and/or modified sequence from LASV(Nig08-A19;Clade III)__ADU56620__Z (opt6)
gggagaaagcuuaccaugggaggaaaacacacaaaaccacaaagagaaucaaacucaccaagagcaucacuaauaccagacgcaacacaccuaggaccacaauucugcaaaucaugcugguucgaaaacaaaggauuaguagaaugcaacaaccacuaccuaugccuaaacugccuaacacuacuacuaucaguaucaaacagaugcccaauaugcaaaaugccacuaccaacaagacuaagagcaucaacaaacccaacagcaccacaaguagaacaaguaggaccaacaaacccaccaccauacucaccauaaggacuaguuauaagacugacuagcccgaugggccucccaacgggcccuccuccccuccuugcaccgagauuaauaaaaaaaaaaaaaaaaaaaaaaaaaaaaaaaaaaaaaaaaaaaaaaaaaaaaaaaaaaaaaaaaugcaucccccccccccccccccccccccccccccccaaaggcucuuuucagagccaccagaauu

SEQ ID NO: 13758 - RNA, 517 nt, Artificial Sequence
  mRNA product Design i-3 comprising derived and/or modified sequence from LASV(AV;Clade V)__CCA30312__Z (opt6)
gggagaaagcuuaccaugggaaacagacaagcaaaaaacccagaaguagaaaacucaccaagagcaucacuaauaccagacgcaacacaccuaggaccacaauucugcaaaucaugcugguucgaaaacaaaggacuaguagaaugcaacaaccacuaccuaugccuaaacugccuaucacuacuacuaucaguaucaaacagaugcccaauaugcaaaaugccacuaccaacaagacuaagaccaacaacaacaccaacagcaccacaaauaauaaaagaaaacacaacaaacccaccaccauacacaccauaaggacuaguuauaagacugacuagcccgaugggccucccaacgggcccuccuccccuccuugcaccgagauuaauaaaaaaaaaaaaaaaaaaaaaaaaaaaaaaaaaaaaaaaaaaaaaaaaaaaaaaaaaaaaaaaaugcaucccccccccccccccccccccccccccccccaaaggcucuuuucagagccaccagaauu

SEQ ID NO: 13759 - RNA, 517 nt, Artificial Sequence
  mRNA product Design i-3 comprising derived and/or modified sequence from LASV(Togo/2016/7082;Clade VI)__AMR44579__Z (opt6)
gggagaaagcuuaccaugggagcaagacaaacaaaacaaccacaaauagaaggaucaccaagagcaucacuaguaccagacgcaucacaccuaggaccacaauucugcaaaucaugcugguucgaaaacaaaggacuaguagaaugcaacaaccacuacuuaugccuaaacugccuaucacuacuacuaucaguaucaaacagaugcccaauaugcaaaaugccacuaccaacaaaacuaagaguaucaucagcaccaucagcaccaccagcagcaacagcacaaccaggaacaccaccaccauacucaccauaaggacuaguuauaagacugacuagcccgaugggccucccaacgggcccuccuccccuccuugcaccgagauuaauaaaaaaaaaaaaaaaaaaaaaaaaaaaaaaaaaaaaaaaaaaaaaaaaaaaaaaaaaaaaaaaaugcaucccccccccccccccccccccccccccccccaaaggcucuuuucagagccaccagaauu

SEQ ID NO: 13760 - RNA, 517 nt, Artificial Sequence
  mRNA product Design i-3 comprising derived and/or modified sequence from LASV(KAK-428;Clade n.d. (VII))__ANH09761__Z (opt6)
gggagaaagcuuaccaugggaaacaaaggaacaaaaccaacacaaaacucagaaccaucaagagcaaaccuaguaccagacgcaucauaccuaggaccacaauucugcaaaucaugcugguucgaaaacaaaggacuaguagaaugcaacaaccacuaccuaugccuaaacugccuaacaaugcuacuaucaguaucaaacagaugcccaauaugcaaaaugccacuaccaacaaaaauaaaagcaucaggaucaccaucagcaccaccaacagaagcaaacucagcaguaucaccaccaccauacacaccauaaggacuaguuauaagacugacuagcccgaugggccucccaacgggcccuccuccccuccuugcaccgagauuaauaaaaaaaaaaaaaaaaaaaaaaaaaaaaaaaaaaaaaaaaaaaaaaaaaaaaaaaaaaaaaaaaugcaucccccccccccccccccccccccccccccccaaaggcucuuuucagagccaccagaauu

SEQ ID NO: 13761 - RNA, 517 nt, Artificial Sequence
  mRNA product Design i-3 comprising derived and/or modified sequence from LASV(ISTH0009-NIG-2011;Clade II)__AIT17402__Z (opt6)
gggagaaagcuuaccaugggaaacagacaagcaaaaucaacaaaaguagacgaacaccaaagagcacaccuaguaccagacgcaucacaccuaggaccacaauucugcaaaucaugcugguucgaaaacagaggacuaguagaaugcaacaaccacuaccuaugccuaaacugccuaucacuacuacuaucaguaucaucaagaugcccaauaugcaaaaugccacuaccaacaaaacuaaaagcagcagcacaaccaucagcaccaucaacagaaacaauacaaaacacaacaccaccaccauacacaccauaaggacuaguuauaagacugacuagcccgaugggccucccaacgggcccuccuccccuccuugcaccgagauuaauaaaaaaaaaaaaaaaaaaaaaaaaaaaaaaaaaaaaaaaaaaaaaaaaaaaaaaaaaaaaaaaaugcaucccccccccccccccccccccccccccccccaaaggcucuuuucagagccaccagaauu

SEQ ID NO: 13762 - RNA, 517 nt, Artificial Sequence
  mRNA product Design i-3 comprising derived and/or modified sequence from LASV(ISTH2010-NIG-2012;Clade II)__AIT17480__Z (opt6)
gggagaaagcuuaccaugggaaacagacacgcaaaaucaacaaaaguagacgaacaccaaagagcacaccuaguaccagacgcaucacaccuaggaccacaauucugcaaaucaugcugguucgaaaacagaggacuaguagaaugcaacaaccacuaccuaugccuaaacugccuaucacuacuacuaucaguaucaucaagaugcccaauaugcaaaaugccacuaccaacaaaacuaaaagcagcagcacaaccaucagcaccaucaacagaaguaauacaaucaacaacacccccaccauacacaccauaaggacuaguuauaagacugacuagcccgaugggccucccaacgggcccuccuccccuccuugcaccgagauuaauaaaaaaaaaaaaaaaaaaaaaaaaaaaaaaaaaaaaaaaaaaaaaaaaaaaaaaaaaaaaaaaaugcaucccccccccccccccccccccccccccccccaaaggcucuuuucagagccaccagaauu

SEQ ID NO: 13763 - RNA, 517 nt, Artificial Sequence
  mRNA product Design i-3 comprising derived and/or modified sequence from LASV(Lassa virus/H.sapiens-wt/NGA/2016/ISTH_0017;Clade II)__AVO03713__Z (opt6)
gggagaaagcuuaccaugggaaacagacaagcaaaaucaacaaaaguagacgaacaccaaagagcacaccuaguaccagacgcaucacaccuaggaccacaauucugcaaaucaugcugguucgaaaacagaggacuaguagaaugcaacaaccacuaccuaugccuaaacugccuaucacuacuacuaucaguaucaucaagaugcccaauaugcaaaaugccacuaccaacaaaacuaaaagcagcaacacaaccaucagcaccaucaacagaaguaaaccaaaacacaacaccaccaccauacacaccauaaggacuaguuauaagacugacuagcccgaugggccucccaacgggcccuccuccccuccuugcaccgagauuaauaaaaaaaaaaaaaaaaaaaaaaaaaaaaaaaaaaaaaaaaaaaaaaaaaaaaaaaaaaaaaaaaugcaucccccccccccccccccccccccccccccccaaaggcucuuuucagagccaccagaauu

SEQ ID NO: 13764 - RNA, 517 nt, Artificial Sequence
  mRNA product Design i-3 comprising derived and/or modified sequence from LASV(Lassa virus/H.sapiens-wt/NGA/2018/ISTH_0959;Clade II)__AVV65084__Z (opt6)
gggagaaagcuuaccaugggaaacaaacaagcaaaaucaacaaaaguagacgaacaccaaagagcacaccuaguuccagacgcaucacaccuaggaccacaauucugcaaaucaugcugguucgaaaacagaggacuaguagaaugcaacaaccacuaccuaugccuaaacugccuaucacuacuacuaucaguaucaucaagaugcccaauaugcaaaaugccacuaccaacaaaacuaaaagcagcagcacaaccaucagcaccaucaacagaagcaauacaaucaacaacaccaccaccauacacaccauaaggacuaguuauaagacugacuagcccgaugggccucccaacgggcccuccuccccuccuugcaccgagauuaauaaaaaaaaaaaaaaaaaaaaaaaaaaaaaaaaaaaaaaaaaaaaaaaaaaaaaaaaaaaaaaaaugcaucccccccccccccccccccccccccccccccaaaggcucuuuucagagccaccagaauu

SEQ ID NO: 13765 - RNA, 517 nt, Artificial Sequence
  mRNA product Design i-3 comprising derived and/or modified sequence from LASV(LASV003-NIG-2008;Clade II)__AIT17578__Z (opt6)
gggagaaagcuuaccaugggaaacagacaagcaaaaucaacaaaaguagacgaacaccaaagagcacaccuaguaccagacgcaucacaccuaggaccacaauucugcaaaucaugcugguucgaaaacaaaggacuaguagaaugcaacaaccacuaccuaugccuaaacugccuaucacuacuacuaucaguaucaucaagaugcccaauaugcaaaaugccacuaccaacaaaacuaagagcagcagcacaaccaucagcaccaucaacagaaucagcacaaaacacagcaccaccaccauacgcaccauaaggacuaguuauaagacugacuagcccgaugggccucccaacgggcccuccuccccuccuugcaccgagauuaauaaaaaaaaaaaaaaaaaaaaaaaaaaaaaaaaaaaaaaaaaaaaaaaaaaaaaaaaaaaaaaaaugcaucccccccccccccccccccccccccccccccaaaggcucuuuucagagccaccagaauu

SEQ ID NO: 13766 - RNA, 517 nt, Artificial Sequence
  mRNA product Design i-3 comprising derived and/or modified sequence from LASV(LASV035-NIG-2009;Clade II)__AIT17586__Z (opt6)
gggagaaagcuuaccaugggaaacaaacaagcaaaaucaacaaaaguagacgaacaccaaagagcacaccuaguaccagacgcaucacaccuaggaccacaauucugcaaaucaugcugguucgaaaacagaggacuaguagaaugcaacaaccacuaccuaugccuaaacugccuaucacuacuacuaucaguaucaucaagaugcccaauaugcaaaaugccacuaccaacaagacuaaaagcagcagcacaaccaucagcaccaucaacagaaguaacacaaaacacaacaccaccaccauacacaccauaaggacuaguuauaagacugacuagcccgaugggccucccaacgggcccuccuccccuccuugcaccgagauuaauaaaaaaaaaaaaaaaaaaaaaaaaaaaaaaaaaaaaaaaaaaaaaaaaaaaaaaaaaaaaaaaaugcaucccccccccccccccccccccccccccccccaaaggcucuuuucagagccaccagaauu

SEQ ID NO: 13767 - RNA, 517 nt, Artificial Sequence
  mRNA product Design i-3 comprising derived and/or modified sequence from LASV(LASV1000-NIG-2009;Clade II)__AIT17780__Z (opt6)
gggagaaagcuuaccaugggaaacagacaaacaaaaucaacaaaaguagacgaacaccaaagagcauaccuaguaccagacgcaucacuacuaggaccacaauucugcaaaucaugcugguucgaaaacaaaggacuaguagaaugcaacaaccacuaccuaugccuaaacugccuaucacuacuacuaucaguaucaucaagaugcccaauaugcaaaaugccacuaccaacaagacuaaaagcagcagcacaaccaucagcaccaccaacagaagcaauacaaaacacaacaccaccaccauacacaccauaaggacuaguuauaagacugacuagcccgaugggccucccaacgggcccuccuccccuccuugcaccgagauuaauaaaaaaaaaaaaaaaaaaaaaaaaaaaaaaaaaaaaaaaaaaaaaaaaaaaaaaaaaaaaaaaaugcaucccccccccccccccccccccccccccccccaaaggcucuuuucagagccaccagaauu

SEQ ID NO: 13768 - RNA, 517 nt, Artificial Sequence
  mRNA product Design i-3 comprising derived and/or modified sequence from LASV(LASV221-NIG-2010;Clade II)__AIT17622__Z (opt6)
gggagaaagcuuaccaugggaaacagacaagccaaaucaacaaaaguagacgaacaccaaagagcacaccuaguaccagacgcaucacaccuaggaccacaauucugcaaaucaugcugguucgaaaacagaggauuaguagaaugcaacaaccacuaccuaugccuaaacugccuaucacuacuacuaucaguaucaucaagaugcccaauaugcaaaaugccacuaccaacaaaacuaaaagcagcaacacaaccaucagcaccaucaacagaaguaacacaaaacacaauaccaccaccauacucaccauaaggacuaguuauaagacugacuagcccgaugggccucccaacgggcccuccuccccuccuugcaccgagauuaauaaaaaaaaaaaaaaaaaaaaaaaaaaaaaaaaaaaaaaaaaaaaaaaaaaaaaaaaaaaaaaaaugcaucccccccccccccccccccccccccccccccaaaggcucuuuucagagccaccagaauu

SEQ ID NO: 13769 - RNA, 517 nt, Artificial Sequence
  mRNA product Design i-3 comprising derived and/or modified sequence from LASV(LASV237-NIG-2010;Clade II)__AIT17636__Z (opt6)
gggagaaagcuuaccaugggaaacagacaagcaaaaucaacaaaaguagacgaacaccaaagagcacaccuaguaccagacgcaucacaccuaggaccacaauucugcaaaucaugcugguucgaaaacagaggacucguagaaugcaacaaccacuaccuaugccuaaacugccuaucacuacuacuaucaguaucaucaagaugcccaauaugcaaaaugccacuaccaacaaaacuaaaagcagcagcacaaccaucagcaccaucaauagaaacaauacaaaacacaacaccaccaccauacacaccauaaggacuaguuauaagacugacuagcccgaugggccucccaacgggcccuccuccccuccuugcaccgagauuaauaaaaaaaaaaaaaaaaaaaaaaaaaaaaaaaaaaaaaaaaaaaaaaaaaaaaaaaaaaaaaaaaugcaucccccccccccccccccccccccccccccccaaaggcucuuuucagagccaccagaauu

SEQ ID NO: 13770 - RNA, 517 nt, Artificial Sequence
  mRNA product Design i-3 comprising derived and/or modified sequence from LASV(LASV253-NIG-2011;Clade II)__AIT17668__Z (opt6)
gggagaaagcuuaccaugggaaacagacaagcaaaaucaacaaaaguagacgaacaccaaagagcacaccuaguaccagacgcaucacaccuaggaccacaauucugcaaaucaugcugguucgaaaacaaaggacuaguagaaugcaacaaccacuaccuaugccuaaacugccuaucacuacuacuaucaguaucaucaagaugcccaauaugcaaaaugccauuaccaacaaaacuaaaaacaacagcacaaccaucagcaccaccaacagaagcagcaaaaaacacagcaccaccaccauacgcaccauaaggacuaguuauaagacugacuagcccgaugggccucccaacgggcccuccuccccuccuugcaccgagauuaauaaaaaaaaaaaaaaaaaaaaaaaaaaaaaaaaaaaaaaaaaaaaaaaaaaaaaaaaaaaaaaaaugcaucccccccccccccccccccccccccccccccaaaggcucuuuucagagccaccagaauu

SEQ ID NO: 13771 - RNA, 517 nt, Artificial Sequence
  mRNA product Design i-3 comprising derived and/or modified sequence from LASV(G1180-SLE-2010;Clade IV)__AIT17166__Z (opt6)
gggagaaagcuuaccaugggaaacaaacaagcaaaagcaccagaagcaaaagacucaccaagagcaucacuaauaccagacgcaacacaccuaggaccacaauucugcaaaucaugcugguucgaaacaaaaggacuaguagaaugcaacaaccacuaccuaugccuaaacugccuaacacuacuacuaucaguaucaaacagaugcccaauaugcaaaaugccacuaccaacaaaacuaagaccaucagcaacaccaacagcaccaccaacagaagcagcagacucaauaggaccaccaccauacucaccauaaggacuaguuauaagacugacuagcccgaugggccucccaacgggcccuccuccccuccuugcaccgagauuaauaaaaaaaaaaaaaaaaaaaaaaaaaaaaaaaaaaaaaaaaaaaaaaaaaaaaaaaaaaaaaaaaugcaucccccccccccccccccccccccccccccccaaaggcucuuuucagagccaccagaauu

SEQ ID NO: 13772 - RNA, 517 nt, Artificial Sequence
  mRNA product Design i-3 comprising derived and/or modified sequence from LASV(G1442-SLE-2011;Clade IV)__AIT17178__Z (opt6)
gggagaaagcuuaccaugggaaacaaacaagcaaaagcaucagaagcaaaagacucaccaagagcaucacuaauaccagacgcaacacaccuaggaccacaauucugcaaaucaugcugguucgaaaacaaaggauuaguagaaugcaacaaccacuaccuaugccuaaacugccuaucacuacuacuaucaguaucaucaagaugcccaauaugcaaaaugccacuaccaacaagacuaagaccaucaacagcaccaacagcaccaccagcaagagcaggagacaacauaaaaccaccaccauacucaccauaaggacuaguuauaagacugacuagcccgaugggccucccaacgggcccuccuccccuccuugcaccgagauuaauaaaaaaaaaaaaaaaaaaaaaaaaaaaaaaaaaaaaaaaaaaaaaaaaaaaaaaaaaaaaaaaaugcaucccccccccccccccccccccccccccccccaaaggcucuuuucagagccaccagaauu

SEQ ID NO: 13773 - RNA, 517 nt, Artificial Sequence
  mRNA product Design i-3 comprising derived and/or modified sequence from LASV(G502-SLE-2009;Clade IV)__AIT17124__Z (opt6)
gggagaaagcuuaccaugggaaacaaacaaguaaaaacaccagaagcaaaagacucaccaagagcaucacuaauaccagacgcaacacaccuaggaccacaauucugcaaaucaugcugguucgaaaacaaaggacuaguagaaugcaacaaccacuaccuaugccuaaacugccuaacacuacuacuaucaguaggaaacagaugcccaauaugcaaaaugccacuaccaacaaaacuaagaccaucagucacaccaacagcaccaccaacaagagcagcagacucaauaggaccaccaccauacucaccauaaggacuaguuauaagacugacuagcccgaugggccucccaacgggcccuccuccccuccuugcaccgagauuaauaaaaaaaaaaaaaaaaaaaaaaaaaaaaaaaaaaaaaaaaaaaaaaaaaaaaaaaaaaaaaaaaugcaucccccccccccccccccccccccccccccccaaaggcucuuuucagagccaccagaauu

SEQ ID NO: 13774 - RNA, 517 nt, Artificial Sequence
  mRNA product Design i-3 comprising derived and/or modified sequence from LASV(G733-SLE-2010;Clade IV)__AIT17152__Z (opt6)
gggagaaagcuuaccaugggaaacaaacaagcaaaaacaccagaaacaaaagacucaccaagagcaucauuaauaccagacgcaacacaccuaggaccacaauucugcaaaucaugcugguucgaaaacaaaggauuaguagaaugcaacaaccacuaccuaugccuaaacugccuaacacuacuacuaucaguaucaaacagaugcccaauaugcaaaaugccacuaccaacaaaacuaagaccaucaacagcaccaacagcaccaccagcaggagcagcagacaacacaagaccaccaccauacucaccauaaggacuaguuauaagacugacuagcccgaugggccucccaacgggcccuccuccccuccuugcaccgagauuaauaaaaaaaaaaaaaaaaaaaaaaaaaaaaaaaaaaaaaaaaaaaaaaaaaaaaaaaaaaaaaaaaugcaucccccccccccccccccccccccccccccccaaaggcucuuuucagagccaccagaauu

SEQ ID NO: 13775 - RNA, 529 nt, Artificial Sequence
  mRNA product Design i-3 comprising derived and/or modified sequence from MOPV/LASV reassortant(IGS-1;Clade IV)__AFY05533__Z (opt6)
gggagaaagcuuaccaugggaaaaacacaaucaaaaggacaaccauccacaaaccuacuaaaagaaacagaaccaagacacccaguaauaccagacgcaagaggaacaggaccagaauucugcaaaucaugcugguucgaaagaagaggacuaguaagaugcaacgaccacuaccuaugccuaaacugccuaacacuacuacacacaguaucagacagaugcccaauaugcaaacacaaacuaccauucagacuagaacuacaaacacaaccaacagcaccaccagaaauaccaccaucacaaaacccaccaccauacucaccauaaggacuaguuauaagacugacuagcccgaugggccucccaacgggcccuccuccccuccuugcaccgagauuaauaaaaaaaaaaaaaaaaaaaaaaaaaaaaaaaaaaaaaaaaaaaaaaaaaaaaaaaaaaaaaaaaugcaucccccccccccccccccccccccccccccccaaaggcucuuuucagagccaccagaauu

SEQ ID NO: 13776 - RNA, 517 nt, Artificial Sequence
  mRNA product Design i-3 comprising derived and/or modified sequence from LASV(LM776-SLE-2012;Clade IV)__AIT17824__Z (opt6)
gggagaaagcuuaccaugggaaacaaacaagcaaaagcaucagaagaaaaaaacucaccaagagcaucacuaauaccagacgcaacacaccuaggaccacaauucugcaaaucaugcugguucgaaaacaaaggacuaguagaaugcaacaaucacuaccuaugccuaaacugccuaacacuacuacuaucaguaucaaacagaugcccaauaugcaaaaugccacuaccaacaaaacuaagaccaucaacaacaccaacagcaccaccaacaggagcagcagacucaauaagaccaccaccauacucaccauaaggacuaguuauaagacugacuagcccgaugggccucccaacgggcccuccuccccuccuugcaccgagauuaauaaaaaaaaaaaaaaaaaaaaaaaaaaaaaaaaaaaaaaaaaaaaaaaaaaaaaaaaaaaaaaaaugcaucccccccccccccccccccccccccccccccaaaggcucuuuucagagccaccagaauu

SEQ ID NO: 13777 - RNA, 517 nt, Artificial Sequence
  mRNA product Design i-3 comprising derived and/or modified sequence from LASV(Mad39;Clade IV)__ANH09743__Z (opt6)
gggagaaagcuuaccaugggaaacaaacaagcaaaagcaucagaaguagaagacggaccaagagcaucacuaauaccagacgcaacacaccuaggaccacaauucugcaaaucaugcugguucgaaaacaaaucacuaguagaaugcaacaaccacuaccuaugccuaaacugccuaacacuacuacuaucaguaucaaacagaugcccaauaugcaaaaugccacuaccaacaagacuaaaaccaucaguaguaccaacagcaccaccaacacgagcaggagacggaacaagaccaccaccauacucaccauaaggacuaguuauaagacugacuagcccgaugggccucccaacgggcccuccuccccuccuugcaccgagauuaauaaaaaaaaaaaaaaaaaaaaaaaaaaaaaaaaaaaaaaaaaaaaaaaaaaaaaaaaaaaaaaaaugcaucccccccccccccccccccccccccccccccaaaggcucuuuucagagccaccagaauu

SEQ ID NO: 13778 - RNA, 517 nt, Artificial Sequence
  mRNA product Design i-3 comprising derived and/or modified sequence from LASV(Z0947-SLE-2011;Clade IV)__AIT17838__Z (opt6)
gggagaaagcuuaccaugggaaacaaacaagcaaaaguaccagaaucaaaagacucaccaagagcaucacuaauaccagacgcaacacaccuaggaccacaauucugcaaaucaugcugguucgaaaacaaaggacuaguagaaugcaacaaccacuaccuaugccuaaacugccuaacacuacuacuaucaguaucaaacagaugcccaauaugcaaaaugccacuaccaacaaaacuaaaaccaucagcagcaccaacagcaccaccaacaggagcagcagacucaauaagaccaccaccauacucaccauaaggacuaguuauaagacugacuagcccgaugggccucccaacgggcccuccuccccuccuugcaccgagauuaauaaaaaaaaaaaaaaaaaaaaaaaaaaaaaaaaaaaaaaaaaaaaaaaaaaaaaaaaaaaaaaaaugcaucccccccccccccccccccccccccccccccaaaggcucuuuucagagccaccagaauu

SEQ ID NO: 13779 - RNA, 517 nt, Artificial Sequence
  mRNA product Design i-3 comprising derived and/or modified sequence from LASV(Josiah;Clade IV)__ADY11072/NP_694871__Z (opt11)
gggagaaagcuuaccaugggcaacaaacaagccaaagcccccgaauccaaagacuccccccgcgccucccucauccccgacgccacccaccucggcccccaauucugcaaauccugcugguucgaaaacaaaggccucgucgaaugcaacaaccacuaccucugccucaacugccucacccuacuccucuccgucuccaaccgcugccccaucugcaaaaugccccuccccaccaaacuccgccccuccgccgcccccaccgccccccccaccggcgccgccgacuccauccgccccccccccuacucccccuaaggacuaguuauaagacugacuagcccgaugggccucccaacgggcccuccuccccuccuugcaccgagauuaauaaaaaaaaaaaaaaaaaaaaaaaaaaaaaaaaaaaaaaaaaaaaaaaaaaaaaaaaaaaaaaaaugcaucccccccccccccccccccccccccccccccaaaggcucuuuucagagccaccagaauu

SEQ ID NO: 13780 - RNA, 520 nt, Artificial Sequence
  mRNA product Design i-3 comprising derived and/or modified sequence from LASV(Pinneo-NIG-1969;Clade I)__AIT17834__Z (opt11)
gggagaaagcuuaccaugggcaacaaacaaacccgcuccccccccaaacccgaacacccccgccccacccuccucccagacgccucccaccucggcccccaauucugcaaauccugcugguucgaaaacaaaggccuagucgaaugcaacaaccacuaccucugccucaacugccucacccuccuccucuccgucuccgaccgcugccccaucugcaaaaugccccuccccaccaaacuugccguccgcacccaacccuccgcccccccccucaaccaaggcaacacccaauccucccccccccccuacucccccuaaggacuaguuauaagacugacuagcccgaugggccucccaacgggcccuccuccccuccuugcaccgagauuaauaaaaaaaaaaaaaaaaaaaaaaaaaaaaaaaaaaaaaaaaaaaaaaaaaaaaaaaaaaaaaaaaugcaucccccccccccccccccccccccccccccccaaaggcucuuuucagagccaccagaauu

SEQ ID NO: 13781 - RNA, 517 nt, Artificial Sequence
  mRNA product Design i-3 comprising derived and/or modified sequence from LASV(Nig08-04;Clade II)__ADU56612__Z (opt11)
gggagaaagcuuaccaugggcaaccgccaaacccgccccaccgaagcaaccgaacaaucccgcgcccaccucguccccgacgccucccaccucggcccccaauucugcaaauccugcugguucgaaaaccgcggccucgucgaaugcaacaaccacuaccucugccucaacugccucucccuccuccucuccgucuccucccgcugccccaucugcaaaaugccccuccccacccgccucaaagccuccgcccaacccuccgccccccccaccgaagccccccaaaacaccacccccccccccuacacccccuaaggacuaguuauaagacugacuagcccgaugggccucccaacgggcccuccuccccuccuugcaccgagauuaauaaaaaaaaaaaaaaaaaaaaaaaaaaaaaaaaaaaaaaaaaaaaaaaaaaaaaaaaaaaaaaaaugcaucccccccccccccccccccccccccccccccaaaggcucuuuucagagccaccagaauu

SEQ ID NO: 13782 - RNA, 517 nt, Artificial Sequence
  mRNA product Design i-3 comprising derived and/or modified sequence from LASV(Nig08-A19;Clade III)__ADU56620__Z (opt11)
gggagaaagcuuaccaugggcggcaaacacaccaaaccccaacgcgaauccaacuccccccgcgccucccucauccccgacgccacccaccucggcccccaauucugcaaauccugcugguucgaaaacaaaggccucgucgaaugcaacaaccacuaccucugccucaacugccucacccuccuccucuccgucuccaaccgcugccccaucugcaaaaugccccuccccacccgccuccgcgccuccaccaaccccaccgccccccaagucgaacaagucggccccaccaaccccccccccuacucccccuaaggacuaguuauaagacugacuagcccgaugggccucccaacgggcccuccuccccuccuugcaccgagauuaauaaaaaaaaaaaaaaaaaaaaaaaaaaaaaaaaaaaaaaaaaaaaaaaaaaaaaaaaaaaaaaaaugcaucccccccccccccccccccccccccccccccaaaggcucuuuucagagccaccagaauu

SEQ ID NO: 13783 - RNA, 517 nt, Artificial Sequence
  mRNA product Design i-3 comprising derived and/or modified sequence from LASV(AV;Clade V)__CCA30312__Z (opt11)
gggagaaagcuuaccaugggcaaccgccaagccaaaaaccccgaagucgaaaacuccccccgcgccucccucauccccgacgccacccaccucggcccccaauucugcaaauccugcugguucgaaaacaaaggccucgucgaaugcaacaaccacuaccucugccucaacugccucucccuccuccucuccgucuccaaccgcugccccaucugcaaaaugccccuccccacccgccuccgccccaccaccacccccaccgccccccaaaucaucaaagaaaacaccaccaaccccccccccuacacccccuaaggacuaguuauaagacugacuagcccgaugggccucccaacgggcccuccuccccuccuugcaccgagauuaauaaaaaaaaaaaaaaaaaaaaaaaaaaaaaaaaaaaaaaaaaaaaaaaaaaaaaaaaaaaaaaaaugcaucccccccccccccccccccccccccccccccaaaggcucuuuucagagccaccagaauu

SEQ ID NO: 13784 - RNA, 517 nt, Artificial Sequence
  mRNA product Design i-3 comprising derived and/or modified sequence from LASV(Togo/2016/7082;Clade VI)__AMR44579__Z (opt11)
gggagaaagcuuaccaugggcgcccgccaaaccaaacaaccccaaaucgaaggcuccccccgcgccucccucguccccgacgccucccaccucggcccccaauucugcaaauccugcugguucgaaaacaaaggccucgucgaaugcaacaaccacuaccucugccucaacugccucucccuccuccuauccgucucaaaccgcugccccaucugcaaaaugccccuccccaccaaacuccgcgucuccuccgcccccuccgccccccccgccgccaccgcccaacccggcacccccccccccuacucccccuaaggacuaguuauaagacugacuagcccgaugggccucccaacgggcccuccuccccuccuugcaccgagauuaauaaaaaaaaaaaaaaaaaaaaaaaaaaaaaaaaaaaaaaaaaaaaaaaaaaaaaaaaaaaaaaaaugcaucccccccccccccccccccccccccccccccaaaggcucuuuucagagccaccagaauu

SEQ ID NO: 13785 - RNA, 517 nt, Artificial Sequence
  mRNA product Design i-3 comprising derived and/or modified sequence from LASV(KAK-428;Clade n.d. (VII))__ANH09761__Z (opt11)
gggagaaagcuuaccaugggcaacaaaggcaccaaacccacccaaaacuccgaacccucccgcgccaaccucguccccgacgccuccuaccucggcccccaauucugcaaauccugcugguucgaaaacaaaggccucgucgaaugcaacaaccacuaccucugccucaacugccucaccaugcuccucuccgucuccaaccgcugccccaucugcaaaaugccccuccccaccaaaaucaaagccuccggcucccccuccgccccccccaccgaagccaacuccgccgucucccccccccccuacacccccuaaggacuaguuauaagacugacuagcccgaugggccucccaacgggcccuccuccccuccuugcaccgagauuaauaaaaaaaaaaaaaaaaaaaaaaaaaaaaaaaaaaaaaaaaaaaaaaaaaaaaaaaaaaaaaaaaugcaucccccccccccccccccccccccccccccccaaaggcucuuuucagagccaccagaauu

SEQ ID NO: 13786 - RNA, 517 nt, Artificial Sequence
  mRNA product Design i-3 comprising derived and/or modified sequence from LASV(ISTH0009-NIG-2011;Clade II)__AIT17402__Z (opt11)
gggagaaagcuuaccaugggcaaccgccaagccaaauccaccaaagucgacgaacaccaacgcgcccaccucguccccgacgccucccaccucggcccccaauucugcaaauccugcugguucgaaaaccgcggccuagucgaaugcaacaaccacuaccucugccucaacugccucucccuccuccucuccgucuccucccgcugccccaucugcaaaaugccccuccccaccaaacucaaagccgccgcccaacccuccgcccccuccaccgaaaccauccaaaacaccacccccccccccuacacccccuaaggacuaguuauaagacugacuagcccgaugggccucccaacgggcccuccuccccuccuugcaccgagauuaauaaaaaaaaaaaaaaaaaaaaaaaaaaaaaaaaaaaaaaaaaaaaaaaaaaaaaaaaaaaaaaaaugcaucccccccccccccccccccccccccccccccaaaggcucuuuucagagccaccagaauu

SEQ ID NO: 13787 - RNA, 517 nt, Artificial Sequence
  mRNA product Design i-3 comprising derived and/or modified sequence from LASV(ISTH2010-NIG-2012;Clade II)__AIT17480__Z (opt11)
gggagaaagcuuaccaugggcaaccgccacgccaaauccaccaaagucgacgaacaccaacgcgcccaccucguccccgacgccucccaccuaggcccccaauucugcaaauccugcugguucgaaaaccgcggccucgucgaaugcaacaaccacuaccucugccucaacugccucucccuccuccucuccgucuccucccgcugccccaucugcaaaaugccccuccccaccaaacucaaagccgccgcccaaccauccgcccccuccaccgaagucauccaauccaccacccccccccccuacacccccuaaggacuaguuauaagacugacuagcccgaugggccucccaacgggcccuccuccccuccuugcaccgagauuaauaaaaaaaaaaaaaaaaaaaaaaaaaaaaaaaaaaaaaaaaaaaaaaaaaaaaaaaaaaaaaaaaugcaucccccccccccccccccccccccccccccccaaaggcucuuuucagagccaccagaauu

SEQ ID NO: 13788 - RNA, 517 nt, Artificial Sequence
  mRNA product Design i-3 comprising derived and/or modified sequence from LASV(Lassa virus/H.sapiens-wt/NGA/2016/ISTH_0017;Clade II)__AVO03713__Z (opt11)
gggagaaagcuuaccaugggcaaccgccaagccaaauccaccaaagucgacgaacaccaacgcgcccaccucguccccgacgccucccaccucggcccccaauucugcaaauccugcugguucgaaaaccgcggccucgucgaaugcaacaaccacuaccucugccucaacugccucucccuccuccucuccgucuccucccgcugccccaucugcaaaaugccccuccccaccaaacucaaagccgccacccaacccuccgcccccuccaccgaagucaaccaaaacaccacccccccccccuacacccccuaaggacuaguuauaagacugacuagcccgaugggccucccaacgggcccuccuccccuccuugcaccgagauuaauaaaaaaaaaaaaaaaaaaaaaaaaaaaaaaaaaaaaaaaaaaaaaaaaaaaaaaaaaaaaaaaaugcaucccccccccccccccccccccccccccccccaaaggcucuuuucagagccaccagaauu

SEQ ID NO: 13789 - RNA, 517 nt, Artificial Sequence
  mRNA product Design i-3 comprising derived and/or modified sequence from LASV(Lassa virus/H.sapiens-wt/NGA/2018/ISTH_0959;Clade II)__AVV65084__Z (opt11)
gggagaaagcuuaccaugggcaacaaacaagccaaauccaccaaagucgacgaacaccaacgcgcccaccucguccccgacgccucccaccucggcccccaauucugcaaauccugcugguucgaaaaccgcggccucgucgaaugcaacaaccacuaccucugccucaacugccucucccuccuccucuccgucuccucccgcugccccaucugcaaaaugccccuccccaccaaacucaaagccgccgcccaacccuccgcccccuccaccgaagccauccaauccaccacccccccccccuacacccccuaaggacuaguuauaagacugacuagcccgaugggccucccaacgggcccuccuccccuccuugcaccgagauuaauaaaaaaaaaaaaaaaaaaaaaaaaaaaaaaaaaaaaaaaaaaaaaaaaaaaaaaaaaaaaaaaaugcaucccccccccccccccccccccccccccccccaaaggcucuuuucagagccaccagaauu

SEQ ID NO: 13790 - RNA, 517 nt, Artificial Sequence
  mRNA product Design i-3 comprising derived and/or modified sequence from LASV(LASV003-NIG-2008;Clade II)__AIT17578__Z (opt11)
gggagaaagcuuaccaugggcaaccgccaagccaaauccaccaaagucgacgaacaccaacgcgcccaccucguccccgacgccucccaccucggcccccaauucugcaaaucaugcugguucgaaaacaaaggccucgucgaaugcaacaaccacuaccucugccucaacugccucucacuccuccucuccgucuccucccgcugccccaucugcaaaaugccccuccccaccaaacuccgcgccgccgcccaacccuccgcccccuccaccgaauccgcccaaaacaccgcccccccccccuacgcccccuaaggacuaguuauaagacugacuagcccgaugggccucccaacgggcccuccuccccuccuugcaccgagauuaauaaaaaaaaaaaaaaaaaaaaaaaaaaaaaaaaaaaaaaaaaaaaaaaaaaaaaaaaaaaaaaaaugcaucccccccccccccccccccccccccccccccaaaggcucuuuucagagccaccagaauu

SEQ ID NO: 13791 - RNA, 517 nt, Artificial Sequence
  mRNA product Design i-3 comprising derived and/or modified sequence from LASV(LASV035-NIG-2009;Clade II)__AIT17586__Z (opt11)
gggagaaagcuuaccaugggcaacaaacaagccaaauccaccaaagucgacgaacaccaacgcgcccaccucguccccgacgccucccaccucggcccccaauucugcaaauccugcugguucgaaaaccgcggccucgucgaaugcaacaaccacuaccucugccucaacugccucucccuccuccucuccgucuccucccgcugccccaucugcaaaaugccccuccccacccgccucaaagccgccgcccaacccuccgcccccuccaccgaagucacccaaaacaccacccccccccccuacacccccuaaggacuaguuauaagacugacuagcccgaugggccucccaacgggcccuccuccccuccuugcaccgagauuaauaaaaaaaaaaaaaaaaaaaaaaaaaaaaaaaaaaaaaaaaaaaaaaaaaaaaaaaaaaaaaaaaugcaucccccccccccccccccccccccccccccccaaaggcucuuuucagagccaccagaauu

SEQ ID NO: 13792 - RNA, 517 nt, Artificial Sequence
  mRNA product Design i-3 comprising derived and/or modified sequence from LASV(LASV1000-NIG-2009;Clade II)__AIT17780__Z (opt11)
gggagaaagcuuaccaugggcaaccgccaaaccaaauccaccaaagucgacgaacaccaacgcgcauaccucguccccgacgccucccuccucggcccccaauucugcaaauccugcugguucgaaaacaaaggccucgucgaaugcaacaaccacuaccucugccucaacugccucucccuccuccucuccgucuccucccgcugccccaucugcaaaaugccccuccccacccgccucaaagccgccgcccaacccuccgccccccccacagaagccauccaaaacaccacccccccccccuacacccccuaaggacuaguuauaagacugacuagcccgaugggccucccaacgggcccuccuccccuccuugcaccgagauuaauaaaaaaaaaaaaaaaaaaaaaaaaaaaaaaaaaaaaaaaaaaaaaaaaaaaaaaaaaaaaaaaaugcaucccccccccccccccccccccccccccccccaaaggcucuuuucagagccaccagaauu

SEQ ID NO: 13793 - RNA, 517 nt, Artificial Sequence
  mRNA product Design i-3 comprising derived and/or modified sequence from LASV(LASV221-NIG-2010;Clade II)__AIT17622__Z (opt11)
gggagaaagcuuaccaugggcaaccgccaagccaaauccaccaaagucgacgaacaccaacgcgcccaccucguccccgacgccucccaccucggcccccaauucugcaaauccugcugguucgaaaaccgcggccucgucgaaugcaacaaccacuaccucugccucaacugccuaucccuccuccucuccgucuccucccgcugccccaucugcaaaaugccccuccccaccaaacucaaagccgccacccaacccuccgcccccuccaccgaagucacccaaaacaccauccccccccccuacucccccuaaggacuaguuauaagacugacuagcccgaugggccucccaacgggcccuccuccccuccuugcaccgagauuaauaaaaaaaaaaaaaaaaaaaaaaaaaaaaaaaaaaaaaaaaaaaaaaaaaaaaaaaaaaaaaaaaugcaucccccccccccccccccccccccccccccccaaaggcucuuuucagagccaccagaauu

SEQ ID NO: 13794 - RNA, 517 nt, Artificial Sequence
  mRNA product Design i-3 comprising derived and/or modified sequence from LASV(LASV237-NIG-2010;Clade II)__AIT17636__Z (opt11)
gggagaaagcuuaccaugggcaaccgccaagccaaauccaccaaagucgacgaacaccaacgcgcccaccuaguccccgacgccucacaccucggcccccaauucugcaaauccugcugguucgaaaaccgcggccucgucgaaugcaacaaccacuaccucugccucaacugccucucccuccuccucuccgucuccucccgcugccccaucugcaaaaugccccuccccaccaaacucaaagccgcagcccaacccuccgcccccucaaucgaaaccauccaaaacaccacacccccccccuacacccccuaaggacuaguuauaagacugacuagcccgaugggccucccaacgggcccuccuccccuccuugcaccgagauuaauaaaaaaaaaaaaaaaaaaaaaaaaaaaaaaaaaaaaaaaaaaaaaaaaaaaaaaaaaaaaaaaaugcaucccccccccccccccccccccccccccccccaaaggcucuuuucagagccaccagaauu

SEQ ID NO: 13795 - RNA, 517 nt, Artificial Sequence
  mRNA product Design i-3 comprising derived and/or modified sequence from LASV(LASV253-NIG-2011;Clade II)__AIT17668__Z (opt11)
gggagaaagcuuaccaugggcaaccgccaagccaaauccacaaaagucgacgaacaccaacgcgcccaccucguccccgacgccucccaccucggcccccaauucugcaaauccugcugguucgaaaacaaaggccucgucgaaugcaacaaccacuaccucugccucaacugccucucccuccuccucuccgucuccucccgcugccccaucugcaaaaugccccuccccaccaaacucaaaaccaccgcccaacccuccgccccccccaccgaagccgccaaaaacaccgcccccccccccuacgcccccuaaggacuaguuauaagacugacuagcccgaugggccucccaacgggcccuccuccccuccuugcaccgagauuaauaaaaaaaaaaaaaaaaaaaaaaaaaaaaaaaaaaaaaaaaaaaaaaaaaaaaaaaaaaaaaaaaugcaucccccccccccccccccccccccccccccccaaaggcucuuuucagagccaccagaauu

SEQ ID NO: 13796 - RNA, 517 nt, Artificial Sequence
  mRNA product Design i-3 comprising derived and/or modified sequence from LASV(G1180-SLE-2010;Clade IV)__AIT17166__Z (opt11)
gggagaaagcuuaccaugggcaacaaacaagccaaagcccccgaagccaaagacuccccccgcgccucccucauccccgacgccacccaccucggcccccaauucugcaaauccugcugguucgaaaccaaaggccucgucgaaugcaacaaccacuaccucugccucaacugccucacccuccuccucuccgucuccaaccgcugccccaucugcaaaaugccccuccccaccaaacuccgccccuccgccacccccaccgccccccccaccgaagccgccgacuccaucggccccccccccuacucccccuaaggacuaguuauaagacugacuagcccgaugggccucccaacgggcccuccuccccuccuugcaccgagauuaauaaaaaaaaaaaaaaaaaaaaaaaaaaaaaaaaaaaaaaaaaaaaaaaaaaaaaaaaaaaaaaaaugcaucccccccccccccccccccccccccccccccaaaggcucuuuucagagccaccagaauu

SEQ ID NO: 13797 - RNA, 517 nt, Artificial Sequence
  mRNA product Design i-3 comprising derived and/or modified sequence from LASV(G1442-SLE-2011;Clade IV)__AIT17178__Z (opt11)
gggagaaagcuuaccaugggcaacaaacaagccaaagccuccgaagccaaagacuccccccgcgccucccucauccccgacgccacccaccucggcccccaauucugcaaauccugcugguucgaaaacaaaggccucgucgaaugcaacaaccacuaccucugccucaacugccucucccuccuccucuccgucuccucccgcugccccaucugcaaaaugccccuccccacccgccuccgccccuccaccgcccccaccgcaccccccgcccgcgccggcgacaacaucaaacccccccccuacucccccuaaggacuaguuauaagacugacuagcccgaugggccucccaacgggcccuccuccccuccuugcaccgagauuaauaaaaaaaaaaaaaaaaaaaaaaaaaaaaaaaaaaaaaaaaaaaaaaaaaaaaaaaaaaaaaaaaugcaucccccccccccccccccccccccccccccccaaaggcucuuuucagagccaccagaauu

SEQ ID NO: 13798 - RNA, 517 nt, Artificial Sequence
  mRNA product Design i-3 comprising derived and/or modified sequence from LASV(G502-SLE-2009;Clade IV)__AIT17124__Z (opt11)
gggagaaagcuuaccaugggcaacaaacaagucaaaacccccgaagccaaagacuccccccgcgccucccucauccccgacgccacccaccucggcccccaauucugcaaauccugcugguucgaaaacaaaggccucgucgaaugcaacaaccacuaccucugccucaacugccucacccuccuccucuccgucggcaaccgcugccccaucugcaaaaugccccuccccaccaaacuccgccccuccgucacccccaccgccccccccacccgcgccgccgacuccaucggccccccccccuacucccccuaaggacuaguuauaagacugacuagcccgaugggccucccaacgggcccuccuccccuccuugcaccgagauuaauaaaaaaaaaaaaaaaaaaaaaaaaaaaaaaaaaaaaaaaaaaaaaaaaaaaaaaaaaaaaaaaaugcaucccccccccccccccccccccccccccccccaaaggcucuuuucagagccaccagaauu

SEQ ID NO: 13799 - RNA, 517 nt, Artificial Sequence
  mRNA product Design i-3 comprising derived and/or modified sequence from LASV(G733-SLE-2010;Clade IV)__AIT17152__Z (opt11)
gggagaaagcuuaccaugggcaacaaacaagccaaaacccccgaaaccaaagacuccccccgcgccucacucauccccgacgccacccaccucggcccccaauucugcaaauccugcugguucgaaaacaaaggccucgucgaaugcaacaaccacuaccucugccucaacugccucacccuccuccucuccgucuccaaccgcugccccaucugcaaaaugccccuccccaccaaacuccgccccuccaccgcccccaccgccccccccgccggcgccgccgacaacacccgccccccccccuacucccccuaaggacuaguuauaagacugacuagcccgaugggccucccaacgggcccuccuccccuccuugcaccgagauuaauaaaaaaaaaaaaaaaaaaaaaaaaaaaaaaaaaaaaaaaaaaaaaaaaaaaaaaaaaaaaaaaaugcaucccccccccccccccccccccccccccccccaaaggcucuuuucagagccaccagaauu

SEQ ID NO: 13800 - RNA, 529 nt, Artificial Sequence
  mRNA product Design i-3 comprising derived and/or modified sequence from MOPV/LASV reassortant(IGS-1;Clade IV)__AFY05533__Z (opt11)
gggagaaagcuuaccaugggcaaaacccaauccaaaggccaacccuccaccaaccuacucaaagaaaccgaaccccgccaccccgucauccccgacgcccgcggcaccggccccgaauucugcaaauccugcugguucgaacgccgcggccucguccgcugcaacgaccacuaccucugccucaacugccucacccuccuccacaccgucuccgaccgcugccccaucugcaaacacaaacuccccuuccgccucgaacuccaaacccaacccaccgccccccccgaaaucccccccucccaaaaccccccccccuacucccccuaaggacuaguuauaagacugacuagcccgaugggccucccaacgggcccuccuccccuccuugcaccgagauuaauaaaaaaaaaaaaaaaaaaaaaaaaaaaaaaaaaaaaaaaaaaaaaaaaaaaaaaaaaaaaaaaaugcaucccccccccccccccccccccccccccccccaaaggcucuuuucagagccaccagaauu

SEQ ID NO: 13801 - RNA, 517 nt, Artificial Sequence
  mRNA product Design i-3 comprising derived and/or modified sequence from LASV(LM776-SLE-2012;Clade IV)__AIT17824__Z (opt11)
gggagaaagcuuaccaugggcaacaaacaagccaaagccuccgaagaaaaaaacuccccccgcgccucccucauccccgacgccacccaccucggcccccaauucugcaaauccugcugguucgaaaacaaaggccuagucgaaugcaacaaccacuaccucugccucaacugccucacccuccuccucucagucuccaaccgcugccccaucugcaaaaugccccuccccaccaaacuccgccccuccaccacccccaccgccccccccaccggcgccgccgacuccauccgccccccccccuacucccccuaaggacuaguuauaagacugacuagcccgaugggccucccaacgggcccuccuccccuccuugcaccgagauuaauaaaaaaaaaaaaaaaaaaaaaaaaaaaaaaaaaaaaaaaaaaaaaaaaaaaaaaaaaaaaaaaaugcaucccccccccccccccccccccccccccccccaaaggcucuuuucagagccaccagaauu

SEQ ID NO: 13802 - RNA, 517 nt, Artificial Sequence
  mRNA product Design i-3 comprising derived and/or modified sequence from LASV(Mad39;Clade IV)__ANH09743__Z (opt11)
gggagaaagcuuaccaugggcaacaaacaagccaaagccuccgaagucgaagacggcccccgcgccucccucauccccgacgccacccaccucggcccccaauucugcaaauccugcugguucgaaaacaaaucccucgucgaaugcaacaaccacuaccucugccuaaacugccucacccuccuccucuccgucuccaaccgcugccccaucugcaaaaugccccuccccacccgccucaaacccuccgucguccccaccgccccccccacccgcgccggcgacggcacccgccccccccccuacucccccuaaggacuaguuauaagacugacuagcccgaugggccucccaacgggcccuccuccccuccuugcaccgagauuaauaaaaaaaaaaaaaaaaaaaaaaaaaaaaaaaaaaaaaaaaaaaaaaaaaaaaaaaaaaaaaaaaugcaucccccccccccccccccccccccccccccccaaaggcucuuuucagagccaccagaauu

SEQ ID NO: 13803 - RNA, 517 nt, Artificial Sequence
  mRNA product Design i-3 comprising derived and/or modified sequence from LASV(Z0947-SLE-2011;Clade IV)__AIT17838__Z (opt11)
gggagaaagcuuaccaugggcaacaaacaagccaaaguccccgaauccaaagacuccccccgcgccucccucauccccgacgccacccaccucggcccccaauucugcaaauccugcugguucgaaaacaaaggccucgucgaaugcaacaaccacuaccucugccucaacugccucacccuccuccucuccgucuccaaccgcugccccaucugcaaaaugccccuccccaccaaacucaaacccuccgccgcccccaccgccccccccaccggcgccgccgacuccauccgccccccccccuacuccccauaaggacuaguuauaagacugacuagcccgaugggccucccaacgggcccuccuccccuccuugcaccgagauuaauaaaaaaaaaaaaaaaaaaaaaaaaaaaaaaaaaaaaaaaaaaaaaaaaaaaaaaaaaaaaaaaaugcaucccccccccccccccccccccccccccccccaaaggcucuuuucagagccaccagaauu

SEQ ID NO: 13804 - DNA, 62 bp, Artificial Sequence
  5'-UTR of human peroxisomal multifunctional enzyme type 2 lacking the 5'-terminal oligopyrimidine tract (HSD17B4)
gtcccgcagtcggcgtccagcggctctgcttgttcgtgtgtgtgtcgttgcaggccttattc

SEQ ID NO: 13805 - RNA, 62 nt, Artificial Sequence
  5'-UTR of human peroxisomal multifunctional enzyme type 2 lacking the 5'-terminal oligopyrimidine tract (HSD17B4) mRNA
gucccgcagucggcguccagcggcucugcuuguucgugugugugucguugcaggccuuauuc

SEQ ID NO: 13806 - DNA, 42 bp, Artificial Sequence
  5'-UTR of human acid ceramidase lacking the 5'-terminal oligopyrimidine tract (ASAH1)
gcctctgctggagtccggggagtggcgttggctgctagagcg

SEQ ID NO: 13807 - RNA, 42 nt, Artificial Sequence
  5'-UTR of human acid ceramidase lacking the 5'-terminal oligopyrimidine tract (ASAH1) mRNA
gccucugcuggaguccggggaguggcguuggcugcuagagcg

SEQ ID NO: 13808 - DNA, 75 bp, Artificial Sequence
  5'-UTR of human mitochondrial ATP synthase subunit alpha lacking the 5'-terminal oligopyrimidine tract (ATP5A1)
gcggctcggccattttgtcccagtcagtccggaggctgcggctgcagaagtaccgcctgcggagtaactgcaaag

SEQ ID NO: 13809 - RNA, 75 nt, Artificial Sequence
  5'-UTR of human mitochondrial ATP synthase subunit alpha lacking the 5'-terminal oligopyrimidine tract (ATP5A1) mRNA
gcggcucggccauuuugucccagucaguccggaggcugcggcugcagaaguaccgccugcggaguaacugcaaag

SEQ ID NO: 13810 - DNA, 54 bp, Artificial Sequence
  5'-UTR of mouse RIKEN cDNA 2010107E04 gene (Mp68, 2010107E04Rik)
ctttcccattctgtagcagaatttggtgttgcctgtggtcttggtcccgcggag

SEQ ID NO: 13811 - RNA, 54 nt, Artificial Sequence
  5'-UTR of mouse RIKEN cDNA 2010107E04 gene (Mp68, 2010107E04Rik) mRNA
cuuucccauucuguagcagaauuugguguugccuguggucuuggucccgcggag

SEQ ID NO: 13812 - DNA, 81 bp, Artificial Sequence
  5'-UTR of mouse NADH dehydrogenase (ubiquinone) 1 alpha subcomplex, 4 (Ndufa4)
gtccgctcagccaggttgcagaagcggcttagcgtgtgtcctaatcttctctctgcgtgtaggtaggcctgtgccgcaaac

SEQ ID NO: 13813 - RNA, 81 nt, Artificial Sequence
  5'-UTR of mouse NADH dehydrogenase (ubiquinone) 1 alpha subcomplex, 4 (Ndufa4) mRNA
guccgcucagccagguugcagaagcggcuuagcguguguccuaaucuucucucugcguguagguaggccugugccgcaaac

SEQ ID NO: 13814 - DNA, 108 bp, Artificial Sequence
  5'-UTR of mouse nitric oxide synthase interacting protein (Nosip)
ctcctgtcgggcggaagtaggaggagtagagtttaaaaacagtactctttttccggttcgggacgtagttgaagcaacgacaagccggataaccgctcttgagacagg

SEQ ID NO: 13815 - RNA, 108 nt, Artificial Sequence
  5'-UTR of mouse nitric oxide synthase interacting protein (Nosip) mRNA
cuccugucgggcggaaguaggaggaguagaguuuaaaaacaguacucuuuuuccgguucgggacguaguugaagcaacgacaagccggauaaccgcucuugagacagg

SEQ ID NO: 13816 - DNA, 84 bp, Artificial Sequence
  5'-UTR of mouse ribosomal protein L31 (Rpl31)
cccgtgacccggaagttgtacggctacgcgactttccctcccacaaaccctcgcgcccttcctttcctacttgggcccggcaga

SEQ ID NO: 13817 - RNA, 84 nt, Artificial Sequence
  5'-UTR of mouse ribosomal protein L31 (Rpl31) mRNA
cccgugacccggaaguuguacggcuacgcgacuuucccucccacaaacccucgcgcccuuccuuuccuacuugggcccggcaga

SEQ ID NO: 13818 - DNA, 159 bp, Artificial Sequence
  5'-UTR of mouse solute carrier family 7 (cationic amino acid transporter, y+ system), member 3 (Slc7a3)
gggcgcttggcttgcaaggaccctgagctgcggcattgaagcacacccaacccaactcgactgaagtcagcctcactgaaccggatctgagaatcttctctctctgggcttgccagggctctccgaacctagctagcatcctcttcaattccaactaga

SEQ ID NO: 13819 - RNA, 159 nt, Artificial Sequence
  5'-UTR of mouse solute carrier family 7 (cationic amino acid transporter, y+ system), member 3 (Slc7a3) mRNA
gggcgcuuggcuugcaaggacccugagcugcggcauugaagcacacccaacccaacucgacugaagucagccucacugaaccggaucugagaaucuucucucucugggcuugccagggcucuccgaaccuagcuagcauccucuucaauuccaacuaga

SEQ ID NO: 13820 - DNA, 102 bp, Artificial Sequence
  5'-UTR of human tubulin beta 4B class Ivb (TUBB4B)
atataagcgttggcggagcgtcggttgtagcactctgcgcgcccgctcttctgctgctgtttgtctacttcctcctgcttccccgccgccgccgccgccatc

SEQ ID NO: 13821 - RNA, 102 nt, Artificial Sequence
  5'-UTR of human tubulin beta 4B class Ivb (TUBB4B) mRNA
auauaagcguuggcggagcgucgguuguagcacucugcgcgcccgcucuucugcugcuguuugucuacuuccuccugcuuccccgccgccgccgccgccauc

SEQ ID NO: 13822 - DNA, 222 bp, Artificial Sequence
  5'-UTR of mouse ubiquilin 2 (Ubqln2)
cggagacggcctgcaggacctgctctctcagccctcagccgaggcctacgccgagccgagtgcgcagccgacgaccgggaggagccgcagccttcaactctgaggtactgtgatccgcgctgcccgccgggccgccccagtccgctgctgcggcacctccttccctcgcgccctcttcgctcgccagcgccttccctgtgagcctgcgtcaccgcggccgcc

SEQ ID NO: 13823 - RNA, 222 nt, Artificial Sequence
  5'-UTR of mouse ubiquilin 2 (Ubqln2)  mRNA
cggagacggccugcaggaccugcucucucagcccucagccgaggccuacgccgagccgagugcgcagccgacgaccgggaggagccgcagccuucaacucugagguacugugauccgcgcugcccgccgggccgccccaguccgcugcugcggcaccuccuucccucgcgcccucuucgcucgccagcgccuucccugugagccugcgucaccgcggccgcc

SEQ ID NO: 13824 - DNA, 42 bp, Artificial Sequence
  5'-UTR of human ribosomal protein Large 32 lacking the 5'-terminal oligopyrimidine tract (RPL32, 32L4)
ggcgctgcctacggaggtggcagccatctccttctcggcatc

SEQ ID NO: 13825 - RNA, 42 nt, Artificial Sequence
  5'-UTR of human ribosomal protein Large 32 lacking the 5'-terminal oligopyrimidine tract (RPL32, 32L4) mRNA
ggcgcugccuacggagguggcagccaucuccuucucggcauc

SEQ ID NO: 13826 - DNA, 57 bp, Artificial Sequence
  3'-UTR of human proteasome subunit beta 3 (PSMB3)
ccctgttcccagagcccacttttttttctttttttgaaataaaatagcctgtctttc

SEQ ID NO: 13827 - RNA, 57 nt, Artificial Sequence
  3'-UTR of human proteasome subunit beta 3 (PSMB3) mRNA
cccuguucccagagcccacuuuuuuuucuuuuuuugaaauaaaauagccugucuuuc

SEQ ID NO: 13828 - DNA, 121 bp, Artificial Sequence
  3'-UTR of human caspase 1 (CASP1)
aataaggaaactgtatgaatgtctgtgggcaggaagtgaagagatccttctgtaaaggtttttggaattatgtctgctgaataataaacttttttgaaataataaatctggtagaaaaatg

SEQ ID NO: 13829 - RNA, 121 nt, Artificial Sequence
  3'-UTR of human caspase 1 (CASP1) mRNA
aauaaggaaacuguaugaaugucugugggcaggaagugaagagauccuucuguaaagguuuuuggaauuaugucugcugaauaauaaacuuuuuugaaauaauaaaucugguagaaaaaug

SEQ ID NO: 13830 - DNA, 137 bp, Artificial Sequence
  3'-UTR of human cytochrome c oxidase subunit 6B1 (COX6B1)
actggctgcatctccctttcctctgtcctccatccttctcccaggatggtgaagggggacctggtacccagtgatccccaccccaggatcctaaatcatgacttacctgctaataaaaactcattggaaaagtgaga

SEQ ID NO: 13831 - RNA, 137 nt, Artificial Sequence
  3'-UTR of human cytochrome c oxidase subunit 6B1 (COX6B1) mRNA
acuggcugcaucucccuuuccucuguccuccauccuucucccaggauggugaagggggaccugguacccagugauccccaccccaggauccuaaaucaugacuuaccugcuaauaaaaacucauuggaaaagugaga

SEQ ID NO: 13832 - DNA, 353 bp, Artificial Sequence
  3'-UTR of mouse GNAS (guanine nucleotide binding protein, alpha stimulating) complex locus (Gnas)
gaagggaacacccaaatttaattcagccttaagcacaattaattaagagtgaaacgtaattgtacaagcagttggtcacccaccatagggcatgatcaacaccgcaacctttcctttttcccccagtgattctgaaaaacccctcttcccttcagcttgcttagatgttccaaatttagtaagcttaaggcggcctacagaagaaaaagaaaaaaaaggccacaaaagttccctctcactttcagtaaataaaataaaagcagcaacagaaataaagaaataaatgaaattcaaaatgaaataaatattgtgttgtgcagcattaaaaaatcaataaaaattaaaaatgagca

SEQ ID NO: 13833 - RNA, 353 nt, Artificial Sequence
  3'-UTR of mouse GNAS (guanine nucleotide binding protein, alpha stimulating) complex locus (Gnas) mRNA
gaagggaacacccaaauuuaauucagccuuaagcacaauuaauuaagagugaaacguaauuguacaagcaguuggucacccaccauagggcaugaucaacaccgcaaccuuuccuuuuucccccagugauucugaaaaaccccucuucccuucagcuugcuuagauguuccaaauuuaguaagcuuaaggcggccuacagaagaaaaagaaaaaaaaggccacaaaaguucccucucacuuucaguaaauaaaauaaaagcagcaacagaaauaaagaaauaaaugaaauucaaaaugaaauaaauauuguguugugcagcauuaaaaaaucaauaaaaauuaaaaaugagca

SEQ ID NO: 13834 - DNA, 133 bp, Artificial Sequence
  3'-UTR of mouse NADH dehydrogenase (ubiquinone) 1 alpha subcomplex, 1 (Ndufa1)
ggaagcattttcctggctgattaaaagaaattactcagctatggtcatctgttcctgttagaaggctatgcagcatattatatactatgcgcatgttatgaaatgcataataaaaaattttaaaaaatctaaa

SEQ ID NO: 13835 - RNA, 133 nt, Artificial Sequence
  3'-UTR of mouse NADH dehydrogenase (ubiquinone) 1 alpha subcomplex, 1 (Ndufa1) mRNA
ggaagcauuuuccuggcugauuaaaagaaauuacucagcuauggucaucuguuccuguuagaaggcuaugcagcauauuauauacuaugcgcauguuaugaaaugcauaauaaaaaauuuuaaaaaaucuaaa

SEQ ID NO: 13836 - DNA, 70 bp, Artificial Sequence
  3'-UTR of human ribosomal protein S9 (RPS9)
gtccacctgtccctcctgggctgctggattgtctcgttttcctgccaaataaacaggatcagcgctttac

SEQ ID NO: 13837 - RNA, 70 nt, Artificial Sequence
  3'-UTR of human ribosomal protein S9 (RPS9) mRNA
guccaccugucccuccugggcugcuggauugucucguuuuccugccaaauaaacaggaucagcgcuuuac

SEQ ID NO: 13838 - DNA, 187 bp, Artificial Sequence
  3'-UTR ALB7
gcatcacatttaaaagcatctcagcctaccatgagaataagagaaagaaaatgaagatcaatagcttattcatctctttttctttttcgttggtgtaaagccaacaccctgtctaaaaaacataaatttctttaatcattttgcctcttttctctgtgcttcaattaataaaaaatggaaagaacct

SEQ ID NO: 13839 - RNA, 187 nt, Artificial Sequence
  3'-UTR ALB7 mRNA
gcaucacauuuaaaagcaucucagccuaccaugagaauaagagaaagaaaaugaagaucaauagcuuauucaucucuuuuucuuuuucguugguguaaagccaacacccugucuaaaaaacauaaauuucuuuaaucauuuugccucuuuucucugugcuucaauuaauaaaaaauggaaagaaccu

SEQ ID NO: 13840 - DNA, 44 bp, Artificial Sequence
  Center, alpha-complex-binding portion of the 3'-UTR of an alpha-globin gene (muag)
gcccgatgggcctcccaacgggccctcctcccctccttgcaccg

SEQ ID NO: 13841 - RNA, 44 nt, Artificial Sequence
  Center, alpha-complex-binding portion of the 3'-UTR of an alpha-globin gene (muag) mRNA
gcccgaugggccucccaacgggcccuccuccccuccuugcaccg

SEQ ID NO: 13842 - DNA, 24 bp, Artificial Sequence
  histone stem-loop sequence (histoneSL, hSL)
caaaggctcttttcagagccacca

SEQ ID NO: 13843 - RNA, 24 nt, Artificial Sequence
  histone stem-loop sequence (histoneSL, hSL) mRNA
caaaggcucuuuucagagccacca

SEQ ID NO: 13844 - DNA, 13 bp, Artificial Sequence
  Kozak
gccgccaccatgg

SEQ ID NO: 13845 - RNA, 13 nt, Artificial Sequence
  Kozak mRNA
gccgccaccaugg

SEQ ID NO: 13846 - RNA, 6 nt, Artificial Sequence
  mRNA 5'-end
gggaga

SEQ ID NO: 13847 - RNA, 6 nt, Artificial Sequence
  mRNA 5'-end
aggaga

SEQ ID NO: 13848 - RNA, 99 nt, Artificial Sequence
  mRNA 3'-end A75-histoneSL
aaaaaaaaaaaaaaaaaaaaaaaaaaaaaaaaaaaaaaaaaaaaaaaaaaaaaaaaaaaaaaaaaaaaaaaaaaacaaaggcucuuuucagagccacca

SEQ ID NO: 13849 - RNA, 102 nt, Artificial Sequence
  mRNA 3'-end U3-A75-histoneSL
uuuaaaaaaaaaaaaaaaaaaaaaaaaaaaaaaaaaaaaaaaaaaaaaaaaaaaaaaaaaaaaaaaaaaaaaaaaaaacaaaggcucuuuucagagccacca

SEQ ID NO: 13850 - RNA, 178 nt, Artificial Sequence
  mRNA 3'-end A154-histoneSL
aaaaaaaaaaaaaaaaaaaaaaaaaaaaaaaaaaaaaaaaaaaaaaaaaaaaaaaaaaaaaaaaaaaaaaaaaaaaaaaaaaaaaaaaaaaaaaaaaaaaaaaaaaaaaaaaaaaaaaaaaaaaaaaaaaaaaaaaaaaaaaaaaaaaaaaaaacaaaggcucuuuucagagccacca

SEQ ID NO: 13851 - RNA, 181 nt, Artificial Sequence
  mRNA 3'-end U3-A154-histoneSL
uuuaaaaaaaaaaaaaaaaaaaaaaaaaaaaaaaaaaaaaaaaaaaaaaaaaaaaaaaaaaaaaaaaaaaaaaaaaaaaaaaaaaaaaaaaaaaaaaaaaaaaaaaaaaaaaaaaaaaaaaaaaaaaaaaaaaaaaaaaaaaaaaaaaaaaaaaaaacaaaggcucuuuucagagccacca

SEQ ID NO: 13852 - RNA, 101 nt, Artificial Sequence
  mRNA 3'-end N2-A75-histoneSL
agaaaaaaaaaaaaaaaaaaaaaaaaaaaaaaaaaaaaaaaaaaaaaaaaaaaaaaaaaaaaaaaaaaaaaaaaaaacaaaggcucuuuucagagccacca

SEQ ID NO: 13853 - RNA, 99 nt, Artificial Sequence
  mRNA 3'-end histoneSL-A75
caaaggcucuuuucagagccaccaaaaaaaaaaaaaaaaaaaaaaaaaaaaaaaaaaaaaaaaaaaaaaaaaaaaaaaaaaaaaaaaaaaaaaaaaaaa

SEQ ID NO: 13854 - RNA, 124 nt, Artificial Sequence
  mRNA 3'-end histoneSL-A100
caaaggcucuuuucagagccaccaaaaaaaaaaaaaaaaaaaaaaaaaaaaaaaaaaaaaaaaaaaaaaaaaaaaaaaaaaaaaaaaaaaaaaaaaaaaaaaaaaaaaaaaaaaaaaaaaaaaa

SEQ ID NO: 13855 - RNA, 170 nt, Artificial Sequence
  mRNA 3'-end histoneSL-A146
caaaggcucuuuucagagccaccaaaaaaaaaaaaaaaaaaaaaaaaaaaaaaaaaaaaaaaaaaaaaaaaaaaaaaaaaaaaaaaaaaaaaaaaaaaaaaaaaaaaaaaaaaaaaaaaaaaaaaaaaaaaaaaaaaaaaaaaaaaaaaaaaaaaaaaaaaaaaaaaaaa

SEQ ID NO: 13856 - RNA, 136 nt, Artificial Sequence
  mRNA 3'-end N8-A64-N5-C30-histoneSL-N5
agauuaauaaaaaaaaaaaaaaaaaaaaaaaaaaaaaaaaaaaaaaaaaaaaaaaaaaaaaaaaaaaaaaaaugcaucccccccccccccccccccccccccccccccaaaggcucuuuucagagccaccagaauu

SEQ ID NO: 13857 - RNA, 131 nt, Artificial Sequence
  mRNA 3'-end N8-A64-N5-C30-histoneSL
agauuaauaaaaaaaaaaaaaaaaaaaaaaaaaaaaaaaaaaaaaaaaaaaaaaaaaaaaaaaaaaaaaaaaugcaucccccccccccccccccccccccccccccccaaaggcucuuuucagagccacca

SEQ ID NO: 13858 - RNA, 105 nt, Artificial Sequence
  mRNA 3'-end N8-A64-N5-C4-histoneSL
agauuaauaaaaaaaaaaaaaaaaaaaaaaaaaaaaaaaaaaaaaaaaaaaaaaaaaaaaaaaaaaaaaaaaugcaucccccaaaggcucuuuucagagccacca

SEQ ID NO: 13859 - RNA, 115 nt, Artificial Sequence
  mRNA 3'-end N8-A64-N5-C14-histoneSL
agauuaauaaaaaaaaaaaaaaaaaaaaaaaaaaaaaaaaaaaaaaaaaaaaaaaaaaaaaaaaaaaaaaaaugcaucccccccccccccccaaaggcucuuuucagagccacca

SEQ ID NO: 13860 - RNA, 134 nt, Artificial Sequence
  mRNA 3'-end N6-A64-N5-C30-histoneSL-N5
agaucuaaaaaaaaaaaaaaaaaaaaaaaaaaaaaaaaaaaaaaaaaaaaaaaaaaaaaaaaaaaaaaaaugcaucccccccccccccccccccccccccccccccaaaggcucuuuucagagccaccagaauu

SEQ ID NO: 13861 - RNA, 129 nt, Artificial Sequence
  mRNA 3'-end N6-A64-N5-C30-histoneSL
agaucuaaaaaaaaaaaaaaaaaaaaaaaaaaaaaaaaaaaaaaaaaaaaaaaaaaaaaaaaaaaaaaaaugcaucccccccccccccccccccccccccccccccaaaggcucuuuucagagccacca

SEQ ID NO: 13862 - RNA, 103 nt, Artificial Sequence
  mRNA 3'-end N6-A64-N5-C4-histoneSL
agaucuaaaaaaaaaaaaaaaaaaaaaaaaaaaaaaaaaaaaaaaaaaaaaaaaaaaaaaaaaaaaaaaaugcaucccccaaaggcucuuuucagagccacca

SEQ ID NO: 13863 - RNA, 113 nt, Artificial Sequence
  mRNA 3'-end N6-A64-N5-C14-histoneSL
agaucuaaaaaaaaaaaaaaaaaaaaaaaaaaaaaaaaaaaaaaaaaaaaaaaaaaaaaaaaaaaaaaaaugcaucccccccccccccccaaaggcucuuuucagagccacca

SEQ ID NO: 13864 - RNA, 128 nt, Artificial Sequence
  mRNA 3'-end A64-N5-C30-histoneSL-N5
aaaaaaaaaaaaaaaaaaaaaaaaaaaaaaaaaaaaaaaaaaaaaaaaaaaaaaaaaaaaaaaaugcaucccccccccccccccccccccccccccccccaaaggcucuuuucagagccaccagaauu

SEQ ID NO: 13865 - RNA, 123 nt, Artificial Sequence
  mRNA 3'-end A64-N5-C30-histoneSL
aaaaaaaaaaaaaaaaaaaaaaaaaaaaaaaaaaaaaaaaaaaaaaaaaaaaaaaaaaaaaaaaugcaucccccccccccccccccccccccccccccccaaaggcucuuuucagagccacca

SEQ ID NO: 13866 - RNA, 97 nt, Artificial Sequence
  mRNA 3'-end A64-N5-C4-histoneSL
aaaaaaaaaaaaaaaaaaaaaaaaaaaaaaaaaaaaaaaaaaaaaaaaaaaaaaaaaaaaaaaaugcaucccccaaaggcucuuuucagagccacca

SEQ ID NO: 13867 - RNA, 107 nt, Artificial Sequence
  mRNA 3'-end A64-N5-C14-histoneSL
aaaaaaaaaaaaaaaaaaaaaaaaaaaaaaaaaaaaaaaaaaaaaaaaaaaaaaaaaaaaaaaaugcaucccccccccccccccaaaggcucuuuucagagccacca

SEQ ID NO: 13868 - protein, 14 aa, Artificial Sequence
  derived and/or modified protein sequence (artificial) from Artificial____CR12C
CRRRRRRRRRRRRC

SEQ ID NO: 13869 - protein, 13 aa, Artificial Sequence
  derived and/or modified protein sequence (artificial) from Artificial____CR12
CRRRRRRRRRRRR

SEQ ID NO: 13870 - protein, 14 aa, Artificial Sequence
  derived and/or modified protein sequence (artificial) from Artificial____W peptide
WRRRRRRRRRRRRC

SEQ ID NO: 13871 - protein, 18 aa, Artificial Sequence
  derived and/or modified protein sequence (artificial) from Artificial____PB83
CHHHHHHRRRRHHHHHHC

SEQ ID NO: 13872 - protein, 18 aa, Artificial Sequence
  derived and/or modified protein sequence (artificial) from Artificial____CGH5R4H5GC
CGHHHHHRRRRHHHHHGC

SEQ ID NO: 13873 - RNA, 134 nt, Artificial Sequence
  mRNA 3'-end N6-A64-N5-C30-histoneSL-N5
auuaauaaaaaaaaaaaaaaaaaaaaaaaaaaaaaaaaaaaaaaaaaaaaaaaaaaaaaaaaaaaaaaaaugcaucccccccccccccccccccccccccccccccaaaggcucuuuucagagccaccagaauu

SEQ ID NO: 13874 - RNA, 99 nt, Artificial Sequence
  mRNA 3'-end N6-histoneSL-A64-N5
auuaaucaaaggcucuuuucagagccaccaaaaaaaaaaaaaaaaaaaaaaaaaaaaaaaaaaaaaaaaaaaaaaaaaaaaaaaaaaaaaaaaagaauu

SEQ ID NO: 13875 - RNA, 99 nt, Artificial Sequence
  mRNA 3'-end N6-histoneSL-A64-N5
agaucucaaaggcucuuuucagagccaccaaaaaaaaaaaaaaaaaaaaaaaaaaaaaaaaaaaaaaaaaaaaaaaaaaaaaaaaaaaaaaaaagaauu

SEQ ID NO: 13876 - RNA, 110 nt, Artificial Sequence
  mRNA 3'-end N12-A64-N5-histoneSL-N5
auuaauagaucuaaaaaaaaaaaaaaaaaaaaaaaaaaaaaaaaaaaaaaaaaaaaaaaaaaaaaaaaaaaaaaaaugcaucaaaggcucuuuucagagccaccagaauu

SEQ ID NO: 13877 - RNA, 100 nt, Artificial Sequence
  mRNA 3'-end A100
aaaaaaaaaaaaaaaaaaaaaaaaaaaaaaaaaaaaaaaaaaaaaaaaaaaaaaaaaaaaaaaaaaaaaaaaaaaaaaaaaaaaaaaaaaaaaaaaaaaa

SEQ ID NO: 13878 - RNA, 130 nt, Artificial Sequence
  mRNA 3'-end N6-histoneSL-A100
auuaaucaaaggcucuuuucagagccaccaaaaaaaaaaaaaaaaaaaaaaaaaaaaaaaaaaaaaaaaaaaaaaaaaaaaaaaaaaaaaaaaaaaaaaaaaaaaaaaaaaaaaaaaaaaaaaaaaaaaa

SEQ ID NO: 13879 - RNA, 130 nt, Artificial Sequence
  mRNA 3'-end N6-histoneSL-A100
agaucucaaaggcucuuuucagagccaccaaaaaaaaaaaaaaaaaaaaaaaaaaaaaaaaaaaaaaaaaaaaaaaaaaaaaaaaaaaaaaaaaaaaaaaaaaaaaaaaaaaaaaaaaaaaaaaaaaaaa

SEQ ID NO: 13880 - protein, 24 aa, Artificial Sequence
  derived and/or modified protein sequence (wt) from Homo sapiens__AAA59606.1__signal peptide_HLA-A2-SP
MAVMAPRTLVLLLSGALALTQTWA

SEQ ID NO: 13881 - protein, 22 aa, Artificial Sequence
  derived and/or modified protein sequence (wt) from Homo sapiens__AAA61213.1__signal peptide_HsPLAT (SP-HsPLAT)
MDAMKRGLCCVLLLCGAVFVSP

SEQ ID NO: 13882 - protein, 27 aa, Artificial Sequence
  derived and/or modified protein sequence (wt) from Homo sapiens__NP_000790.2__signal peptide_HsEPO
MGVHECPAWLWLLLSLLSLPLGLPVLG

SEQ ID NO: 13883 - protein, 18 aa, Artificial Sequence
  derived and/or modified protein sequence (wt) from Homo sapiens__NP_000468.1__signal peptide_HsALB (SP-HsALB)
MKWVTFISLLFLFSSAYS

SEQ ID NO: 13884 - protein, 18 aa, Artificial Sequence
  derived and/or modified protein sequence (wt) from Homo sapiens__AAB59424.1__signal peptide_IgE (SP-IgE)
MDWTWILFLVAAATRVHS

SEQ ID NO: 13885 - protein, 24 aa, Artificial Sequence
  derived and/or modified protein sequence (wt) from Homo sapiens__NP_055022.2__signal peptide_HsCD5
MPMGSLQPLATLYLLGMLVASCLG

SEQ ID NO: 13886 - protein, 20 aa, Artificial Sequence
  derived and/or modified protein sequence (wt) from Homo sapiens__NP_000577.2__signal peptide_HsIL2
MYRMQLLSCIALSLALVTNS

SEQ ID NO: 13887 - protein, 18 aa, Artificial Sequence
  derived and/or modified protein sequence (wt) from Homo sapiens__NP_001020371.3 __signal peptide_HsCTRB2
MAFLWLLSCWALLGTTFG

SEQ ID NO: 13888 - protein, 19 aa, Artificial Sequence
  derived and/or modified protein sequence (wt) from Homo sapiens__BAC87457.1__signal peptide_IgG-HC
MEFGLSWVFLVALFRGVQC

SEQ ID NO: 13889 - protein, 19 aa, Artificial Sequence
  derived and/or modified protein sequence (wt) from Homo sapiens__AAA52897.1__signal peptide_Ig-HC
MDWTWRVFCLLAVTPGAHP

SEQ ID NO: 13890 - protein, 19 aa, Artificial Sequence
  derived and/or modified protein sequence (wt) from Homo sapiens__AAA59018.1__signal peptide_Ig-LC
MAWSPLFLTLITHCAGSWA

SEQ ID NO: 13891 - protein, 17 aa, Artificial Sequence
  derived and/or modified protein sequence (wt) from Gaussia princeps__AAG54095.1__signal peptide_GpLuc
MGVKVLFALICIAVAEA

SEQ ID NO: 13892 - protein, 21 aa, Artificial Sequence
  derived and/or modified protein sequence (wt) from Mus musculus__BAR42292.1__signal peptide_MmIgkappa
METDTLLLWVLLLWVPGSTGD

SEQ ID NO: 13893 - protein, 26 aa, Artificial Sequence
  derived and/or modified protein sequence (wt) from Nepenthes rafflesiana__ABF74624.1__signal peptide_NrChit1
MKTHYSSAILPILTLFVFLSINPSHG

SEQ ID NO: 13894 - protein, 21 aa, Artificial Sequence
  derived and/or modified protein sequence (wt) from Conus leopardus__AAS93426.1__signal peptide_ClLp1.3
MGMRMMFIMFMLVVLATTVVS

SEQ ID NO: 13895 - protein, 24 aa, Artificial Sequence
  derived and/or modified protein sequence (wt) from Nepenthes gracilis__AB114914.1__signal peptide_NgNep1
MASSLYSFLLALSIVYIFVAPTHS

SEQ ID NO: 13896 - protein, 19 aa, Artificial Sequence
  derived and/or modified protein sequence (wt) from Homo sapiens__NP_001691.1__signal peptide_HsAzu1
MTRLTVLALLAGLLASSRA

SEQ ID NO: 13897 - protein, 16 aa, Artificial Sequence
  derived and/or modified protein sequence (wt) from Homo sapiens__AAA51948.1__signal peptide_HsCD33
MPLLLLLPLLWAGALA

SEQ ID NO: 13898 - protein, 19 aa, Artificial Sequence
  derived and/or modified protein sequence (wt) from Vibrio cholerae__BAA06291.1__signal peptide_VcCtxB
MIKLKFGVFFTVLLSSAYA

SEQ ID NO: 13899 - protein, 20 aa, Artificial Sequence
  derived and/or modified protein sequence (wt) from Homo sapiens__NP_001890.1__signal peptide_HsCST4
MARPLCTLLLLMATLAGALA

SEQ ID NO: 13900 - protein, 24 aa, Artificial Sequence
  derived and/or modified protein sequence (wt) from Homo sapiens__AAA59172.1__signal peptide_HsIns-iso1
MALWMRLLPLLALLALWGPDPAAA

SEQ ID NO: 13901 - protein, 17 aa, Artificial Sequence
  derived and/or modified protein sequence (wt) from Homo sapiens__CAA68724.1__signal peptide_HsSPARC
MRAWIFFLLCLAGRALA

SEQ ID NO: 13902 - protein, 17 aa, Artificial Sequence
  derived and/or modified protein sequence (wt) from Inluenza A__ACQ45338.1__signal peptide_H1N1(Netherlands2009)-HA
MKAILVVLLYTFATANA

SEQ ID NO: 13903 - protein, 30 aa, Artificial Sequence
  derived and/or modified protein sequence (wt) from Yellow fever virus__NP_041726.1__signal peptide_YFV
MRGLSSRKRRSHDVLTVQFLILGMLLMTGG

SEQ ID NO: 13904 - protein, 25 aa, Artificial Sequence
  derived and/or modified protein sequence (wt) from Homo sapiens__CAA23783.1__signal peptide_MHCII
MAISGVPVLGFFIIAVLMSAQESWA

SEQ ID NO: 13905 - protein, 24 aa, Artificial Sequence
  derived and/or modified protein sequence (wt) from Japanese Encephalitis virus__AOT85928.1__signal peptide_JEV
MGKRSAGSIMWLASLAVVIACAGA

SEQ ID NO: 13906 - protein, 30 aa, Artificial Sequence
  derived and/or modified protein sequence (wt) from Japanese Encephalitis virus__AOT85928.1__signal peptide_JEV
MGRKQNKRGGNEGSIMWLASLAVVIACAGA

SEQ ID NO: 13907 - protein, 21 aa, Artificial Sequence
  derived and/or modified protein sequence (wt) from Japanese Encephalitis virus__AOT85928.1__signal peptide_JEV
MNEGSIMWLASLAVVIACAGA

SEQ ID NO: 13908 - protein, 24 aa, Artificial Sequence
  derived and/or modified protein sequence (wt) from Japanese encephalitis virus__BAE48356.1__signal peptide_JEV-prM
MLGSNSGQRVVFTILLLLVAPAYS

SEQ ID NO: 13909 - protein, 15 aa, Artificial Sequence
  derived and/or modified protein sequence (wt) from Japanese encephalitis virus__ADN94470.1__signal peptide_JEV-ER
MWLVSLAIVTACAGA

SEQ ID NO: 13910 - protein, 17 aa, Artificial Sequence
  derived and/or modified protein sequence (wt) from Vesicular stomatitis Indiana virus__NP_041715.1 __signal peptide_VSIV-G
MKCLLYLAFLFIGVNCK

SEQ ID NO: 13911 - protein, 17 aa, Artificial Sequence
  derived and/or modified protein sequence (wt) from Vesicular stomatitis Indiana virus__NP_041715.1 __signal peptide_VSIV-G(K17A)
MKCLLYLAFLFIGVNCA

SEQ ID NO: 13912 - protein, 20 aa, Artificial Sequence
  derived and/or modified protein sequence (wt) from Homo sapiens__AAH62704.1__signal peptide_HsIGK@
METPAQLLFLLLLWLPDTTG

SEQ ID NO: 13913 - protein, 20 aa, Artificial Sequence
  derived and/or modified protein sequence (wt) from Homo sapiens__NP_000575.1__signal peptide_HsCXCL8
MTSKLAVALLAAFLISAALC

SEQ ID NO: 13914 - RNA, 72 nt, Artificial Sequence
  derived and/or modified CDS sequence (wt) from Homo sapiens__AAA59606.1__signal peptide_HLA-A2-SP
auggccgucauggcgccccgaacccucguccugcuacucucgggggcucuggcccugacccagaccugggcg

SEQ ID NO: 13915 - RNA, 66 nt, Artificial Sequence
  derived and/or modified CDS sequence (wt) from Homo sapiens__AAA61213.1__signal peptide_HsPLAT (SP-HsPLAT)
auggaugcaaugaagagagggcucugcugugugcugcugcuguguggagcagucuucguuucgccc

SEQ ID NO: 13916 - RNA, 81 nt, Artificial Sequence
  derived and/or modified CDS sequence (wt) from Homo sapiens__NP_000790.2__signal peptide_HsEPO
augggggugcacgaauguccugccuggcuguggcuucuccugucccugcugucgcucccucugggccucccaguccugggc

SEQ ID NO: 13917 - RNA, 54 nt, Artificial Sequence
  derived and/or modified CDS sequence (wt) from Homo sapiens__NP_000468.1__signal peptide_HsALB (SP-HsALB)
augaaguggguaaccuuuauuucccuucuuuuucucuuuagcucggcuuauucc

SEQ ID NO: 13918 - RNA, 54 nt, Artificial Sequence
  derived and/or modified CDS sequence (wt) from Homo sapiens__AAB59424.1__signal peptide_IgE (SP-IgE)
auggacuggaccuggauccuguuccucguggccgccgcgacccgcguccacagc

SEQ ID NO: 13919 - RNA, 72 nt, Artificial Sequence
  derived and/or modified CDS sequence (wt) from Homo sapiens__NP_055022.2__signal peptide_HsCD5
augcccauggggucucugcaaccgcuggccaccuuguaccugcuggggaugcuggucgcuuccugccucgga

SEQ ID NO: 13920 - RNA, 60 nt, Artificial Sequence
  derived and/or modified CDS sequence (wt) from Homo sapiens__NP_000577.2__signal peptide_HsIL2
auguacaggaugcaacuccugucuugcauugcacuaagucuugcacuugucacaaacagu

SEQ ID NO: 13921 - RNA, 54 nt, Artificial Sequence
  derived and/or modified CDS sequence (wt) from Homo sapiens__NP_001020371.3 __signal peptide_HsCTRB2
auggcuuuccucuggcuccucuccugcugggcccuccuggguaccaccuucggc

SEQ ID NO: 13922 - RNA, 57 nt, Artificial Sequence
  derived and/or modified CDS sequence (wt) from Homo sapiens__BAC87457.1__signal peptide_IgG-HC
auggaguuugggcugagcuggguuuuccucguugcucuuuuuagagguguccagugu

SEQ ID NO: 13923 - RNA, 57 nt, Artificial Sequence
  derived and/or modified CDS sequence (wt) from Homo sapiens__AAA52897.1__signal peptide_Ig-HC
auggacuggaccuggagggucuucuguuugcuggcuguaacuccaggcgcccacccc

SEQ ID NO: 13924 - RNA, 57 nt, Artificial Sequence
  derived and/or modified CDS sequence (wt) from Homo sapiens__AAA59018.1__signal peptide_Ig-LC
auggccugguccccucucuuccucacccucaucacucacugugcaggguccugggcc

SEQ ID NO: 13925 - RNA, 51 nt, Artificial Sequence
  derived and/or modified CDS sequence (wt) from Gaussia princeps__AAG54095.1__signal peptide_GpLuc
augggagugaaaguucuuuuugcccuuauuuguauugcuguggccgaggcc

SEQ ID NO: 13926 - RNA, 63 nt, Artificial Sequence
  derived and/or modified CDS sequence (wt) from Mus musculus__BAR42292.1__signal peptide_MmIgkappa
auggagacagacacacuccugcuaugggugcugcugcucuggguuccagguuccacaggugac

SEQ ID NO: 13927 - RNA, 78 nt, Artificial Sequence
  derived and/or modified CDS sequence (wt) from Nepenthes rafflesiana__ABF74624.1__signal peptide_NrChit1
augaagacccauuauucaucagcaauucucccgauccucacccucuucgucuuucucucgaucaauccaucccauggc

SEQ ID NO: 13928 - RNA, 63 nt, Artificial Sequence
  derived and/or modified CDS sequence (wt) from Conus leopardus__AAS93426.1__signal peptide_ClLp1.3
augggcaugcggaugauguucaucauguuuaugcugguugucuuggcaaccacugucguuucc

SEQ ID NO: 13929 - RNA, 72 nt, Artificial Sequence
  derived and/or modified CDS sequence (wt) from Nepenthes gracilis__AB114914.1__signal peptide_NgNep1
auggccucgucgcuguauucuuucuuacucgcauuaucgauaguuuacaucuuuguugccccaacacauucu

SEQ ID NO: 13930 - RNA, 57 nt, Artificial Sequence
  derived and/or modified CDS sequence (wt) from Homo sapiens__NP_001691.1__signal peptide_HsAzu1
augacccggcugacaguccuggcccugcuggcuggucugcuggcguccucgagggcc

SEQ ID NO: 13931 - RNA, 48 nt, Artificial Sequence
  derived and/or modified CDS sequence (wt) from Homo sapiens__AAA51948.1__signal peptide_HsCD33
augccgcugcugcuacugcugccccugcugugggcaggggcccuggcu

SEQ ID NO: 13932 - RNA, 57 nt, Artificial Sequence
  derived and/or modified CDS sequence (wt) from Vibrio cholerae__BAA06291.1__signal peptide_VcCtxB
augauuaaauuaaaauuugguguuuuuuuuacaguuuuacuaucuucagcauaugca

SEQ ID NO: 13933 - RNA, 60 nt, Artificial Sequence
  derived and/or modified CDS sequence (wt) from Homo sapiens__NP_001890.1__signal peptide_HsCST4
auggcccggccucuguguacccugcuacuccugauggcuacccuggcuggggcucuggcc

SEQ ID NO: 13934 - RNA, 72 nt, Artificial Sequence
  derived and/or modified CDS sequence (wt) from Homo sapiens__AAA59172.1__signal peptide_HsIns-iso1
auggcccuguggaugcgccuccugccccugcuggcgcugcuggcccucuggggaccugacccagccgcagcc

SEQ ID NO: 13935 - RNA, 51 nt, Artificial Sequence
  derived and/or modified CDS sequence (wt) from Homo sapiens__CAA68724.1__signal peptide_HsSPARC
augagggccuggaucuucuuucuccuuugccuggccgggagggcucuggca

SEQ ID NO: 13936 - RNA, 51 nt, Artificial Sequence
  derived and/or modified CDS sequence (wt) from Inluenza A__ACQ45338.1__signal peptide_H1N1(Netherlands2009)-HA
augaaggcaauacuaguaguucugcuauauacauuugcaaccgcaaaugca

SEQ ID NO: 13937 - RNA, 90 nt, Artificial Sequence
  derived and/or modified CDS sequence (wt) from Yellow fever virus__NP_041726.1__signal peptide_YFV
augagaggauuguccucaaggaaacgccguucccaugauguucugacugugcaauuccuaauuuugggaaugcuguugaugacgggugga

SEQ ID NO: 13938 - RNA, 75 nt, Artificial Sequence
  derived and/or modified CDS sequence (wt) from Homo sapiens__CAA23783.1__signal peptide_MHCII
auggccauaaguggagucccugugcuaggauuuuucaucauagcugugcugaugagcgcucaggaaucaugggcu

SEQ ID NO: 13939 - RNA, 72 nt, Artificial Sequence
  derived and/or modified CDS sequence (wt) from Japanese Encephalitis virus__AOT85928.1__signal peptide_JEV
auggguaaacggagcgcuggcucaaucauguggcucgcgagcuuggcaguugucauagcuugugcaggagcc

SEQ ID NO: 13940 - RNA, 90 nt, Artificial Sequence
  derived and/or modified CDS sequence (wt) from Japanese Encephalitis virus__AOT85928.1__signal peptide_JEV
augggcagaaagcaaaacaaaagaggaggaaaugaaggcucaaucauguggcucgcgagcuuggcaguugucauagcuugugcaggagcc

SEQ ID NO: 13941 - RNA, 63 nt, Artificial Sequence
  derived and/or modified CDS sequence (wt) from Japanese Encephalitis virus__AOT85928.1__signal peptide_JEV
augaaugaaggcucaaucauguggcucgcgagcuuggcaguugucauagcuugugcaggagcc

SEQ ID NO: 13942 - RNA, 72 nt, Artificial Sequence
  derived and/or modified CDS sequence (wt) from Japanese encephalitis virus__BAE48356.1__signal peptide_JEV-prM
augcuuggcagcaacaguggccaacgugugguguucacuauucucuugcuguuggucgcuccggcuuacagu

SEQ ID NO: 13943 - RNA, 45 nt, Artificial Sequence
  derived and/or modified CDS sequence (wt) from Japanese encephalitis virus__ADN94470.1__signal peptide_JEV-ER
auguggcuugucagcuuggcaaucguaacagcuugugccggagcu

SEQ ID NO: 13944 - RNA, 51 nt, Artificial Sequence
  derived and/or modified CDS sequence (wt) from Vesicular stomatitis Indiana virus__NP_041715.1 __signal peptide_VSIV-G
augaagugccuuuuguacuuagccuuuuuauucauuggggugaauugcaag

SEQ ID NO: 13945 - RNA, 51 nt, Artificial Sequence
  derived and/or modified CDS sequence (wt) from Vesicular stomatitis Indiana virus__NP_041715.1 __signal peptide_VSIV-G(K17A)
augaagugccuuuuguacuuagccuuuuuauucauuggggugaauugcgcc

SEQ ID NO: 13946 - RNA, 60 nt, Artificial Sequence
  derived and/or modified CDS sequence (wt) from Homo sapiens__AAH62704.1__signal peptide_HsIGK@
auggaaaccccagcgcagcuucucuuccuccugcuacucuggcucccagauacuaccgga

SEQ ID NO: 13947 - RNA, 60 nt, Artificial Sequence
  derived and/or modified CDS sequence (wt) from Homo sapiens__NP_000575.1__signal peptide_HsCXCL8
augacuuccaagcuggccguggcucucuuggcagccuuccugauuucugcagcucugugu

SEQ ID NO: 13948 - RNA, 72 nt, Artificial Sequence
  derived and/or modified CDS sequence (opt1) from Homo sapiens__AAA59606.1__signal peptide_HLA-A2-SP
auggccgugauggccccgcggacccugguccuccugcugagcggcgcgcucgcccugacccagacgugggcc

SEQ ID NO: 13949 - RNA, 66 nt, Artificial Sequence
  derived and/or modified CDS sequence (opt1) from Homo sapiens__AAA61213.1__signal peptide_HsPLAT (SP-HsPLAT)
auggacgccaugaagcgcggccugugcugcgugcuccugcugugcggggccgucuucgugagcccc

SEQ ID NO: 13950 - RNA, 81 nt, Artificial Sequence
  derived and/or modified CDS sequence (opt1) from Homo sapiens__NP_000790.2__signal peptide_HsEPO
augggcgugcacgagugccccgccuggcuguggcuccugcugagccuccugucccugccgcucgggcugcccguccugggc

SEQ ID NO: 13951 - RNA, 54 nt, Artificial Sequence
  derived and/or modified CDS sequence (opt1) from Homo sapiens__NP_000468.1__signal peptide_HsALB (SP-HsALB)
augaagugggugaccuucaucagccugcucuuccuguucuccagcgccuacucc

SEQ ID NO: 13952 - RNA, 54 nt, Artificial Sequence; identical to SEQ ID NO: 13918
  derived and/or modified CDS sequence (opt1) from Homo sapiens__AAB59424.1__signal peptide_IgE (SP-IgE)

SEQ ID NO: 13953 - RNA, 72 nt, Artificial Sequence
  derived and/or modified CDS sequence (opt1) from Homo sapiens__NP_055022.2__signal peptide_HsCD5
augcccaugggcagccugcagccgcucgccacccuguaccugcucgggaugcugguggccuccugccugggc

SEQ ID NO: 13954 - RNA, 60 nt, Artificial Sequence
  derived and/or modified CDS sequence (opt1) from Homo sapiens__NP_000577.2__signal peptide_HsIL2
auguaccggaugcagcugcucagcugcaucgcccugucgcuggcgcucgugaccaacagc

SEQ ID NO: 13955 - RNA, 54 nt, Artificial Sequence
  derived and/or modified CDS sequence (opt1) from Homo sapiens__NP_001020371.3 __signal peptide_HsCTRB2
auggccuuccuguggcuccugagcugcugggcccugcucggcaccaccuucggg

SEQ ID NO: 13956 - RNA, 57 nt, Artificial Sequence
  derived and/or modified CDS sequence (opt1) from Homo sapiens__BAC87457.1__signal peptide_IgG-HC
auggaguucggccugagcuggguguuccucgucgcccuguuccgcggggugcagugc

SEQ ID NO: 13957 - RNA, 57 nt, Artificial Sequence
  derived and/or modified CDS sequence (opt1) from Homo sapiens__AAA52897.1__signal peptide_Ig-HC
auggacuggaccuggcgcguguucugccugcucgccgucacccccggcgcccacccg

SEQ ID NO: 13958 - RNA, 57 nt, Artificial Sequence
  derived and/or modified CDS sequence (opt1) from Homo sapiens__AAA59018.1__signal peptide_Ig-LC
auggccuggagcccccuguuccucacccugaucacccacugcgccggcuccugggcg

SEQ ID NO: 13959 - RNA, 51 nt, Artificial Sequence
  derived and/or modified CDS sequence (opt1) from Gaussia princeps__AAG54095.1__signal peptide_GpLuc
augggcgugaagguccuguucgcccucaucugcaucgccguggcggaggcc

SEQ ID NO: 13960 - RNA, 63 nt, Artificial Sequence
  derived and/or modified CDS sequence (opt1) from Mus musculus__BAR42292.1__signal peptide_MmIgkappa
auggagaccgacacccugcuccugugggugcugcuccuguggguccccggcagcacgggggac

SEQ ID NO: 13961 - RNA, 78 nt, Artificial Sequence
  derived and/or modified CDS sequence (opt1) from Nepenthes rafflesiana__ABF74624.1__signal peptide_NrChit1
augaagacccacuacagcuccgccauccugcccauccucacccuguucguguuccugagcaucaacccgucccacggc

SEQ ID NO: 13962 - RNA, 63 nt, Artificial Sequence
  derived and/or modified CDS sequence (opt1) from Conus leopardus__AAS93426.1__signal peptide_ClLp1.3
augggcaugcgcaugauguucaucauguucaugcuggugguccucgccaccaccguggugagc

SEQ ID NO: 13963 - RNA, 72 nt, Artificial Sequence
  derived and/or modified CDS sequence (opt1) from Nepenthes gracilis__AB114914.1__signal peptide_NgNep1
auggccagcucccuguacagcuuccuccuggcccuguccaucguguacaucuucgucgcgcccacccacagc

SEQ ID NO: 13964 - RNA, 57 nt, Artificial Sequence
  derived and/or modified CDS sequence (opt1) from Homo sapiens__NP_001691.1__signal peptide_HsAzu1
augacccgccugaccgugcucgcccugcuggccggccuccuggcgagcucccgggcc

SEQ ID NO: 13965 - RNA, 48 nt, Artificial Sequence
  derived and/or modified CDS sequence (opt1) from Homo sapiens__AAA51948.1__signal peptide_HsCD33
augccccugcuccugcugcucccgcugcugugggccggcgcccucgcg

SEQ ID NO: 13966 - RNA, 57 nt, Artificial Sequence
  derived and/or modified CDS sequence (opt1) from Vibrio cholerae__BAA06291.1__signal peptide_VcCtxB
augaucaagcugaaguucggcguguucuucaccguccuccugagcuccgccuacgcc

SEQ ID NO: 13967 - RNA, 60 nt, Artificial Sequence
  derived and/or modified CDS sequence (opt1) from Homo sapiens__NP_001890.1__signal peptide_HsCST4
auggcccgcccccugugcacccuccugcugcucauggccacccuggcgggcgcccuggcc

SEQ ID NO: 13968 - RNA, 72 nt, Artificial Sequence
  derived and/or modified CDS sequence (opt1) from Homo sapiens__AAA59172.1__signal peptide_HsIns-iso1
auggcccuguggaugcgccuccugccccugcucgcccugcuggcgcucuggggcccggaccccgccgccgcc

SEQ ID NO: 13969 - RNA, 51 nt, Artificial Sequence
  derived and/or modified CDS sequence (opt1) from Homo sapiens__CAA68724.1__signal peptide_HsSPARC
augcgcgccuggaucuucuuccugcucugccuggccggccgggcccuggcc

SEQ ID NO: 13970 - RNA, 51 nt, Artificial Sequence
  derived and/or modified CDS sequence (opt1) from Inluenza A__ACQ45338.1__signal peptide_H1N1(Netherlands2009)-HA
augaaggccauccuggugguccuccuguacaccuucgccaccgcgaacgcc

SEQ ID NO: 13971 - RNA, 90 nt, Artificial Sequence
  derived and/or modified CDS sequence (opt1) from Yellow fever virus__NP_041726.1__signal peptide_YFV
augcggggccugagcucccgcaagcggcgcagccacgacgugcucaccguccaguuccugauccuggggaugcuccugaugaccggcggg

SEQ ID NO: 13972 - RNA, 75 nt, Artificial Sequence
  derived and/or modified CDS sequence (opt1) from Homo sapiens__CAA23783.1__signal peptide_MHCII
auggccaucagcggcgugcccguccugggguucuucaucaucgccgugcucauguccgcgcaggagagcugggcc

SEQ ID NO: 13973 - RNA, 72 nt, Artificial Sequence
  derived and/or modified CDS sequence (opt1) from Japanese Encephalitis virus__AOT85928.1__signal peptide_JEV
augggcaagcgcagcgccggguccaucauguggcuggccagccucgcgguggucaucgccugcgccggcgcc

SEQ ID NO: 13974 - RNA, 90 nt, Artificial Sequence
  derived and/or modified CDS sequence (opt1) from Japanese Encephalitis virus__AOT85928.1__signal peptide_JEV
augggccggaagcagaacaagcgcgggggcaacgaggggagcaucauguggcuggccucccucgccguggucaucgcgugcgccggcgcc

SEQ ID NO: 13975 - RNA, 63 nt, Artificial Sequence
  derived and/or modified CDS sequence (opt1) from Japanese Encephalitis virus__AOT85928.1__signal peptide_JEV
augaacgagggcagcaucauguggcuggccucccucgccguggucaucgcgugcgccggggcc

SEQ ID NO: 13976 - RNA, 72 nt, Artificial Sequence
  derived and/or modified CDS sequence (opt1) from Japanese encephalitis virus__BAE48356.1__signal peptide_JEV-prM
augcugggcagcaacuccgggcagcgcguggucuucaccauccuccugcugcucguggcccccgccuacagc

SEQ ID NO: 13977 - RNA, 45 nt, Artificial Sequence
  derived and/or modified CDS sequence (opt1) from Japanese encephalitis virus__ADN94470.1__signal peptide_JEV-ER
auguggcuggugagccucgccaucgucaccgccugcgcgggcgcc

SEQ ID NO: 13978 - RNA, 51 nt, Artificial Sequence
  derived and/or modified CDS sequence (opt1) from Vesicular stomatitis Indiana virus__NP_041715.1 __signal peptide_VSIV-G
augaagugccugcucuaccuggccuuccuguucaucggcgugaacugcaag

SEQ ID NO: 13979 - RNA, 51 nt, Artificial Sequence
  derived and/or modified CDS sequence (opt1) from Vesicular stomatitis Indiana virus__NP_041715.1 __signal peptide_VSIV-G(K17A)
augaagugccugcucuaccuggccuuccuguucaucggcgugaacugcgcc

SEQ ID NO: 13980 - RNA, 60 nt, Artificial Sequence
  derived and/or modified CDS sequence (opt1) from Homo sapiens__AAH62704.1__signal peptide_HsIGK@
auggagacccccgcccagcuccuguuccugcugcuccuguggcugccggacaccacgggc

SEQ ID NO: 13981 - RNA, 60 nt, Artificial Sequence
  derived and/or modified CDS sequence (opt1) from Homo sapiens__NP_000575.1__signal peptide_HsCXCL8
augaccagcaagcuggccguggcccuccuggcggccuuccugaucuccgccgcccucugc

SEQ ID NO: 13982 - RNA, 72 nt, Artificial Sequence
  derived and/or modified CDS sequence (opt1) from Homo sapiens__AAA59606.1__signal peptide_HLA-A2-SP
auggccgugauggcgccccgcacccugguccuccugcugagcggcgcccucgcccugacccagacgugggcc

SEQ ID NO: 13983 - RNA, 54 nt, Artificial Sequence
  derived and/or modified CDS sequence (opt1) from Homo sapiens__NP_000468.1__signal peptide_HsALB (SP-HsALB)
augaagugggugaccuucaucagccuccuguuccuguucuccagcgccuacucc

SEQ ID NO: 13984 - RNA, 60 nt, Artificial Sequence
  derived and/or modified CDS sequence (opt1) from Homo sapiens__NP_000577.2__signal peptide_HsIL2
auguaccgcaugcagcugcucagcugcaucgcccugucccuggcccucgugaccaacagc

SEQ ID NO: 13985 - RNA, 51 nt, Artificial Sequence
  derived and/or modified CDS sequence (opt1) from Homo sapiens__CAA68724.1__signal peptide_HsSPARC
augcgcgccuggaucuucuuccugcucugccuggccggccgggcgcuggcc

SEQ ID NO: 13986 - RNA, 90 nt, Artificial Sequence
  derived and/or modified CDS sequence (opt1) from Yellow fever virus__NP_041726.1__signal peptide_YFV
augcgcggccugagcucccggaagcgccggagccacgacgugcucaccguccaguuccugauccuggggaugcuccugaugaccggcggg

SEQ ID NO: 13987 - RNA, 72 nt, Artificial Sequence
  derived and/or modified CDS sequence (opt4) from Homo sapiens__AAA59606.1__signal peptide_HLA-A2-SP
auggccgugauggcccccagaacccuggugcugcugcugagcggcgcccuggcccugacccagaccugggcc

SEQ ID NO: 13988 - RNA, 66 nt, Artificial Sequence
  derived and/or modified CDS sequence (opt4) from Homo sapiens__AAA61213.1__signal peptide_HsPLAT (SP-HsPLAT)
auggacgccaugaagagaggccugugcugcgugcugcugcugugcggcgccguguucgugagcccc

SEQ ID NO: 13989 - RNA, 81 nt, Artificial Sequence
  derived and/or modified CDS sequence (opt4) from Homo sapiens__NP_000790.2__signal peptide_HsEPO
augggcgugcacgagugccccgccuggcuguggcugcugcugagccugcugagccugccccugggccugcccgugcugggc

SEQ ID NO: 13990 - RNA, 54 nt, Artificial Sequence
  derived and/or modified CDS sequence (opt4) from Homo sapiens__NP_000468.1__signal peptide_HsALB (SP-HsALB)
augaagugggugaccuucaucagccugcuguuccuguucagcagcgccuacagc

SEQ ID NO: 13991 - RNA, 54 nt, Artificial Sequence
  derived and/or modified CDS sequence (opt4) from Homo sapiens__AAB59424.1__signal peptide_IgE (SP-IgE)
auggacuggaccuggauccuguuccugguggccgccgccaccagagugcacagc

SEQ ID NO: 13992 - RNA, 72 nt, Artificial Sequence
  derived and/or modified CDS sequence (opt4) from Homo sapiens__NP_055022.2__signal peptide_HsCD5
augcccaugggcagccugcagccccuggccacccuguaccugcugggcaugcugguggccagcugccugggc

SEQ ID NO: 13993 - RNA, 60 nt, Artificial Sequence
  derived and/or modified CDS sequence (opt4) from Homo sapiens__NP_000577.2__signal peptide_HsIL2
auguacagaaugcagcugcugagcugcaucgcccugagccuggcccuggugaccaacagc

SEQ ID NO: 13994 - RNA, 54 nt, Artificial Sequence
  derived and/or modified CDS sequence (opt4) from Homo sapiens__NP_001020371.3 __signal peptide_HsCTRB2
auggccuuccuguggcugcugagcugcugggcccugcugggcaccaccuucggc

SEQ ID NO: 13995 - RNA, 57 nt, Artificial Sequence
  derived and/or modified CDS sequence (opt4) from Homo sapiens__BAC87457.1__signal peptide_IgG-HC
auggaguucggccugagcuggguguuccugguggcccuguucagaggcgugcagugc

SEQ ID NO: 13996 - RNA, 57 nt, Artificial Sequence
  derived and/or modified CDS sequence (opt4) from Homo sapiens__AAA52897.1__signal peptide_Ig-HC
auggacuggaccuggagaguguucugccugcuggccgugacccccggcgcccacccc

SEQ ID NO: 13997 - RNA, 57 nt, Artificial Sequence
  derived and/or modified CDS sequence (opt4) from Homo sapiens__AAA59018.1__signal peptide_Ig-LC
auggccuggagcccccuguuccugacccugaucacccacugcgccggcagcugggcc

SEQ ID NO: 13998 - RNA, 51 nt, Artificial Sequence
  derived and/or modified CDS sequence (opt4) from Gaussia princeps__AAG54095.1__signal peptide_GpLuc
augggcgugaaggugcuguucgcccugaucugcaucgccguggccgaggcc

SEQ ID NO: 13999 - RNA, 63 nt, Artificial Sequence
  derived and/or modified CDS sequence (opt4) from Mus musculus__BAR42292.1__signal peptide_MmIgkappa
auggagaccgacacccugcugcugugggugcugcugcugugggugcccggcagcaccggcgac

SEQ ID NO: 14000 - RNA, 78 nt, Artificial Sequence
  derived and/or modified CDS sequence (opt4) from Nepenthes rafflesiana__ABF74624.1__signal peptide_NrChit1
augaagacccacuacagcagcgccauccugcccauccugacccuguucguguuccugagcaucaaccccagccacggc

SEQ ID NO: 14001 - RNA, 63 nt, Artificial Sequence
  derived and/or modified CDS sequence (opt4) from Conus leopardus__AAS93426.1__signal peptide_ClLp1.3
augggcaugagaaugauguucaucauguucaugcugguggugcuggccaccaccguggugagc

SEQ ID NO: 14002 - RNA, 72 nt, Artificial Sequence
  derived and/or modified CDS sequence (opt4) from Nepenthes gracilis__AB114914.1__signal peptide_NgNep1
auggccagcagccuguacagcuuccugcuggcccugagcaucguguacaucuucguggcccccacccacagc

SEQ ID NO: 14003 - RNA, 57 nt, Artificial Sequence
  derived and/or modified CDS sequence (opt4) from Homo sapiens__NP_001691.1__signal peptide_HsAzu1
augaccagacugaccgugcuggcccugcuggccggccugcuggccagcagcagagcc

SEQ ID NO: 14004 - RNA, 48 nt, Artificial Sequence
  derived and/or modified CDS sequence (opt4) from Homo sapiens__AAA51948.1__signal peptide_HsCD33
augccccugcugcugcugcugccccugcugugggccggcgcccuggcc

SEQ ID NO: 14005 - RNA, 57 nt, Artificial Sequence
  derived and/or modified CDS sequence (opt4) from Vibrio cholerae__BAA06291.1__signal peptide_VcCtxB
augaucaagcugaaguucggcguguucuucaccgugcugcugagcagcgccuacgcc

SEQ ID NO: 14006 - RNA, 60 nt, Artificial Sequence
  derived and/or modified CDS sequence (opt4) from Homo sapiens__NP_001890.1__signal peptide_HsCST4
auggccagaccccugugcacccugcugcugcugauggccacccuggccggcgcccuggcc

SEQ ID NO: 14007 - RNA, 72 nt, Artificial Sequence
  derived and/or modified CDS sequence (opt4) from Homo sapiens__AAA59172.1__signal peptide_HsIns-iso1
auggcccuguggaugagacugcugccccugcuggcccugcuggcccuguggggccccgaccccgccgccgcc

SEQ ID NO: 14008 - RNA, 51 nt, Artificial Sequence
  derived and/or modified CDS sequence (opt4) from Homo sapiens__CAA68724.1__signal peptide_HsSPARC
augagagccuggaucuucuuccugcugugccuggccggcagagcccuggcc

SEQ ID NO: 14009 - RNA, 51 nt, Artificial Sequence
  derived and/or modified CDS sequence (opt4) from Inluenza A__ACQ45338.1__signal peptide_H1N1(Netherlands2009)-HA
augaaggccauccugguggugcugcuguacaccuucgccaccgccaacgcc

SEQ ID NO: 14010 - RNA, 90 nt, Artificial Sequence
  derived and/or modified CDS sequence (opt4) from Yellow fever virus__NP_041726.1__signal peptide_YFV
augagaggccugagcagcagaaagagaagaagccacgacgugcugaccgugcaguuccugauccugggcaugcugcugaugaccggcggc

SEQ ID NO: 14011 - RNA, 75 nt, Artificial Sequence
  derived and/or modified CDS sequence (opt4) from Homo sapiens__CAA23783.1__signal peptide_MHCII
auggccaucagcggcgugcccgugcugggcuucuucaucaucgccgugcugaugagcgcccaggagagcugggcc

SEQ ID NO: 14012 - RNA, 72 nt, Artificial Sequence
  derived and/or modified CDS sequence (opt4) from Japanese Encephalitis virus__AOT85928.1__signal peptide_JEV
augggcaagagaagcgccggcagcaucauguggcuggccagccuggccguggugaucgccugcgccggcgcc

SEQ ID NO: 14013 - RNA, 90 nt, Artificial Sequence
  derived and/or modified CDS sequence (opt4) from Japanese Encephalitis virus__AOT85928.1__signal peptide_JEV
augggcagaaagcagaacaagagaggcggcaacgagggcagcaucauguggcuggccagccuggccguggugaucgccugcgccggcgcc

SEQ ID NO: 14014 - RNA, 63 nt, Artificial Sequence
  derived and/or modified CDS sequence (opt4) from Japanese Encephalitis virus__AOT85928.1__signal peptide_JEV
augaacgagggcagcaucauguggcuggccagccuggccguggugaucgccugcgccggcgcc

SEQ ID NO: 14015 - RNA, 72 nt, Artificial Sequence
  derived and/or modified CDS sequence (opt4) from Japanese encephalitis virus__BAE48356.1__signal peptide_JEV-prM
augcugggcagcaacagcggccagagagugguguucaccauccugcugcugcugguggcccccgccuacagc

SEQ ID NO: 14016 - RNA, 45 nt, Artificial Sequence
  derived and/or modified CDS sequence (opt4) from Japanese encephalitis virus__ADN94470.1__signal peptide_JEV-ER
auguggcuggugagccuggccaucgugaccgccugcgccggcgcc

SEQ ID NO: 14017 - RNA, 51 nt, Artificial Sequence
  derived and/or modified CDS sequence (opt4) from Vesicular stomatitis Indiana virus__NP_041715.1 __signal peptide_VSIV-G
augaagugccugcuguaccuggccuuccuguucaucggcgugaacugcaag

SEQ ID NO: 14018 - RNA, 51 nt, Artificial Sequence
  derived and/or modified CDS sequence (opt4) from Vesicular stomatitis Indiana virus__NP_041715.1 __signal peptide_VSIV-G(K17A)
augaagugccugcuguaccuggccuuccuguucaucggcgugaacugcgcc

SEQ ID NO: 14019 - RNA, 60 nt, Artificial Sequence
  derived and/or modified CDS sequence (opt4) from Homo sapiens__AAH62704.1__signal peptide_HsIGK@
auggagacccccgcccagcugcuguuccugcugcugcuguggcugcccgacaccaccggc

SEQ ID NO: 14020 - RNA, 60 nt, Artificial Sequence
  derived and/or modified CDS sequence (opt4) from Homo sapiens__NP_000575.1__signal peptide_HsCXCL8
augaccagcaagcuggccguggcccugcuggccgccuuccugaucagcgccgcccugugc

SEQ ID NO: 14021 - RNA, 72 nt, Artificial Sequence
  derived and/or modified CDS sequence (opt5) from Homo sapiens__AAA59606.1__signal peptide_HLA-A2-SP
auggccgugauggcucccagaacccugguccuccugcuuagcggcgcccuggcgcucacacagacgugggcu

SEQ ID NO: 14022 - RNA, 66 nt, Artificial Sequence
  derived and/or modified CDS sequence (opt5) from Homo sapiens__AAA61213.1__signal peptide_HsPLAT (SP-HsPLAT)
auggacgccaugaagagaggccugugcugugugcuccugcuuugcggggcugucuucguuagcccc

SEQ ID NO: 14023 - RNA, 81 nt, Artificial Sequence
  derived and/or modified CDS sequence (opt5) from Homo sapiens__NP_000790.2__signal peptide_HsEPO
augggcgugcacgagugccccgccuggcuguggcuccugcuuagccugcucucccugccucuugggcugccgguccucgga

SEQ ID NO: 14024 - RNA, 54 nt, Artificial Sequence
  derived and/or modified CDS sequence (opt5) from Homo sapiens__NP_000468.1__signal peptide_HsALB (SP-HsALB)
augaagugggugaccuucaucagccugcucuuucuguucuccucugccuacagc

SEQ ID NO: 14025 - RNA, 54 nt, Artificial Sequence
  derived and/or modified CDS sequence (opt5) from Homo sapiens__AAB59424.1__signal peptide_IgE (SP-IgE)
auggacuggaccuggauccuguuccucguggccgcugccacaagaguccacagc

SEQ ID NO: 14026 - RNA, 72 nt, Artificial Sequence
  derived and/or modified CDS sequence (opt5) from Homo sapiens__NP_055022.2__signal peptide_HsCD5
augcccaugggcagccugcagccucucgccacccuguaccuucuggggaugcucguggcuuccugccuggga

SEQ ID NO: 14027 - RNA, 60 nt, Artificial Sequence
  derived and/or modified CDS sequence (opt5) from Homo sapiens__NP_000577.2__signal peptide_HsIL2
auguacagaaugcagcugcucagcugcaucgcccugucccuugcucuggugaccaacucu

SEQ ID NO: 14028 - RNA, 54 nt, Artificial Sequence
  derived and/or modified CDS sequence (opt5) from Homo sapiens__NP_001020371.3 __signal peptide_HsCTRB2
auggcuuuccuguggcuccugagcugcugggcccuucugggcaccacauuuggg

SEQ ID NO: 14029 - RNA, 57 nt, Artificial Sequence
  derived and/or modified CDS sequence (opt5) from Homo sapiens__BAC87457.1__signal peptide_IgG-HC
auggaguucggccugagcuggguguuucucgucgcccuguucagagggguucagugc

SEQ ID NO: 14030 - RNA, 57 nt, Artificial Sequence
  derived and/or modified CDS sequence (opt5) from Homo sapiens__AAA52897.1__signal peptide_Ig-HC
auggacuggaccuggagaguguucugccugcucgccgucacacccggcgcucacccu

SEQ ID NO: 14031 - RNA, 57 nt, Artificial Sequence
  derived and/or modified CDS sequence (opt5) from Homo sapiens__AAA59018.1__signal peptide_Ig-LC
auggccuggagcccccuguuccucacccugaucacacacugcgcuggcuccugggcc

SEQ ID NO: 14032 - RNA, 51 nt, Artificial Sequence
  derived and/or modified CDS sequence (opt5) from Gaussia princeps__AAG54095.1__signal peptide_GpLuc
augggcgugaagguccuguucgcccucaucugcauugcuguugccgaggcg

SEQ ID NO: 14033 - RNA, 63 nt, Artificial Sequence
  derived and/or modified CDS sequence (opt5) from Mus musculus__BAR42292.1__signal peptide_MmIgkappa
auggagaccgacacacugcuccugugggugcuucugcucuggguccccggcagcacgggggau

SEQ ID NO: 14034 - RNA, 78 nt, Artificial Sequence
  derived and/or modified CDS sequence (opt5) from Nepenthes rafflesiana__ABF74624.1__signal peptide_NrChit1
augaagacccacuacagcuccgccauccugcccauucucacacuguucguguuucuuucuaucaacccuagccauggc

SEQ ID NO: 14035 - RNA, 63 nt, Artificial Sequence
  derived and/or modified CDS sequence (opt5) from Conus leopardus__AAS93426.1__signal peptide_ClLp1.3
augggcaugagaaugauguucaucauguuuaugcuggugguccucgccaccacaguugugagc

SEQ ID NO: 14036 - RNA, 72 nt, Artificial Sequence
  derived and/or modified CDS sequence (opt5) from Nepenthes gracilis__AB114914.1__signal peptide_NgNep1
auggccagcucccuguacucuuuccuccuggcucuuagcaucguguauauuuuugucgcccccacccacucc

SEQ ID NO: 14037 - RNA, 57 nt, Artificial Sequence
  derived and/or modified CDS sequence (opt5) from Homo sapiens__NP_001691.1__signal peptide_HsAzu1
augaccagacugacagugcucgcccugcuugcuggccugcucgccagcucccgggcg

SEQ ID NO: 14038 - RNA, 48 nt, Artificial Sequence
  derived and/or modified CDS sequence (opt5) from Homo sapiens__AAA51948.1__signal peptide_HsCD33
augccccugcuccugcuucugccucuccugugggccggcgcucuugcc

SEQ ID NO: 14039 - RNA, 57 nt, Artificial Sequence
  derived and/or modified CDS sequence (opt5) from Vibrio cholerae__BAA06291.1__signal peptide_VcCtxB
augaucaagcugaaauucggcguguuuuucaccguccuccugagcuccgccuacgcu

SEQ ID NO: 14040 - RNA, 60 nt, Artificial Sequence
  derived and/or modified CDS sequence (opt5) from Homo sapiens__NP_001890.1__signal peptide_HsCST4
auggccagaccccugugcacccuccugcuucugauggcuacacucgccggcgcgcuggcu

SEQ ID NO: 14041 - RNA, 72 nt, Artificial Sequence
  derived and/or modified CDS sequence (opt5) from Homo sapiens__AAA59172.1__signal peptide_HsIns-iso1
auggcccuguggaugagacuccugccccuucuggcucuccuggcccuuuggggcccugacccggcggcugcc

SEQ ID NO: 14042 - RNA, 51 nt, Artificial Sequence
  derived and/or modified CDS sequence (opt5) from Homo sapiens__CAA68724.1__signal peptide_HsSPARC
augagagccuggaucuucuuucugcucugccuggcuggccgggcccuugcg

SEQ ID NO: 14043 - RNA, 51 nt, Artificial Sequence
  derived and/or modified CDS sequence (opt5) from Inluenza A__ACQ45338.1__signal peptide_H1N1(Netherlands2009)-HA
augaaggccauccuggugguccuccuguacaccuucgcuacagccaacgcg

SEQ ID NO: 14044 - RNA, 90 nt, Artificial Sequence
  derived and/or modified CDS sequence (opt5) from Yellow fever virus__NP_041726.1__signal peptide_YFV
augagaggccugagcucccggaagcgcagaucucacgacgugcucaccguccaguuccugauccuugggaugcugcucaugacaggaggc

SEQ ID NO: 14045 - RNA, 75 nt, Artificial Sequence
  derived and/or modified CDS sequence (opt5) from Homo sapiens__CAA23783.1__signal peptide_MHCII
auggccaucagcggcgugcccguccugggguucuuuauuaucgcuguucucauguccgcccaggagucuugggcg

SEQ ID NO: 14046 - RNA, 72 nt, Artificial Sequence
  derived and/or modified CDS sequence (opt5) from Japanese Encephalitis virus__AOT85928.1__signal peptide_JEV
augggcaagagaagcgccggguccaucauguggcuggcuucucucgccguggucauugcgugcgcuggagcc

SEQ ID NO: 14047 - RNA, 90 nt, Artificial Sequence
  derived and/or modified CDS sequence (opt5) from Japanese Encephalitis virus__AOT85928.1__signal peptide_JEV
augggccggaagcagaacaaaagagggggaaaugagggcagcaucauguggcuggccucccucgcuguggucauugccugcgcgggggcu

SEQ ID NO: 14048 - RNA, 63 nt, Artificial Sequence
  derived and/or modified CDS sequence (opt5) from Japanese Encephalitis virus__AOT85928.1__signal peptide_JEV
augaacgagggcagcaucauguggcuggccucccucgcuguggucauugccugcgcgggggcu

SEQ ID NO: 14049 - RNA, 72 nt, Artificial Sequence
  derived and/or modified CDS sequence (opt5) from Japanese encephalitis virus__BAE48356.1__signal peptide_JEV-prM
augcugggcagcaacuccgggcagagaguggucuucaccauccuccugcuucugguugcccccgcuuacucu

SEQ ID NO: 14050 - RNA, 45 nt, Artificial Sequence
  derived and/or modified CDS sequence (opt5) from Japanese encephalitis virus__ADN94470.1__signal peptide_JEV-ER
auguggcuggugagccucgccaucgucaccgcuugcgccggcgcg

SEQ ID NO: 14051 - RNA, 51 nt, Artificial Sequence
  derived and/or modified CDS sequence (opt5) from Vesicular stomatitis Indiana virus__NP_041715.1 __signal peptide_VSIV-G
augaagugccugcucuaccuggccuuccuuuuuaucggcgugaacuguaaa

SEQ ID NO: 14052 - RNA, 51 nt, Artificial Sequence
  derived and/or modified CDS sequence (opt5) from Vesicular stomatitis Indiana virus__NP_041715.1 __signal peptide_VSIV-G(K17A)
augaagugccugcucuaccuggccuuccuuuuuaucggcgugaacugugcu

SEQ ID NO: 14053 - RNA, 60 nt, Artificial Sequence
  derived and/or modified CDS sequence (opt5) from Homo sapiens__AAH62704.1__signal peptide_HsIGK@
auggagacccccgcccagcuccuguuccugcuucugcucuggcugccugacacaacgggc

SEQ ID NO: 14054 - RNA, 60 nt, Artificial Sequence
  derived and/or modified CDS sequence (opt5) from Homo sapiens__NP_000575.1__signal peptide_HsCXCL8
augaccagcaagcuggccguggcucuccuggccgcguuccuuaucuccgcugcccugugc

SEQ ID NO: 14055 - RNA, 1669 nt, Artificial Sequence
  mRNA product Design i-3 (A64-N5-hSL-N5) comprising derived and/or modified sequence from LASV(Josiah;Clade IV)__NP_694870__GPC (opt1) R8477
aggagaaagcuuaccaugggccagaucgugaccuucuuccaggaggucccccacgugaucgaggaggugaugaacaucguccugaucgcccucagcgugcuggccgugcugaaggggcucuacaacuucgcgaccugcggccuggucgggcuggugacguuccuccugcugugcggccgcuccugcaccaccagccucuacaaggggguguacgagcugcagacccuggagcucaacauggagacgcugaacaugaccaugccgcuguccugcaccaagaacaacagccaccacuacaucauggucggcaacgagaccggccucgagcugacgcugaccaacaccuccaucaucaaccacaaguucugcaaccucagcgacgcccacaagaagaaccuguacgaccacgcccugauguccaucaucagcaccuuccaccucuccauccccaacuucaaccaguacgaggccaugagcugcgacuucaacgggggcaagaucuccgugcaguacaaccugagccacuccuacgccggggacgcggccaaccacugcggcacgguggccaacgggguccugcagaccuucaugcggauggccuggggcggcagcuacaucgcgcucgacuccgggcgcggcaacugggacugcaucaugaccagcuaccaguaccugaucauccagaacaccacgugggaggaccacugccaguucucccggcccagccccaucggguaccugggccuccugucccagcgcacccgggacaucuacaucagccgccggcugcucggcaccuucaccuggacgcugagcgacuccgaggggaaggacaccccgggcggguacugccugacccgcuggaugcucaucgaggccgagcugaagugcuucggcaacaccgccguggccaagugcaacgagaagcacgacgaggaguucugcgacaugcugcggcuguucgacuucaacaagcaggccauccagcgccugaaggcggaggcccagaugagcauccagcugaucaacaaggccgugaacgcccucaucaacgaccagcugaucaugaagaaccaccuccgggacaucauggggauccccuacugcaacuacuccaaguacugguaccucaaccacacgaccaccggccgcaccagccugcccaagugcuggcuggucuccaacggcagcuaccucaacgagacgcacuucuccgacgacaucgagcagcaggccgacaacaugaucaccgagaugcugcagaaggaguacauggagcggcaggggaagacgccccugggccucguggaccuguucguguucagcaccuccuucuaccugaucagcaucuuccugcaccucgucaagaucccgacccaccgccacaucguggggaaguccugccccaagccccaccggcugaaccacaugggcaucugcagcugcgggcuguacaagcagcccggcgugccggucaaguggaagcgcugaggacuaguuauaagacugacuagcccgaugggccucccaacgggcccuccuccccuccuugcaccgagauuaauagaucuaaaaaaaaaaaaaaaaaaaaaaaaaaaaaaaaaaaaaaaaaaaaaaaaaaaaaaaaaaaaaaaaugcaucaaaggcucuuuucagagccaccagaauu

SEQ ID NO: 14056 - RNA, 1717 nt, Artificial Sequence
  mRNA product Design a-1 (hSL-A64-N5) comprising derived and/or modified sequence from LASV(Josiah;Clade IV)__NP_694870__GPC (opt1)
aggagagucccgcagucggcguccagcggcucugcuuguucgugugugugucguugcaggccuuauucaagcuuaccaugggccagaucgugaccuucuuccaggaggucccccacgugaucgaggaggugaugaacaucguccugaucgcccucagcgugcuggccgugcugaaggggcucuacaacuucgcgaccugcggccuggucgggcuggugacguuccuccugcugugcggccgcuccugcaccaccagccucuacaaggggguguacgagcugcagacccuggagcucaacauggagacgcugaacaugaccaugccgcuguccugcaccaagaacaacagccaccacuacaucauggucggcaacgagaccggccucgagcugacgcugaccaacaccuccaucaucaaccacaaguucugcaaccucagcgacgcccacaagaagaaccuguacgaccacgcccugauguccaucaucagcaccuuccaccucuccauccccaacuucaaccaguacgaggccaugagcugcgacuucaacgggggcaagaucuccgugcaguacaaccugagccacuccuacgccggggacgcggccaaccacugcggcacgguggccaacgggguccugcagaccuucaugcggauggccuggggcggcagcuacaucgcgcucgacuccgggcgcggcaacugggacugcaucaugaccagcuaccaguaccugaucauccagaacaccacgugggaggaccacugccaguucucccggcccagccccaucggguaccugggccuccugucccagcgcacccgggacaucuacaucagccgccggcugcucggcaccuucaccuggacgcugagcgacuccgaggggaaggacaccccgggcggguacugccugacccgcuggaugcucaucgaggccgagcugaagugcuucggcaacaccgccguggccaagugcaacgagaagcacgacgaggaguucugcgacaugcugcggcuguucgacuucaacaagcaggccauccagcgccugaaggcggaggcccagaugagcauccagcugaucaacaaggccgugaacgcccucaucaacgaccagcugaucaugaagaaccaccuccgggacaucauggggauccccuacugcaacuacuccaaguacugguaccucaaccacacgaccaccggccgcaccagccugcccaagugcuggcuggucuccaacggcagcuaccucaacgagacgcacuucuccgacgacaucgagcagcaggccgacaacaugaucaccgagaugcugcagaaggaguacauggagcggcaggggaagacgccccugggccucguggaccuguucguguucagcaccuccuucuaccugaucagcaucuuccugcaccucgucaagaucccgacccaccgccacaucguggggaaguccugccccaagccccaccggcugaaccacaugggcaucugcagcugcgggcuguacaagcagcccggcgugccggucaaguggaagcgcugaggacuagucccuguucccagagcccacuuuuuuuucuuuuuuugaaauaaaauagccugucuuucagaucucaaaggcucuuuucagagccaccaaaaaaaaaaaaaaaaaaaaaaaaaaaaaaaaaaaaaaaaaaaaaaaaaaaaaaaaaaaaaaaaagaauu

SEQ ID NO: 14057 - RNA, 1714 nt, Artificial Sequence
  mRNA product Design a-1 (hSL-A64-N5) comprising derived and/or modified sequence from LASV(LP;Clade I)__AAF86701__GPC (opt1)
aggagagucccgcagucggcguccagcggcucugcuuguucgugugugugucguugcaggccuuauucaagcuuaccaugggccagaucaucaccuucuuccaggaggugccccacgucaucgaggaggugaugaacaucgugcugaucgcccucagccugcuggccauccucaaggggcuguacaacaucgcgaccugcggcaucaucgggcuggucgccuuccucuuccugugcggcaaguccugcagccugacgcucaagggcggguacgagcugcagacccuggagcucaacauggagacccugaacaugaccaugccgcuguccugcacgaagaacagcucccaccacuacauccgcgugggcaacgagaccgggcucgagcugacccugaccaacacgagcaucaucaaccacaaguucugcaaccucuccgacgcccacaagaagaaccuguacgaccacgcccugaugagcaucaucuccaccuuccaccucagcauccccaacuucaaccaguacgaggccauguccugcgacuucaacggcgggaagaucagcgugcaguacaaccugucccacagcuacgcgggcgacgccgccgagcacugcgggaccgucgccaacggcgugcugcagaccuucaugcggauggcguggggcgggcgcuacaucgcccucgacuccggcaaggggaacugggacugcaucaugacgagcuaccaguaccugaucauccagaacaccaccugggaggaccacugccaguucucccggcccagccccaucggcuaccugggccuccugucccagcgcacccgggacaucuacaucagccgccggcugcucgggacguucaccuggacccugagcgacuccgagggcaacgagacccccgggggcuacugccugacgcgcuggaugcucaucgaggccgagcugaagugcuucgggaacaccgccguggccaagugcaacgagaagcacgacgaggaguucugcgacaugcugcggcuguucgacuucaacaagcaggcgauccgccggcugaaggccgaggcccagaugagcauccagcugaucaacaaggccgucaacgcccucaucaacgaccagcugaucaugaagaaccaccuccgcgacaucaugggcauccccuacugcaacuacuccaaguacugguaccucaaccacaccagcuccggccggaccagccugcccaagugcuggcugaucuccaacgggagcuaccucaacgagacgcaguucuccgacgacaucgagcagcaggcggacaacaugaucaccgagaugcugcagaaggaguacaucgagcgccagggcaagaccccgcuggggcucguggacaucuucaucuucagcaccuccuucuaccugaucagcaucuuccugcaccugaucaagaucccgacgcaccggcacaucgugggcaagcccugccccaagccccaccgccucaaccacaugggggucugcuccugcggccuguacaagcacccgggcgugcccaccaaguggaagcggugaggacuagucccuguucccagagcccacuuuuuuuucuuuuuuugaaauaaaauagccugucuuucagaucucaaaggcucuuuucagagccaccaaaaaaaaaaaaaaaaaaaaaaaaaaaaaaaaaaaaaaaaaaaaaaaaaaaaaaaaaaaaaaaaagaauu

SEQ ID NO: 14058 - RNA, 1714 nt, Artificial Sequence
  mRNA product Design a-1 (hSL-A64-N5) comprising derived and/or modified sequence from LASV(803213;Clade II)__AAF86703__GPC (opt1)
aggagagucccgcagucggcguccagcggcucugcuuguucgugugugugucguugcaggccuuauucaagcuuaccaugggccagaucaucaccuucuuccaggaggugccccacgucaucgaggaggugaugaacaucgugcugaucgcccucagccugcuggccauccucaaggggaucuacaacgucgcgaccugcggccuguucgggcugaucuccuuccuccugcugugcggccgcagcugcuccgugacguacaaggggguguacgagcuccagacccuggagcugaacauggccaaccucaacaugaccaugccgcugagcugcaccaagaacaacucccaccacuacaucauggucggcaacgagacgggccuggagcucacccugaccaacaccagcaucaucaaccacaaguucugcaaccuguccgacgcccacaagaagaaccucuacgaccacgcccugaugagcaucaucuccacguuccaccugagcauccccaacuucaaccaguacgaggccauguccugcgacuucaacgggggcaagaucagcgugcaguacaaccucucccacagcuucgcgguggacgccgccaaccacugcgggaccaucgccaacggcguccugcagaccuucaugcggauggcguggggcggguccuacaucgcccuggacagcggcaaggggaacugggacugcaucaugaccuccuaccaguaccucaucauccagaacacgaccugggaggaccacugccaguucagccgccccucccccaucggcuaccuggggcugcucagccagcggacccgcgacaucuacaucagccggcgccugcugggcaccuucacguggacccucuccgacagcgagggcaacgaggcccccgggggcuacugccugacccgguggaugcugaucgaggccgagcucaagugcuucgggaacaccgccguggcgaagugcaacgagaagcacgacgaggaguucugcgacaugcugcgccuguucgacuucaacaagcaggccaucaagcggcucaagacggaggcccagauguccauccagcugaucaacaaggccgugaacgcccugaucaacgaccagcucaucaugaagaaccaccuccgcgacaucaugggcauccccuacugcaacuacagccgguacugguaccugaaccacaccgucaccgggaagaccucccugccccgcugcuggcuggugagcaacggcuccuaccugaacgagacgcacuucagcgacgacaucgagcagcaggcggacaacaugaucaccgagaugcuccagaaggaguacauggaccggcagggcaagaccccgcuggggcugguggaccucuucgucuucuccaccagcuucuaccugaucuccaucuuccugcaccuggugaagaucccgacgcaccgccacaucgugggcaagcccugccccaagccccaccggcucaaccacauggggaucugcagcugcggccuguacaagcacccggggguccccgugaaguggaagcgcugaggacuagucccuguucccagagcccacuuuuuuuucuuuuuuugaaauaaaauagccugucuuucagaucucaaaggcucuuuucagagccaccaaaaaaaaaaaaaaaaaaaaaaaaaaaaaaaaaaaaaaaaaaaaaaaaaaaaaaaaaaaaaaaaagaauu

SEQ ID NO: 14059 - RNA, 1714 nt, Artificial Sequence
  mRNA product Design a-1 (hSL-A64-N5) comprising derived and/or modified sequence from LASV(GA391;Clade III)__CAA36645__GPC (opt1)
aggagagucccgcagucggcguccagcggcucugcuuguucgugugugugucguugcaggccuuauucaagcuuaccaugggccagaucgugaccuucuuccaggaggucccccacgugaucgaggaggugaugaacaucguccugaucgcccucagcauccuggccauccugaaggggcucuacaacguggcgaccugcggccugaucgggcuggugacguuccuccugcuguccggccgcagcugcucccucaucuacaaggggaccuacgagcugcagacccuggagcucaacauggagacccugaacaugacgaugccgcugagcugcaccaagaacaacucccaccacuacauccgggucggcaacgagaccggccucgagcugacccugacgaacaccagcauccucaaccacaaguucugcaaccuguccgacgcccacaagcgcaaccuguacgaccacagccucauguccaucaucagcaccuuccaccuguccauccccaacuucaaccaguacgaggccaugagcugcgacuucaacgggggcaagaucaccgugcaguacaaccugucccacagcuucgccguggacgccgcggggcacugcggcacgcucgccaacgggguccugcagaccuucaugcggauggccuggggcggcuccuacaucgcccuggacagcgggcgcggcaacugggacugcaucaugaccuccuaccaguaccucaucauccagaacaccacgugggacgaccacugccaguucagccggcccucccccaucggguaccugggccugcucagccagcgcacccgggacaucuacaucagccgccggcugcugggcaccuucaccuggacgcucuccgacagcgaggggaacgagaccccgggcggguacugccugacccgcuggaugcugaucgaggcggagcucaagugcuucggcaacaccgccguggccaagugcaacgagaagcacgacgaggaguucugcgacaugcugcggcuguucgacuucaacaagcaggccauccgccggcucaagacggaggcccagauguccauccagcugaucaacaaggcggugaacgcccugaucaacgaccagcucaucaugaagaaccaccuccgcgacaucauggggauccccuacugcaacuacagccgguacugguaccugaaccacaccuccaccggcaagaccagccugccccgcugcuggcugaucuccaacggcagcuaccugaacgagacgaaguucuccgacgacaucgagcagcaggccgacaacaugaucaccgagaugcuccagaaggaguacaucgaccggcaggggaagacgccccugggccuggucgaccuguucguguucagcaccuccuucuaccucaucagcaucuuccugcaccuggugaagaucccgacccaccgccacaucgucgggaagcccugccccaagccccaccggcucaaccacaugggcaucugcuccugcgggcuguacaagcagccgggcgugcccgugcgcuggaagcggugaggacuagucccuguucccagagcccacuuuuuuuucuuuuuuugaaauaaaauagccugucuuucagaucucaaaggcucuuuucagagccaccaaaaaaaaaaaaaaaaaaaaaaaaaaaaaaaaaaaaaaaaaaaaaaaaaaaaaaaaaaaaaaaaagaauu

SEQ ID NO: 14060 - RNA, 1717 nt, Artificial Sequence
  mRNA product Design a-1 (hSL-A64-N5) comprising derived and/or modified sequence from LASV(AV;Clade V)__CCA30314__GPC (opt1)
aggagagucccgcagucggcguccagcggcucugcuuguucgugugugugucguugcaggccuuauucaagcuuaccaugggccagaucgugaccuucuuccaggaggucccccacgugaucgaggaggugaugaacaucguccugaucgcccucagcauccuggccgugcugaaggggcucuacaacaucgcgaccugcggccugaucgggcugaucacguuccuccugcugugcggccgcuccugcagcuccaaccucuacaaggggguguacgagcugcagagccuggaccucaacauggagacccugaacaugaccaugccgcuguccugcaccaagaacaacagccaccacuacauccgggucggcaacgacacgggccucgagcugacccugaccaacaccuccauccucaaccacaaguucugcaaccugagcgacgcccacaagaaggaccuguacgaccacgcccucauguccaucaucagcacguuccaccuguccauccccaacuucaaccaguacgaggccaugagcugcgacuucaacgggggcaagaucuccgugcaguacaaccugagccacuccuacgccaucgacgcggccaaccacugcgggaccguggccaacggcauccuccagaccuucaugcgcauggccuggggcgggagcuacaucgcgcuggacuccggccgggggaacugggacugcaucaugaccagcuaccaguaccugaucauccagaacacgaccugggagaaccacugccaguucucccgccccagccccaucggcuaccucgggcugcugagccagcggacccgcgacaucuacaucucccggcgccuccugggcaccuucacguggacccugagcgacuccgagggcaacgccacccccgggggcuacugccucacccgguggaugcugaucgaggccgagcugaagugcuucgggaacacggccgucgccaagugcaacgagaagcacgacgaggaguucugcgacaugcuccgccuguucgacuucaacaagcaggcgaucagccggcugaaguccgaggcccagaugagcauccagcucaucaacaaggccgugaacgcccugaucaacgaccagcugaucaugaagaaccaccuccgcgacaucaugggcauccccuacugcaacuacuccaaguacugguaccugaaccacaccaucaccgggaagaccagccugcccaagugcuggcucguguccaacggcagcuaccugaacgagacgcacuucuccgacgacaucgagcagcaggccgacaacaugaucaccgagaugcugcagaaggaguacauggagcggcagggcaagaccccgcucgggcuggucgaccuguucguguucagcaccuccuucuaccugaucagcaucuuccuccgccuggugaagaucccgacgcaccggcacaucgucggcaagcccugccccaagccccaccgccugaaccacauggggaucugcuccugcggccucuacaagcagccgggggugcccgugcgguggaagcgcugaggacuagucccuguucccagagcccacuuuuuuuucuuuuuuugaaauaaaauagccugucuuucagaucucaaaggcucuuuucagagccaccaaaaaaaaaaaaaaaaaaaaaaaaaaaaaaaaaaaaaaaaaaaaaaaaaaaaaaaaaaaaaaaaagaauu

SEQ ID NO: 14061 - RNA, 1714 nt, Artificial Sequence
  mRNA product Design a-1 (hSL-A64-N5) comprising derived and/or modified sequence from LASV(Togo/2016/7082;Clade VI)__AMR44577__GPC (opt1)
aggagagucccgcagucggcguccagcggcucugcuuguucgugugugugucguugcaggccuuauucaagcuuaccaugggccagaucaucaccuucuuccaggaggugccccacgucaucgaggaggugaugaacaucgugcugaucgcccucagccugcuggccauccucaagggggucuacaacguggcgaccugcggcaucaucgggcuggugacguuccuguuccucugcggccgcuccugcagccugaucuacaagggguccuacgagcugcagacccucgagcugaacauggagacccugaacaugaccaugccgcucagcugcacgaagaacuccagccaccacuacauccgggucggcaacgagaccggccuggagcugacccucaccaacacguccaucaucaaccacaaguucugcaaccugagcgacgcccacaagcgcaaccuguacgaccacgcccucauguccauccugagcaccuuccaccuguccauccccaacuucaaccaguacgaggccaugagcugcgacuucaacgggggcaagaucuccgugcaguacaaccucagccacgccuacgcgguggacgccgccgagcacugcgggaccgucgccaacggcgugcugcagaccuucaugcggauggcguggggcggguccuacaucgcccuggacagcggccgcgggaacugggacugcaucaugacguccuaccaguaccucaucauccagaacaccaccugggaggaccacugccaguucagccggcccucccccaucggcuaccuggggcugcucagccagcgcacccgggacaucuacaucagccgccggcugcugggcacguucaccuggacccucuccgacagcgagggcaacgagacccccgggggcuacugccugacgcgcuggaugcugaucgaggccgagcucaagugcuucgggaacaccgccguggccaagugcaacgagaagcacgacgaggaguucugcgacaugcugcggcuguucgacuucaacaagcaggcgauccagcgccucaaguccgaggcccagaugagcauccagcugaucaacaaggccgucaacgcccugaucaacgaccagcucaucaugaagaaccaccuccgggacaugaugggcauccccuacugcaacuacuccaaguacugguaccugaaccacaccagcuccgggcgcaccagccugcccaagugcuggcugguguccaacggcagcuaccugaacgagacgcacuucuccgacgacaucgagcagcaggccgacaacaugaucaccgagaugcuccagaaggaguacaucgaccggcagggcaagaccccgcuggggcugguggaccucuucgucuucagcaccuccuucuaccugaucagcaucuuccugcaccugaucaagaucccgacgcaccgccacaucgugggcaagcccugccccaagccccaccggcucaaccacauggggaucugcuccugcggccuguacaagcagccgggggugcccacccgcuggaagcggugaggacuagucccuguucccagagcccacuuuuuuuucuuuuuuugaaauaaaauagccugucuuucagaucucaaaggcucuuuucagagccaccaaaaaaaaaaaaaaaaaaaaaaaaaaaaaaaaaaaaaaaaaaaaaaaaaaaaaaaaaaaaaaaaagaauu

SEQ ID NO: 14062 - RNA, 1714 nt, Artificial Sequence
  mRNA product Design a-1 (hSL-A64-N5) comprising derived and/or modified sequence from LASV(KAK-428;Clade n.d. (VII))__ANH09740__GPC (opt1)
aggagagucccgcagucggcguccagcggcucugcuuguucgugugugugucguugcaggccuuauucaagcuuaccaugggccagaucgugaccuucuuccaggaggucccccacgugaucgaggaggugaugaacaucguccugaucgcccucagccugcuggccauccucaaggggcuguacaacuucgcgaccugcggcgugaucgggcugaucacguuccuccugcugugcggccgcuccugcagcgccaccuacaaggggcaguacgagcuccagacccuggagcugaacauggagucccucaacaugaccaugccgcugagcugcacgaagaacaacucccaccacuacauccgggccggcaacaacaccggccuggagcucacccugaccaacacgagcaucaucucccacaaguucugcaaccugagcgacgcccacaagaagaaccucuacgaccacacccugauguccaucaucaccaccuuccaccugagcauccccaacuucaaccaguacgaggccauguccugcgacuucaacgggggcaagaucagcauccaguacaaccucucccacagcuacgcgggggacgccgcccagcacugcggcacgguggccaacgggguccugcagaccuucaugcgcauggcguggggcggcuccuaccuggcccucgacagcgggcggcgcggcugggacugcaucaucuccagcuaccaguaccugaucauccagaacaccaccugggacgaccacugccaguucucccggcccagccccaucggguaccugggcuucgugagccagaagacgcgcgacaucuacaucucccggcgccuccugggcaccuucaccuggacccugagcgacuccgaggggcacgacaugccgggcggguacugccucacgcgguggaugcugaucgaggccgaccugaagugcuucggcaacaccgccguggccaagugcaacgagaagcacgacgaggaguucugcgacauguggcgccucuucgacuucaacaagcaggcgauccagcggcugaaggccgaggcccagaugaacauccagcugaucaacaaggccgucaacgcccucaucaacgaccagcugaugaugaagaaccaccuccgcgacaucauggggauccccuacugcaacuacagcaaguucugguaccugaacaacaccaccacgggccggaccucccugccccgcugcuggcugaucagcaacggcuccuaccucaacgagacccacuucagcgacgacaucgagcagcaggcggacaacaugaucaccgagaugcugcagaaggaguacauggaccggcaggggaagacgccccugggccucguggaccuguucguguucuccaccagcuucuaccugaucaccaucuuccuccaccuggucaagaucccgacccaccgccacaucguggggaagcccugccccaagccccaccggcugaaccacaugggcaucugcuccugcgggcuguacaagcagccgggcgugcccguccgcuggaagcggugaggacuagucccuguucccagagcccacuuuuuuuucuuuuuuugaaauaaaauagccugucuuucagaucucaaaggcucuuuucagagccaccaaaaaaaaaaaaaaaaaaaaaaaaaaaaaaaaaaaaaaaaaaaaaaaaaaaaaaaaaaaaaaaaagaauu

SEQ ID NO: 14063 - RNA, 1714 nt, Artificial Sequence; identical to SEQ ID NO: 14057
  mRNA product Design a-1 (hSL-A64-N5) comprising derived and/or modified sequence from LASV(Pinneo-NIG-1969;Clade I)__AIT17836__GPC (opt1)

SEQ ID NO: 14064 - RNA, 1714 nt, Artificial Sequence
  mRNA product Design a-1 (hSL-A64-N5) comprising derived and/or modified sequence from LASV(ISTH0009-NIG-2011;Clade II)__AIT17404__GPC (opt1)
aggagagucccgcagucggcguccagcggcucugcuuguucgugugugugucguugcaggccuuauucaagcuuaccaugggccagaucaucaccuucuuccaggaggugccccacgucaucgaggaggugaugaacaucgugcugaucgcccucagccugcuggccauccucaaggggaucuacaacgucgcgaccugcggccuguucgggcugguguccuuccuccugcugugcggccgcagcugcuccacgaccuacaaggggguguacgagcuccagacccuggagcuggacauggccagccucaacaugaccaugccgcuguccugcacgaagaacaacagccaccacuacaucauggucggcaacgagaccggccuggagcucacccugaccaacacguccaucaucaaccacaaguucugcaaccugagcgacgcccacaagaagaaccucuacgaccacgcccugauguccaucaucagcaccuuccaccuguccauccccaacuucaaccaguacgaggccaugagcugcgacuucaacgggggcaagaucuccgugcaguacaaccucagccacgcguacgccguggacgccgccaaccacugcgggaccaucgcgaacggcguccugcagaccuucaugcggauggccuggggcggguccuacaucgcccuggacagcggcaagggguccugggacugcaucaugacgagcuaccaguaccucaucauccagaacaccaccugggaggaccacugccaguucucccgccccagccccaucggcuaccuggggcugcucagccagcggacccgcgacaucuacaucucccggcgccugcugggcacguucaccuggacccucagcgacuccgagggcaacgagacccccgggggcuacugccugacgcgguggaugcugaucgaggccgagcucaagugcuucgggaacaccgccguggcgaagugcaacgagaagcacgacgaggaguucugcgacaugcugcgccuguucgacuucaacaagcaggccauccggcgccucaagaccgaggcccagaugagcauccagcugaucaacaaggccgugaacgcccugaucaacgaccagcucaucaugaagaaccaccuccgggacaucaugggcaucccguacugcaacuacuccaaguacugguaccugaaccacaccgucacggggaagaccagccugccccgcugcuggcugguguccaacggcagcuaccugaacgagacccacuucuccgacgacaucgagcagcaggcggacaacaugaucaccgagcuccugcagaaggaguacauggaccggcagggcaagacgccccuggggcucguggaccuguucgucuucagcaccuccuucuaccugaucagcaucuuccugcaccucaucaagaucccgacccaccgccacaucaccggcaagcccugccccaagccccaccggcugaaccacauggggaucugcuccugcggccuguacaagcacccgggggugcccgugaaguggaagcgcugaggacuagucccuguucccagagcccacuuuuuuuucuuuuuuugaaauaaaauagccugucuuucagaucucaaaggcucuuuucagagccaccaaaaaaaaaaaaaaaaaaaaaaaaaaaaaaaaaaaaaaaaaaaaaaaaaaaaaaaaaaaaaaaaagaauu

SEQ ID NO: 14065 - RNA, 1714 nt, Artificial Sequence
  mRNA product Design a-1 (hSL-A64-N5) comprising derived and/or modified sequence from LASV(ISTH2010-NIG-2012;Clade II)__AIT17482__GPC (opt1)
aggagagucccgcagucggcguccagcggcucugcuuguucgugugugugucguugcaggccuuauucaagcuuaccaugggccagaucaucaccuucuuccaggaggugccccacgucaucgaggaggugaugaacaucgugcugaucgcccucagccugcuggccauccucaaggggaucuacaacgucgcgaccugcggccuguucgggcugguguccuuccuccugcugugcggccgcagcugcuccacgaccuacaaggggguguacgagcuccagacccuggagcuggacauggccagccucaacaugaccaugccgcuguccugcacgaagaacaacagccaccacuacaucauggucggcaacgagaccggccuggagcucacccugaccaacacguccaucaucaaccacaaguucugcaaccugagcgacgcccacaagaagaaccucuacgaccacgcccugauguccaucaucagcaccuuccaccuguccauccccaacuucaaccaguacgaggccaugagcugcgacuucaacgggggcaagaucuccgugcaguacaaccucagccacgcguacgccguggacgccgccaaccacugcgggaccaucgcgaacggcguccugcagaccuucaugcggauggccuggggcggguccuacaucgcccuggacagcggcaagggguccugggacugcaucaugacgagcuaccaguaccucaucauccagaacaucaccugggaggaccacugccaguucucccgccccagccccaucggcuaccuggggcugcucagccagcggacccgcgacaucuacaucucccggcgccugcugggcaccuucacguggacccucagcgacuccgagggcaacgagacccccgggggcuacugccugacccgguggaugcugaucgaggccgagcucaagugcuucgggaacacggccguggcgaagugcaacgagaagcacgacgaggaguucugcgacaugcugcgccuguucgacuucaacaagcaggccauccggcgccucaagaccgaggcccagaugagcauccagcugaucaacaaggccgugaacgcccugaucaacgaccagcucaucaugaagaaccaccuccgggacaucaugggcauccccuacugcaacuacuccaaguacugguaccugaaccacaccgucaccgggaagacgagccugccccgcugcuggcugguguccaacggcagcuaccugaacgagacccacuucuccgacgacaucgagcagcaggcggacaacaugaucaccgagcuccugcagaaggaguacaucgaccggcagggcaagaccccgcuggggcucguggaccuguucgucuucagcacguccuucuaccugaucagcaucuuccugcaccucgugaagaucccgacccaccgccacguggucggcaagcccugccccaagccccaccggcugaaccacauggggaucugcuccugcggccuguacaagcacccgggggugcccgugaaguggaagcgcugaggacuagucccuguucccagagcccacuuuuuuuucuuuuuuugaaauaaaauagccugucuuucagaucucaaaggcucuuuucagagccaccaaaaaaaaaaaaaaaaaaaaaaaaaaaaaaaaaaaaaaaaaaaaaaaaaaaaaaaaaaaaaaaaagaauu

SEQ ID NO: 14066 - RNA, 1714 nt, Artificial Sequence
  mRNA product Design a-1 (hSL-A64-N5) comprising derived and/or modified sequence from LASV(Lassa virus/H.sapiens-wt/NGA/2015/ISTH_0543;Clade II)__AVO03639__GPC (opt1)
aggagagucccgcagucggcguccagcggcucugcuuguucgugugugugucguugcaggccuuauucaagcuuaccaugggccagaucaucaccuucuuccaggaggugccccacgucaucgaggaggugaugaacaucgugcugaucgcccucagccugcuggccauccucaaggggaucuacaacgucgcgaccugcggccuguucgggcugguguccuuccuccugcugugcggccgcagcugcuccacgaccuacaaggggguguacgagcuccagacccuggagcuggacauggccaaccucaacaugaccaugccgcugagcugcacgaagaacaacucccaccacuacaucauggucggcaacgagaccggccuggagcucacccugaccaacacgagcaucaucaaccacaaguucugcaaccuguccgacgcccacaagaagaaccucuacgaccacgcccugaugagcaucaucuccaccuuccaccugagcauccccaacuucaaccaguacgaggccauguccugcgacuucaacgggggcaagaucagcgugcaguacaaccucucccacaccuacgcgguggacgccgccaaccacugcgggaccaucgccaacggcguccugcagacguucaugcggauggcguggggcgggagcuacaucgcccuggacuccggcaaggggagcugggacugcaucaugaccuccuaccaguaccucgugauccagaacaccaccugggaggaccacugccaguucagccgccccucccccaucggcuaccuggggcugcucagccagcggacgcgcgacaucuacaucagccggcgccugcugggcaccuucaccuggacccucuccgacagcgagggcaacgagacgcccgggggcuacugccugacccgguggaugcugaucgaggccgagcucaagugcuucgggaacaccgccguggccaagugcaacgagaagcacgacgaggaguucugcgacaugcugcgccuguucgacuucaacaagcaggcgauccggcgccucaagaccgaggcccagauguccauccagcugaucaacaaggccgucaacgcccugaucaacgaccagcucaucaugaagaaccaccuccgggacaucaugggcauccccuacugcaacuacagcaaguacugguaccugaaccacacggugaccgggaagaccucccugccccgcugcuggcuggugagcaacggcuccuaccugaacgagacccacuucagcgacgacaucgagcagcaggccgacaacaugaucacggagcuccugcagaaggaguacaucgaccggcagggcaagaccccgcuggggcucgucgaccuguucguguucuccaccagcuucuaccugaucuccaucuuccugcaccucgugaagaucccgacccaccgccacaucacgggcaagcccugccccaagccccaccggcugaaccacauggggaucugcagcugcggccuguacaagcacccggggguccccgugaaguggaagcgcugaggacuagucccuguucccagagcccacuuuuuuuucuuuuuuugaaauaaaauagccugucuuucagaucucaaaggcucuuuucagagccaccaaaaaaaaaaaaaaaaaaaaaaaaaaaaaaaaaaaaaaaaaaaaaaaaaaaaaaaaaaaaaaaaagaauu

SEQ ID NO: 14067 - RNA, 1714 nt, Artificial Sequence
  mRNA product Design a-1 (hSL-A64-N5) comprising derived and/or modified sequence from LASV(Lassa virus/H.sapiens-wt/NGA/2016/ISTH_0009;Clade II)__AVO03571__GPC (opt1)
aggagagucccgcagucggcguccagcggcucugcuuguucgugugugugucguugcaggccuuauucaagcuuaccaugggccagaucaucaccuucuuccaggaggugccccacgucaucgaggaggugaugaacaucgugcugaucgcccucagccugcuggccauccucaaggggaucuacaacgucgcgaccugcggccugcuggggcucguguccuuccugcugcucugcggccgcagcugcuccacgaccuacaaggggguguacgagcugcagacccuggagcucgacauggccagccugaacaugaccaugccgcuguccugcacgaagaacaacagccaccacuacaucauggucggcaacgagaccggccucgagcugacccugaccaacacguccaucaucaaccacaaguucugcaaccucagcgacgcccacaagaagaaccuguacgaccacgcccugauguccaucaucagcaccuuccaccucuccauccccaacuucaaccaguacgaggccaugagcugcgacuucaacgggggccggaucuccgugcaguacaaccugagccacuccuacgcgguggacgccgccaaccacugcgggaccaucgccaacggcguccugcagaccuucaugcgcauggcguggggcgggagcuacaucgcccucgacuccggcaaggggagcugggacugcaucaugacguccuaccaguaccugaucauccagaacaccaccugggaggaccacugccaguucagccggcccagccccaucggcuaccuggggcuccugucccagcgcacccgggacaucuacaucagccgccggcugcucggcacguucaccuggacccuguccgacagcgagggcaacgagacccccgggggcuacugccugacgcgcuggaugcucaucgaggccgagcugaagugcuucgggaacaccgccguggccaagugcaacgagaagcacgacgaggaguucugcgacaugcugcggcuguucgacuucaacaagcaggcgauccgccggcugaagaccgaggcccagauguccauccagcugaucaacaaggccgugaacgcccucaucaacgaccagcugaucaugaagaaccaccuccgcgacaucaugggcaucccguacugcaacuacagcaaguacugguaccucaaccacaccgucacggggaagaccucccugccccggugcuggcuggugagcaacggcuccuaccucaacgagacccacuucagcgacgacaucgagcagcaggccgacaacaugaucaccgagcugcugcagaaggaguacaucgaccgccagggcaagacgccccucgggcugguggaccuguucgucuucuccaccagcuucuaccugaucuccaucuuccuccaccuggugaagaucccgacccaccggcacaucaccggcaagcccugccccaagccccaccgccugaaccacauggggaucugcagcugcggccucuacaaccacccgggggugcccgucaaguggaagcggugaggacuagucccuguucccagagcccacuuuuuuuucuuuuuuugaaauaaaauagccugucuuucagaucucaaaggcucuuuucagagccaccaaaaaaaaaaaaaaaaaaaaaaaaaaaaaaaaaaaaaaaaaaaaaaaaaaaaaaaaaaaaaaaaagaauu

SEQ ID NO: 14068 - RNA, 1714 nt, Artificial Sequence
  mRNA product Design a-1 (hSL-A64-N5) comprising derived and/or modified sequence from LASV(Lassa virus/H.sapiens-wt/NGA/2016/ISTH_0017;Clade II)__AVO03567__GPC (opt1)
aggagagucccgcagucggcguccagcggcucugcuuguucgugugugugucguugcaggccuuauucaagcuuaccaugggccagaucaucaccuucuuccaggaggugccccacgucaucgaggaggugaugaacaucgugcugaucgcccucagccugcuggccauccucaaggggaucuacaacgucgcgaccugcggccuguucgggcugguguccuuccuccugcugugcggccgcagcugcuccacgaccuacaaggggguguacgagcuccagacccuggagcuggacauggccagccucaacaugaccaugccgcuguccugcacgaagaacaacagccaccacuacaucauggucggcaacgagaccggccuggagcucacccugaccaacacguccaucaucaaccacaaguucugcaaccugagcgacgcccacaagaagaaccucuacgaccacgcccugauguccaucaucagcaccuuccaccuguccauccccaacuucaaccaguacgaggccaugagcugcgacuucaacgggggcaagaucuccgugcaguacaaccucagccacaccuacgcgaucgacgccgccaaccacugcgggaccaucgccaacggcgugcugcagacguucaugcggauggcguggggcggguccuacaucgcccuggacagcggcaagggguccugggacugcaucaugaccagcuaccaguaccucaucauccagaacaccaccugggaggaccacugccaguucucccgccccagccccaucggcuaccuggggcugcucagccagcggacgcgcgacaucuacaucucccggcgccugcugggcaccuucaccuggacccucagcgacuccgagggcaacgagacgcccgggggcuacugccugacccgguggaugcugaucgaggccgagcucaagugcuucgggaacaccgccgucgccaagugcaacgagaagcacgacgaggaguucugcgacaugcugcgccuguucgacuucaacaagcaggcgauccggcgccucaagaccgaggcccagaugagcauccagcugaucaacaaggccgugaacgcccugaucaacgaccagcucaucaugaagaaccaccuccgggacaucaugggcauccccuacugcaacuacuccaaguacugguaccugaaccacacggugaccgggaagaccagccugccccgcugcuggcuggucuccaacggcagcuaccugaacgagacccacuucuccgacgacaucgagcagcaggccgacaacaugaucacggagcuccugcagaaggaguacauggaccggcagggcaagaccccgcuggggcucguggaccuguucguguucagcaccuccuucuaccugaucagcaucuuccugcaccucguccgcaucccgacccaccggcacgugaucggcaagcccugccccaagccccaccgccugaaccacauggggaucugcuccugcggccuguacaagcacccgggggugcccgucaaguggaagcggugaggacuagucccuguucccagagcccacuuuuuuuucuuuuuuugaaauaaaauagccugucuuucagaucucaaaggcucuuuucagagccaccaaaaaaaaaaaaaaaaaaaaaaaaaaaaaaaaaaaaaaaaaaaaaaaaaaaaaaaaaaaaaaaaagaauu

SEQ ID NO: 14069 - RNA, 1714 nt, Artificial Sequence
  mRNA product Design a-1 (hSL-A64-N5) comprising derived and/or modified sequence from LASV(Lassa virus/H.sapiens-wt/NGA/2018/ISTH_0959;Clade II)__AVV65099__GPC (opt1)
aggagagucccgcagucggcguccagcggcucugcuuguucgugugugugucguugcaggccuuauucaagcuuaccaugggccagaucaucaccuucuuccaggaggugccccacgucaucgaggaggugaugaacaucgugcugaucgcccucagccugcuggccauccucaaggggaucuacaacgucgugaccugcggccuguucgggcugguguccuuccuccugcugugcggccgcagcugcuccacgaccuacaagggggucuacgagcuccagacccuggagcuggacauggcgagccucaacaugaccaugccgcuguccugcacgaagaacaacagccaccacuacaucauggugggcaacgagaccggccuggagcucacccugaccaacacguccaucaucaaccacaaguucugcaaccugagcgacgcccacaagaagaaccucuacgaccacgcccugauguccaucaucagcaccuuccaccuguccauccccaacuucaaccaguacgaggccaugagcugcgacuucaacgggggcaagaucuccgugcaguacaaccucagccacgccuacgcgaucgacgccgccaaccacugcgggaccaucgccaacggcguccugcagaccuucaugcggauggcguggggcggguccuacaucgcccuggacagcggcaagggguccugggacugcaucaugacgagcuaccaguaccucaucauccagaacaccaccugggaggaccacugccaguucucccgccccagccccaucggcuaccuggggcugcucagccagcggacccgcgacaucuacaucucccggcgccugcugggcacguucaccuggacccucagcgacuccgagggcaacgagacccccgggggcuacugccugacgcgguggaugcugaucgaggccgagcucaagugcuucgggaacaccgccguggccaagugcaacgagaagcacgacgaggaguucugcgacaugcugcgccuguucgacuucaacaagcaggcgauccggcgccucaagaccgaggcccagaugagcauccagcugaucaacaaggccgugaacgcccugaucaacgaccagcucaucaugaagaaccaccuccgggacaucaugggcaucccguacugcaacuacuccaaguacugguaccugaaccacaccgucacggggaagaccagccugccccgcugcuggcugguguccaacggcagcuaccugaacgagacccacuucuccgacgacaucgagcagcaggccgacaacaugaucaccgagcuccugcagaaggaguacaucgaccggcagggcaagacgccccuggggcucguggaccuguucgucuucagcaccuccuucuaccugaucagcaucuuccugcaccucgugaagaucccgacccaccgccacgugaucggcaagcccugccccaagccccaccggcugaaccacauggggaucugcuccugcggccuguacaagcacccggggguccccgugaaguggaagcgcugaggacuagucccuguucccagagcccacuuuuuuuucuuuuuuugaaauaaaauagccugucuuucagaucucaaaggcucuuuucagagccaccaaaaaaaaaaaaaaaaaaaaaaaaaaaaaaaaaaaaaaaaaaaaaaaaaaaaaaaaaaaaaaaaagaauu

SEQ ID NO: 14070 - RNA, 1714 nt, Artificial Sequence
  mRNA product Design a-1 (hSL-A64-N5) comprising derived and/or modified sequence from LASV(LASV003-NIG-2008;Clade II)__AIT17580__GPC (opt1)
aggagagucccgcagucggcguccagcggcucugcuuguucgugugugugucguugcaggccuuauucaagcuuaccaugggccagaucaucaccuucuuccaggaggugccccacgucaucgaggaggugaugaacaucgugcugaucgcccucagccugcuggccauccucaaggggaucuacaacgucgcgaccugcggccuguucgggcugguguccuuccuccugcugugcggccgcagcugcuccacgaccuacaaggggguguacgagcuccagacccuggagcuggacauggccagccucaacaugaccaugccgcuguccugcacgaagaacaacagccaccacuacaucauggucggcaacgagaccggccuggagcucacccugaccaacacguccaucaucaaccacaaguucugcaaccugagcgacgcccacaagaagaaccucuacgaccacgcccugauguccaucaucagcaccuuccaccuguccauccccaacuucaaccaguacgaggccaugagcugcgacuucaacgggggcaagaucuccgugcaguacaaccucagccacaccuacgcgguggacgccgccaaccacugcgggaccaucgccaacggcguccugcagacguucaugcggauggcguggggcggguccuacaucgcccuggacagcggcaagggguccugggacugcaucaugaccagcuaccaguaccucaucauccagaacaccaccugggaggaccacugccaguucucccgccccagccccaucggcuaccuggggcugcucagccagcggacgcgcgacaucuacaucucccggcgccugcugggcaccuucaccuggacccucagcgacuccgagagcaacgagacgccgggcggguacugccugacccgguggaugcugaucgaggccgagcucaagugcuucggcaacaccgccguggccaagugcaacgagaagcacgacgaggaguucugcgacaugcugcgccuguucgacuucaacaagcaggcgauccggcgccucaaggccgaggcccagauguccauccagcugaucaacaaggccgugaacgcccugaucaacgaccagcucaucaugaagaaccaccuccgggacaucauggggauccccuacugcaacuacagcaaguacugguaccugaaccacaccgucacgggccgcaccucccugccccggugcuggcuggugagcaacggguccuaccugaacgagacccacuucagcgacgacaucgagcagcaggcggacaacaugaucaccgagcuccugcagaaggaguacauggaccgccagggcaagacgccccugggccucguggaccuguucgucuucuccaccagcuucuaccugaucuccaucuuccugcaccucgugaagaucccgacccaccggcacgugaucgggaagcccugccccaagccccaccgccugaaccacaugggcaucugcagcugcgggcuguacaagcacccgggcguccccgugaaguggaagcggugaggacuagucccuguucccagagcccacuuuuuuuucuuuuuuugaaauaaaauagccugucuuucagaucucaaaggcucuuuucagagccaccaaaaaaaaaaaaaaaaaaaaaaaaaaaaaaaaaaaaaaaaaaaaaaaaaaaaaaaaaaaaaaaaagaauu

SEQ ID NO: 14071 - RNA, 1714 nt, Artificial Sequence
  mRNA product Design a-1 (hSL-A64-N5) comprising derived and/or modified sequence from LASV(LASV035-NIG-2009;Clade II)__AIT17588__GPC (opt1)
aggagagucccgcagucggcguccagcggcucugcuuguucgugugugugucguugcaggccuuauucaagcuuaccaugggccagaucaucaccuucuuccaggaggugccccacgucaucgaggaggugaugaacaucgugcugaucgcccucagccugcuggccauccucaaggggaucuacaacgucgcgaccugcggccuguucgggcugguguccuuccuccugcugugcggccgcagcugcuccacgaccuacaaggggguguacgagcuccagacccuggagcuggacauggccagccucaacaugaccaugccgcuguccugcacgaagaacaacagccaccacuacaucauggucggcaacgagaccggccuggagcucacccugaccaacacguccaucaucaaccacaaguucugcaaccugagcgacgcccacaagaagaaccucuacgaccacgcccugauguccaucaucagcaccuuccaccuguccauccccaacuucaaccaguacgaggccaugagcugcgacuucaacgggggcaagaucuccgugcaguacaaccucagccacgcguacgccguggacgccgccaaccacugcgggaccaucgcgaacggcguccugcagaccuucaugcggauggccuggggcggguccuacaucgcccuggacagcggcaagggguccugggacugcaucaugacgagcuaccaguaccucaucauccagaacaccaccugggaggaccacugccaguucucccgccccagccccaucggcuaccuggggcugcucagccagcggacccgcgacaucuacaucucccggcgccugcugggcacguucaccuggacccucagcgacuccgagggcaacgagacccccgggggcuacugccugacgcgguggaugcugaucgaggccgagcucaagugcuucgggaacaccgccguggcgaagugcaacgagaagcacgacgaggaguucugcgacaugcugcgccuguucgacuucaacaagcaggccauccggcgccucaaggccgaggcccagaugagcauccagcugaucaacaaggccgugaacgcgcugaucaacgaccagcucaucaugaagaaccaccuccgggacaucaugggcauccccuacugcaacuacuccaaguacugguaccugaaccacaccgucaccgggaagacgagccugccccgcugcuggcugguguccaacggcagcuaccugaacgagacccacuucuccgacgacaucgagcagcaggccgacaacaugaucaccgagcuccugcagaaggaguacaucgaccggcagggcaagaccccgcuggggcucguggaccuguucgucuucagcacguccuucuaccugaucagcaucuuccugcaccucgugaagaucccgacccaccgccacgugaucggcaagcccugccccaagccccaccggcugaaccacauggggaucugcuccugcggccuguacaagcacccggggguccccgugaaguggaagcgcugaggacuagucccuguucccagagcccacuuuuuuuucuuuuuuugaaauaaaauagccugucuuucagaucucaaaggcucuuuucagagccaccaaaaaaaaaaaaaaaaaaaaaaaaaaaaaaaaaaaaaaaaaaaaaaaaaaaaaaaaaaaaaaaaagaauu

SEQ ID NO: 14072 - RNA, 1714 nt, Artificial Sequence
  mRNA product Design a-1 (hSL-A64-N5) comprising derived and/or modified sequence from LASV(LASV1000-NIG-2009;Clade II)__AIT17782__GPC (opt1)
aggagagucccgcagucggcguccagcggcucugcuuguucgugugugugucguugcaggccuuauucaagcuuaccaugggccagaucaucaccuucuuccaggaggugccccacgucaucgaggaggugaugaacaucgugcugaucgcccucagccugcuggccauccucaaggggaucuacaacgucgcgaccugcggccuguucgggcugguguccuuccuccugcugugcggccgcagcugcuccacgaccuacaaggggguguacgagcuccagacccuggagcuggacauggccagccucaacaugaccaugccgcuguccugcacgaagaacaacagccaccacuacaucauggucggcaacgagaccggccuggagcucacccugaccaacacguccaucaucaaccacaaguucugcaaccugagcgacgcccacaagaagaaccucuacgaccacgcccugauguccaucaucagcaccuuccaccuguccauccccaacuucaaccaguacgaggccaugagcugcgacuucaacgggggcaagaucuccgugcaguacaaccucagccacaccuacgcgguggacgccgccaaccacugcgggaccaucgccaacggcguccugcagacguucaugcggauggcguggggcggguccuacaucgcccuggacagcggcaagggguccugggacugcaucaugaccagcuaccaguaccucaucauccagaacaccaccugggaggaccacugccaguucucccgccccagccccaucggcuaccuggggcugcucagccagcggacgcgcgacaucuacaucucccggcgccugcugggcaccuucaccuggacccucagcgacuccgagggcaacgagacgcccgggggcuacugccugacccgguggaugcugaucgaggccgagcucaagugcuucgggaacaccgccguggccaagugcaacgagaagcacgacgaggaguucugcgacaugcugcgccuguucgacuucaacaagcaggcgaucaagcggcucaagaccgaggcccagaugagcauccagcugaucaacaaggccgugaacgcccugaucaacgaccagcucaucaugaagaaccaccuccgcgacaucaugggcauccccuacugcaacuacuccaaguacugguaccugaaccacacggucaccgggaagaccagccugccccggugcuggcugguguccaacggcagcuaccugaacgagacccacuucuccgacgacaucgagcagcaggccgacaacaugaucacggagcuccugcagaaggaguacaucgaccgccagggcaagaccccgcuggggcucguggaccuguucgucuucagcaccuccuucuaccugaucagcaucuuccugcaccucgugaagaucccgacccaccggcacguggucggcaagcccugccccaagccccaccgccugaaccacauggggaucugcuccugcggccuguacaagcacccgggggugcccgugaaguggaagcggugaggacuagucccuguucccagagcccacuuuuuuuucuuuuuuugaaauaaaauagccugucuuucagaucucaaaggcucuuuucagagccaccaaaaaaaaaaaaaaaaaaaaaaaaaaaaaaaaaaaaaaaaaaaaaaaaaaaaaaaaaaaaaaaaagaauu

SEQ ID NO: 14073 - RNA, 1714 nt, Artificial Sequence
  mRNA product Design a-1 (hSL-A64-N5) comprising derived and/or modified sequence from LASV(LASV221-NIG-2010;Clade II)__AIT17624__GPC (opt1)
aggagagucccgcagucggcguccagcggcucugcuuguucgugugugugucguugcaggccuuauucaagcuuaccaugggccagaucaucaccuucuuccaggaggugccccacgucaucgaggaggugaugaacaucgugcugaucgcccucagccugcuggccauccucaaggggaucuacaacgucgcgaccugcggccuguucgggcugguguccuuccuccugcugugcggccgcagcugcuccacgaccuacaaggggguguacgagcuccagacccuggagcuggacauggccagccucaacaugaccaugccgcuguccugcacgaagaacaacagccaccacuacaucauggucggcaacgagaccggccuggagcucacccugaccaacacguccaucaucaaccacaaguucugcaaccugagcgacgcccacaagaagaaccucuacgaccacgcccugauguccaucaucagcaccuuccaccuguccauccccaacuucaaccaguacgaggccaugagcugcgacuucaacgggggcaagaucuccgugcaguacaaccucagccacaccuacgcgaucgacgccgccaaccacugcgggaccaucgccaacggcgugcugcagacguucaugcggauggcguggggcggguccuacaucgcccuggacagcggcaagggguccugggacugcaucaugaccagcuaccaguaccucaucauccagaacaccaccugggaggaccacugccaguucucccgccccagccccaucggcuaccuggggcugcucagccagcggacgcgcgacaucuacaucucccggcgccugcugggcaccuucaccuggacccucagcgacuccgagggcaacgagacgcccgggggcuacugccugacccgguggaugcugaucgaggccgagcucaagugcuucgggaacaccgccgucgccaagugcaacgagaagcacgacgaggaguucugcgacaugcugcgccuguucgacuucaacaagcaggcgauccggcgccucaagaccgaggcccagaugagcauccagcugaucaacaaggccgugaacgcccugaucaacgaccagcucaucaugaagaaccaccuccgggacaucaugggcauccccuacugcaacuacuccaaguacugguaccugaaccacacggugaccgggaagaccagccugccccgcugcuggcuggucuccaacggcagcuaccugaacgagacccacuucuccgacgacaucgagcagcaggccgacaacaugaucacggagaugcuccagaaggaguacauggaccggcagggcaagaccccgcuggggcugguggaccucuucguguucagcaccuccuucuaccugaucagcaucuuccugcaccuggucaagaucccgacccaccgccacgugaucggcaagcccugccccaagccccaccggcucaaccacauggggaucugcuccugcggccuguacaagcacccgggggugcccgucaaguggaagcgcugaggacuagucccuguucccagagcccacuuuuuuuucuuuuuuugaaauaaaauagccugucuuucagaucucaaaggcucuuuucagagccaccaaaaaaaaaaaaaaaaaaaaaaaaaaaaaaaaaaaaaaaaaaaaaaaaaaaaaaaaaaaaaaaaagaauu

SEQ ID NO: 14074 - RNA, 1714 nt, Artificial Sequence
  mRNA product Design a-1 (hSL-A64-N5) comprising derived and/or modified sequence from LASV(LASV237-NIG-2010;Clade II)__AIT17638__GPC (opt1)
aggagagucccgcagucggcguccagcggcucugcuuguucgugugugugucguugcaggccuuauucaagcuuaccaugggccagaucaucaccuucuuccaggaggugccccacgucaucgaggaggugaugaacaucgugcugaucgcccucagccugcuggccauccucaaggggaucuacaacgucgcgaccugcggccuguucgggcugguguccuuccuccugcugugcggccgcagcugcuccacgaccuacaaggggguguacgagcuccagacccuggagcuggacauggccagccucaacaugaccaugccgcuguccugcacgaagaacaacagccaccacuacaucauggucggcaacgagaccggccuggagcucacccugaccaacacguccaucaucaaccacaaguucugcaaccugagcgacgcccacaagaaggaccucuacgaccacgcccugauguccaucaucagcaccuuccaccuguccauccccaacuucaaccaguacgaggccaugagcugcgacuucaacgggggcaagaucuccgugcaguacaaccucagccacaccuacgcgguggacgccgccaaccacugcgggaccaucgccaacggcguccugcagacguucaugcggauggcguggggcggguccuacaucgcccuggacagcggcaagggguccugggacugcaucaugaccagcuaccaguaccucaucauccagaacaccaccugggaggaccacugccaguucucccgccccagccccaucggcuaccuggggcugcucagccagcggacgcgcgacaucuacaucucccggcgccugcugggcaccuucaccuggacccucagcgacuccgagggcaacgagacgcccgggggcuacugccugacccgguggaugcugaucgaggccgagcucaagugcuucgggaacaccgccguggccaagugcaacgagaagcacgacgaggaguucugcgacaugcugcgccuguucgacuucaacaagcaggcgauccggcgccucaagaccgaggcccagaugagcauccagcugaucaacaaggccgugaacgcccugaucaacgaccagcucaucaugaagaaccaccuccgggacaucaugggcauccccuacugcaacuacuccaaguacugguaccugaaccacacggucaccgggaagaccagccugccccgcugcuggcugguguccaacggcagcuaccugaacgagacccacuucuccgacgacaucgagcagcaggccgacaacaugaucacggagcuccugcagaaggaguacauggaccggcagggcaagaccccgcuggggcucguggaccuguucgucuucagcaccuccuucuaccugaucagcaucuuccugcaccucaucaagaucccgacccaccgccacaucacgggcaagcccugccccaagccccaccggcugaaccacauggggaucugcuccugcggccuguacaagcacccgggggugcccgugaaguggaagcgcugaggacuagucccuguucccagagcccacuuuuuuuucuuuuuuugaaauaaaauagccugucuuucagaucucaaaggcucuuuucagagccaccaaaaaaaaaaaaaaaaaaaaaaaaaaaaaaaaaaaaaaaaaaaaaaaaaaaaaaaaaaaaaaaaagaauu

SEQ ID NO: 14075 - RNA, 1714 nt, Artificial Sequence
  mRNA product Design a-1 (hSL-A64-N5) comprising derived and/or modified sequence from LASV(LASV253-NIG-2011;Clade II)__AIT17670__GPC (opt1)
aggagagucccgcagucggcguccagcggcucugcuuguucgugugugugucguugcaggccuuauucaagcuuaccaugggccagaucaucaccuucuuccaggaggugccccacgucaucgaggaggugaugaacaucgugcugaucgcccucagccugcuggccauccucaaggggaucuacaacgucgcgaccugcggccuguucgggcugguguccuuccuccugcugugcggccgcagcugcuccacgaccuacaaggggguguacgagcuccagacccuggagcuggacauggccagccucaacaugaccaugccgcuguccugcacgaagaacaacagccaccacuacaucauggucggcaacgagaccggccuggagcucacccugaccaacacguccaucaucaaccacaaguucugcaaccugagcgacgcccacaagaagaaccucuacgaccacgcccugauguccaucaucagcaccuuccaccuguccauccccaacuucaaccaguacgaggccaugagcugcgacuucaacgggggcaagaucuccgugcaguacaaccucagccacaccuacgcgguggacgccgccaaccacugcgggaccaucgccaacggcguccugcagacguucaugcggauggcguggggcggguccuacaucgcccuggacagcggcaagggguccugggacugcaucaugaccagcuaccaguaccucaucauccagaacaccaccugggaggaccacugccaguucucccgccccagccccaucggcuaccuggggcugcucagccagcggacgcgcgacaucuacaucucccggcgccugcugggcaccuucaccuggacccucagcgacuccgagggcaacgagacgcccgggggcuacugccugacccgguggaugcugaucgaggccgagcucaagugcuucgggaacaccgccguggccaagugcaacgagaagcacgacgaggaguucugcgacaugcugcgccuguucgacuucaacaagcaggcgauccggcgccucaaggccgaggcccagaugagcauccagcugaucaacaaggccgugaacgcccugaucaacgaccagcucaucaugaagaaccaccuccgggacaucaugggcaucccguacugcaacuacuccaaguacugguaccugaaccacaccgucacggggcgcaccagccugccccggugcuggcugguguccaacggcagcuaccugaacgagacccacuucuccgacgacaucgagcagcaggcggacaacaugaucaccgagcuccugcagaaggaguacaucgaccgccagggcaagacgccccuggggcucguggaccuguucgucuucagcaccuccuucuaccugaucagcaucuuccugcaccucgugaagaucccgacccaccggcacaucaucggcaagcccugccccaagccccaccgccugaaccacauggggaucugcuccugcggccuguacaagcacccgggggugcccgucaaguggaagcggugaggacuagucccuguucccagagcccacuuuuuuuucuuuuuuugaaauaaaauagccugucuuucagaucucaaaggcucuuuucagagccaccaaaaaaaaaaaaaaaaaaaaaaaaaaaaaaaaaaaaaaaaaaaaaaaaaaaaaaaaaaaaaaaaagaauu

SEQ ID NO: 14076 - RNA, 1714 nt, Artificial Sequence
  mRNA product Design a-1 (hSL-A64-N5) comprising derived and/or modified sequence from LASV(LASV254-NIG-2011;Clade II)__AIT17674__GPC (opt1)
aggagagucccgcagucggcguccagcggcucugcuuguucgugugugugucguugcaggccuuauucaagcuuaccaugggccagaucaucaccuucuuccaggaggugccccacgucaucgaggaggugaugaacaucgugcugaucgcccucagccugcuggccauccucaaggggaucuacaacgucgcgaccugcggccuguucgggcugguguccuuccuccugcugugcggccgcagcugcuccacgaccuacaaggggguguacgagcuccagacccuggagcuggacaugaccaaccucaacaugacgaugccgcugagcugcaccaagaacaacucccaccacuacaucauggucggcaacgagaccggccuggagcucacccugacgaacaccagcaucaucaaccacaaguucugcaaccuguccgacgcccacaagaagaaccucuacaaccacgcccugaugagcaucaucuccaccuuccaccugagcauccccaacuucaaccaguacgaggccauguccugcgacuucaacgggggcaagaucagcgugcaguacaaccucucccacagcuacgccguggacgcggccaaccacugcgggaccaucgccaacggcguccugcagacguucaugcggauggccuggggcggguccuacaucgcgcuggacagcggcaaggggaacugggacugcaucaugaccuccuaccaguaccucaucauccagaacaccaccugggaggaccacugccaguucagccgccccucccccaucggcuaccuggggcugcucagccagcggacgcgcgacaucuacaucagccggcgccugcugggcaccuucaccuggacccucuccgacagcgagggcaacgagacgcccgggggcuacugccugacccgguggaugcugaucgaggccgagcucaagugcuucgggaacaccgccguggccaagugcaacgagaagcacgacgaggaguucugcgacaugcugcgccuguucgacuucaacaagcaggccauccggcgccucaagaccgaggcgcaggccaacauccagcugaucaacaaggccgugaacgcccugaucaacgaccagcucaucaugaagaaccaccuccgggacaucaugggcauccccuacugcaacuacuccaaguacugguaccugaaccacacggucaccgggaagaccagccugccccgcugcuggcugguguccaacggcagcuaccugaacgagacccacuucuccgacgacaucgagcagcaggccgacaacaugaucacggagcuccugcagaaggaguacauggaccggcagggcaagaccccgcuggggcucguggaccuguucgucuucagcaccuccuucuaccugaucagcaucuuccugcaccucgugaagaucccgacccaccgccacgugaucggcaagcccugccccaagccccaccggcugaaccacauggggaucugcuccugcggccuguacaagcacccggggguccccgugaaguggaagcgcugaggacuagucccuguucccagagcccacuuuuuuuucuuuuuuugaaauaaaauagccugucuuucagaucucaaaggcucuuuucagagccaccaaaaaaaaaaaaaaaaaaaaaaaaaaaaaaaaaaaaaaaaaaaaaaaaaaaaaaaaaaaaaaaaagaauu

SEQ ID NO: 14077 - RNA, 1714 nt, Artificial Sequence
  mRNA product Design a-1 (hSL-A64-N5) comprising derived and/or modified sequence from LASV(Nig08-A19;Clade III)__ADU56618__GPC (opt1)
aggagagucccgcagucggcguccagcggcucugcuuguucgugugugugucguugcaggccuuauucaagcuuaccaugggccagaucgugaccuucuuccaggaggucccccacgugaucgaggaggugaugaacaucguccugaucgcccucagcauccuggccauccugaaggggcucuacaacaucgcgaccugcggccugaucgggcuggugacguuccuccugcuguccggccgcagcugcuccaugaccuacaaggggguguacgagcuccagacccuggagcugaacaugaacacccucaacaugacgaugccgcugagcugcaccaagaacaacucccaccacuacaucauggucggcaacgagaccggccuggagcucacccugacgaacaccagccugcuccaccacaaguucugcaaccuguccgacgcccacaagaagaaccuguacgaccacacccucaugagcaucaucuccaccuuccaccugagcauccccaacuucaaccaguacgaggccauguccugcgacuucaacgggggcaagaucacggugcaguacaaccugagccacuccuacgccaucgacgccgcgaaccacugcgggaccguggccaacggcguccuccagaccuucaugcggauggccuggggcgggagcuacaucgcccuggacuccggccgcgggaagugggacugcaucaugaccagcuaccaguaccugaucauccagaacacgaccugggaggaccacugccaguucucccggcccagccccaucggcuaccucgggcugcugucccagcgcacccgggacaucuacaucagccgccggcuccugggcaccuucacguggacccugagcgacuccgagggcaacgagacccccgggggcuacugccucacccgcuggaugcugaucgaggcggagcugaagugcuucgggaacacggccguggccaagugcaacgagaagcacgacgaggaguucugcgacaugcuccggcuguucgacuucaacaagcaggccauccgccggcugaaggccgaggcgcagaugagcauccagcucaucaacaaggccgugaacgcccugaucaacgaccagcugaucaugaagaaccaccuccgcgacaucaugggcauccccuacugcaacuacuccaaguacugguaccugaaccacaccagcaccgggcggaccucccugccccgcugcuggcucgucagcaacggcuccuaccugaacgagacgcacuucagcgacgacaucgagcagcaggccgacaacaugaucaccgagaugcugcagaaggaguaccucgaccggcagggcaagaccccgcuggggcugguggaccuguucguguucuccaccagcuucuaccucaucuccaucuuccugcaccuggucaagaucccgacgcaccgccacaucgugggcaagcccugccccaagccccaccggcucaaccacauggggaucugcagcugcggccuguacaagcagccgggggugcccguccgcuggaagcggugaggacuagucccuguucccagagcccacuuuuuuuucuuuuuuugaaauaaaauagccugucuuucagaucucaaaggcucuuuucagagccaccaaaaaaaaaaaaaaaaaaaaaaaaaaaaaaaaaaaaaaaaaaaaaaaaaaaaaaaaaaaaaaaaagaauu

SEQ ID NO: 14078 - RNA, 1717 nt, Artificial Sequence
  mRNA product Design a-1 (hSL-A64-N5) comprising derived and/or modified sequence from LASV(G1180-SLE-2010;Clade IV)__AIT17168__GPC (opt1)
aggagagucccgcagucggcguccagcggcucugcuuguucgugugugugucguugcaggccuuauucaagcuuaccaugggccagaucgugaccuucuuccaggaggucccccacgugaucgaggaggugaugaacaucguccugaucgcccucagcauccuggccgugcugaaggggcucuacaacuucgcgaccugcggccugguggggcugcucaccuuccugcugcucugcggccgcuccugcaccgccagccgguacaagggggucuacgagcugcagacccuggagcucaacauggagacccugaacaugacgaugccgcuguccugcaccaagaacaacagccaccacuacaucauggugggcaacgagaccggccucgagcugacccugacgaacaccuccaucaucaaccacaaguucugcaaccucagcgacgcccacaagaagaaccuguacgaccacgcccugauguccaucaucagcaccuuccaccucuccauccccaacuucaaccaguacgaggccaugagcugcgacuucaacgggggcaagaucuccgugcaguacaaccugagccacuccuacgcgggggacgccgccaaccacugcggcaccgucgccaacggggugcugcagacguucaugcgcauggcguggggcggcagcuacaucgcccucgacuccgggcacggcagcugggacugcaucaugaccuccuaccaguaccugaucauccagaacaccaccugggaggaccacugccaguucagccggcccucccccaucggguaccugggccuccugagccagcgcacgcgggacaucuacaucagccgccggcugcucggcaccuucaccuggacccuguccgacagcgaggggaaggacacgccgggcggguacugccugacccgcuggaugcucaucgaggccgagcugaagugcuucggcaacaccgccguggccaagugcaacgagaagcacgacgaggaguucugcgacaugcugcggcuguucgacuucaacaagcaggcgauccagcgccugaaggccgaggcccagauguccauccagcugaucaacaaggccgucaacgcccucaucaacgaccagcugaucaugaagaaccaccuccgggacaucauggggauccccuacugcaacuacagcaaguacugguaccucaaccacaccacgaccggcaagaccucccugcccaagugcuggcuggugagcaacggcuccuaccucaacgagacccacuucagcgacgacaucgagcagcaggcggacaacaugaucacggagaugcugcagaaggaguacauggagcgccaggggaagacgccccugggccucguggaccuguucgucuucuccaccagcuucuaccugaucuccaucuuccugcaccucgugaagaucccgacccaccggcacaucgugggcaagagcugccccaagccccaccgccugaaccacauggggaucugcuccugcgggcuguacaagcagcccggcgucccggugaaguggaagcggugaggacuagucccuguucccagagcccacuuuuuuuucuuuuuuugaaauaaaauagccugucuuucagaucucaaaggcucuuuucagagccaccaaaaaaaaaaaaaaaaaaaaaaaaaaaaaaaaaaaaaaaaaaaaaaaaaaaaaaaaaaaaaaaaagaauu

SEQ ID NO: 14079 - RNA, 1717 nt, Artificial Sequence
  mRNA product Design a-1 (hSL-A64-N5) comprising derived and/or modified sequence from LASV(G1442-SLE-2011;Clade IV)__AIT17180__GPC (opt1)
aggagagucccgcagucggcguccagcggcucugcuuguucgugugugugucguugcaggccuuauucaagcuuaccaugggccagaucgugaccuucuuccaggaggucccccacgugaucgaggaggugaugaacaucguccugaucgcccucagcauccuggccgugcugaaggggcucuacaacguggcgaccugcggccugaucgggcuggucacguuccuccugcugugcggccgcuccugcaccaccacccucuacaaggggguguacgagcugcagacgcuggagcucaacauggagacccugaacaugaccaugccgcugagcugcaccaagaacaacucccaccacuacauccgggugggcaacgagacgggccucgagcugacccugaccaacaccagcaucaucaaccacaaguucugcaaccucuccgacgcccacaagaagaaccuguacgaccacgcccugaugagcaucaucuccacguuccaccucagcauccccaacuucaaccaguacgaggccauguccugcgacuucaacgggggcaagaucagcguccaguacaaccugucccacagcuacgccggggacgcggccaaccacugcggcaccguggccaacggggugcugcagaccuucaugcgcauggccuggggcggcuccuacaucgcgcucgacagcgggcggggcaacugggacugcaucaugaccuccuaccaguaccugaucauccagaacacgaccugggacgaccacugccaguucagccgccccucccccaucggguaccugggccuccugagccagcggacccgcgacgucuacaucucccggcgccugcucggcaccuucacguggacccugagcgacagcgaggggaaggacaccccgggcggguacugccugacccgguggaugcucaucgaggccgagcugaagugcuucggcaacacggccguggccaagugcaacgagaagcacgacgaggaguucugcgacaugcugcgccucuucgacuucaacaagcaggccauccagcggcugaaggcggaggcccagauguccauccagcugaucaacaaggccgugaacgcccucaucaacgaccagcugaucaugaagaaccaccuccgcgacaucauggggauccccuacugcaacuacagcaaguacugguaccugaacaacaccgccaccggcaagaccucccugcccaagugcuggcugaucagcaacggcuccuaccucaacgagacgcacuucagcgacgacaucgagcaggaggcggacaacaugaucaccgagaugcugcagaaggaguacauggagcggcaggggaagacgccccugggccucgucgaccuguucguguucuccaccagcuucuaccugaucuccaucuuccugcaccucgugaagaucccgacccaccgccacaucgucggcaagagcugccccaagccccaccggcugaaccacauggggaucugcuccugcgggcuguacaagcagcccggcgugccggugcgcuggaagcggugaggacuagucccuguucccagagcccacuuuuuuuucuuuuuuugaaauaaaauagccugucuuucagaucucaaaggcucuuuucagagccaccaaaaaaaaaaaaaaaaaaaaaaaaaaaaaaaaaaaaaaaaaaaaaaaaaaaaaaaaaaaaaaaaagaauu

SEQ ID NO: 14080 - RNA, 1717 nt, Artificial Sequence
  mRNA product Design a-1 (hSL-A64-N5) comprising derived and/or modified sequence from LASV(G3010-SLE-2013;Clade IV)__AIT17344__GPC (opt1)
aggagagucccgcagucggcguccagcggcucugcuuguucgugugugugucguugcaggccuuauucaagcuuaccaugggccagaucgugaccuucuuccaggaggucccccacgugaucgaggaggugaugaacaucguccugaucgcccucagcauccuggccgugcugaaggggcucuacaacuucgcgaccugcggccugguggggcuggucacguuccuccugcugugcggccgcuccugcaccaccagccucuacaaggggguguacgagcugcagacccuggagcucaacauggagacgcugaacaugaccaugccgcuguccugcaccaagaacaacagccaccacuacaucauggugggcaacgagaccggccucgagcugacgcugaccaacaccuccaucaucaaccacaaguucugcaaccucagcgacgcccacaagaagaaccuguacaaccacgcccugauguccaucaucagcaccuuccaccucuccauccccaacuucaaccaguacgaggccaugagcugcgacuucaacgggggcaagaucuccguccaguacaaccugagccacuccuacgccggggacgcggccagccacugcggcacgguggccaacggggugcugcagaccuucaugcggauggccuggggcggcuccuacaucgcgcucgacagcggguacggcaagugggacugcaucaugaccuccuaccaguaccugaucauccagaacaccacgugggaggaccacugccaguucagccgccccucccccaucggguaccugggccuccugagccagcggacccgcgacaucuacaucagccggcgccugcucggcaccuucaccuggacgcuguccgacagcgaggggaaggacaccccgggcggguacugccugacccgguggaugcucaucgaggccgagcugaagugcuucggcaacaccgccgucgccaagugcaacgagaagcacgacgaggaguucugcgacaugcugcgccucuucgacuucaacaagcaggccauccagcggcugaagacggaggcgcagauguccauccagcugaucaacaaggccgugaacgcccucaucaacgaccagcugaucaugaagaaccaccuccgcgacaucauggggauccccuacugcaacuacagcaaguacugguaccugaaccacaccaccaccggcaagacgucccugcccaagugcuggcuggugagcaacggcuccuaccucaacgagacccacuucagcgacgacaucgagcagcaggccgacaacaugaucaccgagaugcugcagaaggaguacauggagcggcaggggaagacgccccugggccucgucgaccuguucguguucuccaccagcuucuaccugaucuccaucuuccugcaccucgugaagaucccgacccaccgccacaucgucggcaagagcugccccaagccccaccggcugaaccacauggggaucugcuccugcgggcuguacaagcagcccggcgugccggugcgcuggaagcggugaggacuagucccuguucccagagcccacuuuuuuuucuuuuuuugaaauaaaauagccugucuuucagaucucaaaggcucuuuucagagccaccaaaaaaaaaaaaaaaaaaaaaaaaaaaaaaaaaaaaaaaaaaaaaaaaaaaaaaaaaaaaaaaaagaauu

SEQ ID NO: 14081 - RNA, 1717 nt, Artificial Sequence
  mRNA product Design a-1 (hSL-A64-N5) comprising derived and/or modified sequence from LASV(G502-SLE-2009;Clade IV)__AIT17126__GPC (opt1)
aggagagucccgcagucggcguccagcggcucugcuuguucgugugugugucguugcaggccuuauucaagcuuaccaugggccagaucgugaccuucuuccaggaggucccccacgugaucgaggaggugaugaacaucguccugaucgcccucagcauccuggccgugcugaaggggcucuacaacuucgcgaccugcggccugguggggcugcucacguuccugcugcucugcggccgcuccugcaccaccgggcuguacaagggcgucuacgagcugcagacccucgagcugaacauggagacgcugaacaugaccaugccgcucagcugcaccaagaacaacucccaccacuacaucauggugggcaacgagaccgggcuggagcugacgcucaccaacaccagcaucaucaaccacaaguucugcaaccuguccgacgcccacaagaagaaccuguacgaccacgcccucaugagcaucaucuccaccuuccaccugagcauccccaacuucaaccaguacgaggccauguccugcgacuucaacggcgggaagaucagcgugcaguacaaccugucccacagcuacgccggcgacgcggccgaccacugcgggacggucgccaacggcgugcuccagaccuucaugcggauggccuggggcggguccuacaucgcgcuggacagcggccgcgggcggugggacugcaucaugaccuccuaccaguaccugaucauccagaacaccacgugggaggaccacugccaguucagccgccccucccccaucggcuaccucggccugcugagccagcggacccgcgacaucuacaucucccggcgccuccuggggaccuucaccuggacgcugagcgacagcgagggcaaggacacccccgggggcuacugccucacccgguggaugcugaucgaggccgagcugaagugcuucgggaacaccgccguggccaagugcaacgagaagcacgacgaggaguucugcgacaugcuccgccuguucgacuucaacaagcaggccauccagcggcugaaggcggaggcccagauguccauccagcucaucaacaaggccgucaacgcccugaucaacgaccagcuggugaugaagaaccaccuccgcgacaucaugggcauccccuacugcaacuacagccgguacugguaccugaaccacacgaccaccggccgcaccucccugcccaagugcuggcucgugagcaacggguccuaccugaacgagacgcacuucagcgacgacaucgagcagcaggccgacaacaugaucaccgagaugcugcagaaggaguacauggagcggcagggcaagaccccgcucgggcuggucgaccuguucguguucuccaccagcuucuaccugaucuccaucuuccuccaccuggugaagaucccgacgcaccgccacaucgucggcaagagcugccccaagccccaccggcugaaccacauggggaucugcuccugcggccucuacaagcagcccggcgugccggugaaguggaagcgcugaggacuagucccuguucccagagcccacuuuuuuuucuuuuuuugaaauaaaauagccugucuuucagaucucaaaggcucuuuucagagccaccaaaaaaaaaaaaaaaaaaaaaaaaaaaaaaaaaaaaaaaaaaaaaaaaaaaaaaaaaaaaaaaaagaauu

SEQ ID NO: 14082 - RNA, 1717 nt, Artificial Sequence
  mRNA product Design a-1 (hSL-A64-N5) comprising derived and/or modified sequence from LASV(G733-SLE-2010;Clade IV)__AIT17154__GPC (opt1)
aggagagucccgcagucggcguccagcggcucugcuuguucgugugugugucguugcaggccuuauucaagcuuaccaugggccagaucgugaccuucuuccaggaggucccccacgugaucgaggaggugaugaacaucguccugaucgcccucagcauccuggccgugcugaaggggcucuacaacuucgcgaccugcggcaucguggggcuggucuccuuccugcuccugugcggccgcagcugcacgaccucccuguacaaggggguguacgagcuccagacccuggagcugaacauggagacccucaacaugacgaugccgcugagcugcaccaagaacaacucccaccacuacaucauggugggcaacgagaccggccuggagcucacccugacgaacaccagcaucaucaaccacaaguucugcaaccuguccgacgcccacaagaagaaccucuacgaccacgcccugaugagcaucaucuccaccuuccaccugagcauccccaacuucaaccaguacgaggccauguccugcgacuucaacgggggcaagaucagcguccaguacaaccucucccacagcuacgccggggacgcggccaaccacugcggcaccaucgccaacggggugcugcagacguucaugcggauggccuggggcggcuccuacaucgcgcuggacagcgggcgcgaccggugggacugcaucaugaccuccuaccaguaccucaucauccagaacaccaccugggaggaccacugccaguucagccgccccucccccaucggcuaccuggggcugcucagccagcggacgcgcgacaucuacaucagccggcgccugcugggcaccuucaccuggacccucuccgacagcgagggcaaggacacgcccgggggcuacugccugacccgguggaugcugaucgaggccgagcucaagugcuucgggaacaccgccguggccaagugcaacgagaagcacgacgaggaguucugcgacaugcugcgccuguucgacuucaacaagcaggccauccagcggcucaaggcggaggcccagauguccauccagcugaucaacaaggccgucaacgcccugaucaacgaccagcucaucaugaagaaccaccuccgcgacaucaugggcauccccuacugcaacuacagcaaguacugguaccugaaccacaccacgaccgggaagaccucccugcccaagugcuggcuggugagcaacggcuccuaccugaacgagacccacuucagcgacgacaucgagcagcaggccgacaacaugaucacggagaugcuccagaaggaguacauggagcggcagggcaagaccccgcuggggcugguggaccucuucgucuucuccaccagcuucuaccugaucuccaucuuccugcaccuggugaagaucccgacccaccgccacguggucggcaagagcugccccaagccccaccggcucaaccacauggggaucugcuccugcggccuguacgggcagcccggcgugccggugaaguggaagcgcugaggacuagucccuguucccagagcccacuuuuuuuucuuuuuuugaaauaaaauagccugucuuucagaucucaaaggcucuuuucagagccaccaaaaaaaaaaaaaaaaaaaaaaaaaaaaaaaaaaaaaaaaaaaaaaaaaaaaaaaaaaaaaaaaagaauu

SEQ ID NO: 14083 - RNA, 1717 nt, Artificial Sequence
  mRNA product Design a-1 (hSL-A64-N5) comprising derived and/or modified sequence from MOPV/LASV reassortant(IGS-1;Clade IV)__AFY05576__GPC (opt1)
aggagagucccgcagucggcguccagcggcucugcuuguucgugugugugucguugcaggccuuauucaagcuuaccaugggccagaucgugaccuucuuccaggaggucccccacgugaucgaggaggugaugaacaucguccugaucgcccucagcgugcuggccgugcugaaggggcucuacaacuucgcgaccugcggccuggucgggcuggugacguuccuccugcugugcggccgcuccugcaccaccagccucuacaaggggguguacgagcugcagacccuggagcucaacauggagacgcugaacaugaccaugccgcuguccugcaccaagaacaacagccaccacuacaucauggucggcaacgagaccggccucgagcugacgcugaccaacaccuccaucaucaaccacaaguucugcaaccucagcgacgcccacaagaagaaccuguacgaccacgcccugauguccaucaucagcaccuuccaccucuccauccccaacuucaaccaguacgaggccaugagcugcgacuucaacgggggcaagaucuccgugcaguacaaccugagccacuccuacgccggggacgcggccaaccacugcggcacgguggccaacgggguccugcagaccuucaugcggauggccuggggcggcagcuacaucgcgcucgacuccgggcgcggcaacugggacugcaucaugaccagcuaccaguaccugaucauccagaacaccacgugggaggaccacugccaguucucccggcccagccccaucggguaccugggccuccugucccagcgcacccgggacaucuacaucagccgccggcugcucggcaccuucaccuggacgcugagcgacuccgagggggaggacaccccgggcggguacugccugacccgcuggaugcucaucgaggccgagcugaagugcuucggcaacaccgccguggccaagugcaacgagaagcacgacgaggaguucugcgacaugcugcggcuguucgacuucaacaagcaggccauccagcgccugaaggcggaggcccagaugagcauccagcugaucaacaaggccgugaacgcccucaucaacgaccagcugaucaugaagaaccaccuccgggacaucauggggauccccuacugcaacuacuccaaguacugguaccucaaccacacgaccaccggccgcaccagccugcccaagugcuggcuggucuccaacggcagcuaccucaacgagacgcacuucuccgacgacaucgagcagcaggccgacaacaugaucaccgagaugcugcagaaggaguacauggagcggcaggggaagacgccccugggccucguggaccuguucguguucagcaccuccuucuaccugaucagcaucuuccugcaccucgucaagaucccgacccaccgccacaucguggggaaguccugccccaagccccaccggcugaaccacaugggcaucugcagcugcgggcuguacaagcagcccggcgugccggucaaguggaagcgcugaggacuagucccuguucccagagcccacuuuuuuuucuuuuuuugaaauaaaauagccugucuuucagaucucaaaggcucuuuucagagccaccaaaaaaaaaaaaaaaaaaaaaaaaaaaaaaaaaaaaaaaaaaaaaaaaaaaaaaaaaaaaaaaaagaauu

SEQ ID NO: 14084 - RNA, 1717 nt, Artificial Sequence
  mRNA product Design a-1 (hSL-A64-N5) comprising derived and/or modified sequence from LASV(LM765-SLE-2012;Clade IV)__AIT17814__GPC (opt1)
aggagagucccgcagucggcguccagcggcucugcuuguucgugugugugucguugcaggccuuauucaagcuuaccaugggccagaucgugaccuucuuccaggaggucccccacgugaucgaggaggugaugaacaucguccugaucgcccucagcauccuggccgugcugaaggggcucuacaacuucgcgaccugcggccugguggggcuggucacguuccuccugcugugcggccgcuccugcaccaccagccucuacaaggggguguacgagcugcagacccuggagcucaacauggagacgcugaacaugaccaugccgcuguccugcaccaagaacaacagccaccacuacaucauggugggcaacgagaccggccucgagcugacgcugaccaacaccuccaucaucgaccacaaguucugcaaccucagcgacgcccaccggaagaaccuguacgaccacgcccugauguccaucaucagcaccuuccaccucuccauccccaacuucaaccaguacgaggccaugagcugcgacuucaacgggggcaagaucuccguccaguacaaccugagccacuccuacgccaaggacgcggccgaccacugcgggacgguggccaacggcgugcugcagaccuucaugcgcauggccuggggcgggagcuacaucgcgcucgacuccggccgggggcgcugggacugcaucaugaccagcuaccaguaccugaucauccagaacaccacgugggaggaccacugccaguucucccggcccagccccaucggcuaccuggggcuccugucccagcgcacccgggacaucuacaucagccgccggcugcucggcaccuucaccuggacgcugagcgacuccgagggcaaggacacccccgggggcuacugccugacccgcuggaugcucaucgaggccgagcugaagugcuucgggaacaccgccgucgccaagugcaacgagaagcacgacgaggaguucugcgacaugcugcggcuguucgacuucaacaagcaggccauccagcgccugaaggcggaggcccagaugagcauccagcugaucaacaaggccgugaacgcccucaucaacgaccagcugaucaugaagaaccaccuccgggacaucaugggcauccccuacugcaacuacuccaaguacugguaccucaaccacacgaccaccgggaagaccagccugcccaagugcuggcugguguccaacggcagcuaccucaacgagacgcacuucuccgacgacaucgagcagcaggccgacaacaugaucaccgagaugcugcagaaggaguacauggagcgccagggcaagaccccgcuggggcucgucgaccuguucguguucagcaccuccuucuaccugaucagcaucuuccugcaccucgugaagaucccgacgcaccggcacaucgucggcaagcccugccccaagccccaccgccugaaccacauggggaucugcuccugcggccuguacaagcagccgggggugcccgugaaguggaagcggugaggacuagucccuguucccagagcccacuuuuuuuucuuuuuuugaaauaaaauagccugucuuucagaucucaaaggcucuuuucagagccaccaaaaaaaaaaaaaaaaaaaaaaaaaaaaaaaaaaaaaaaaaaaaaaaaaaaaaaaaaaaaaaaaagaauu

SEQ ID NO: 14085 - RNA, 1717 nt, Artificial Sequence
  mRNA product Design a-1 (hSL-A64-N5) comprising derived and/or modified sequence from LASV(LM776-SLE-2012;Clade IV)__AIT17824__GPC (opt1)
aggagagucccgcagucggcguccagcggcucugcuuguucgugugugugucguugcaggccuuauucaagcuuaccaugggccagaucgugaccuucuuccaggaggucccccacgugaucgaggaggugaugaacaucguccugaucgcccucagcauccuggccgugcugaaggggcucuacaacuucgcgaccugcggccugguggggcuggucacguuccuccugcugugcggccgcuccugcaccaccagcguguacaaggggguguacgagcuccagacccuggagcugaacauggagacgcucaacaugaccaugccgcuguccugcaccaagaacaacagccaccacuacaucauggucggcaacgagaccggccuggagcucacgcugaccaacaccuccaucaucaaccacaaguucugcaaccugagcgacgcccacaagaagaaccucuacgaccacgcccugauguccaucaucagcaccuuccaccuguccauccccaacuucaaccaguacgaggccaugagcugcgacuucaacgggggcaagaucuccgugcaguacaaccucagccacuccuacgccggggacgcggccaaccacugcggcacgguggccaacgggguccugcagaccuucaugcggauggccuggggcggcagcuacaucgcgcuggacuccgggcacggcaagugggacugcaucaugaccagcuaccaguaccucaucauccagaacaccacgugggaggaccacugccaguucucccgccccagccccaucggguaccugggccugcucucccagcggacccgcgacaucuacaucagccggcgccugcugggcaccuucaccuggacgcucagcgacuccgaggggaaggacaccccgggcggguacugccugacccgguggaugcugaucgaggccgagcucaagugcuucggcaacaccgccguggccaagugcaacgagaagcacgacgaggaguucugcgacaugcugcgccuguucgacuucaacaagcaggccauccagcggcucaaggcggaggcccagaugagcauccagcugaucaacaaggccgugaacgcccugaucaacgaccagcucaucaugaagaaccaccuccgcgacaucauggggauccccuacugcaacuacuccaaguacugguaccugaaccacacgaccaccggcaagaccagccugcccaagugcuggcuggucuccaacggcagcuaccugaacgagacgcacuucuccgacgacaucgagcagcaggccgacaacaugaucaccgagaugcuccagaaggaguacauggagcggcaggggaagacgccccugggccugguggaccucuucguguucagcaccuccuucuaccugaucagcaucuuccugcaccuggucaagaucccgacccaccgccacaucguggggaaguccugccccaagccccaccggcucaaccacaugggcaucugcagcugcgggcuguacaagcagcccggcgugccgguccgcuggaagcggugaggacuagucccuguucccagagcccacuuuuuuuucuuuuuuugaaauaaaauagccugucuuucagaucucaaaggcucuuuucagagccaccaaaaaaaaaaaaaaaaaaaaaaaaaaaaaaaaaaaaaaaaaaaaaaaaaaaaaaaaaaaaaaaaagaauu

SEQ ID NO: 14086 - RNA, 1717 nt, Artificial Sequence
  mRNA product Design a-1 (hSL-A64-N5) comprising derived and/or modified sequence from LASV(Mad39;Clade IV)__ANH09722__GPC (opt1)
aggagagucccgcagucggcguccagcggcucugcuuguucgugugugugucguugcaggccuuauucaagcuuaccaugggccagaucgugaccuucuuccaggaggucccccacgugaucgaggaggugaugaacaucguccugaucgcccucagcauccuggccgugcugaaggggcucuacaacguggcgaccugcggccugaucgggcuggucacguuccuccugcugugcggccgcuccugcaccaccacccucuacaaggggguguacgagcugcaggcccuggagcucaacauggagacgcugaacaugaccaugccgcugagcugcaccaagaacaacucccaccacuacauccgggugggcaacgagaccggccucgagcugacgcugaccaacaccagccucaucaaccacaaguucugcaaccuguccgacgcccacaagaagaaccuguacgaccacgcccucaugagcaucaucuccaccuuccaccugagcauccccaacuucaaccaguacgaggccauguccugcgacuucaacgacgggaagaucagcguccaguacaaccugucccacacguacgcgggcgacaccgccaaccacugcgggaccguggccaacggcgugcuccagaccuucaugcgcauggccuggggcgggagcuacaucgcgcuggacuccggccgcgggggcugggacugcaucaugacgagcuaccaguaccugaucauccagaacaccaccugggaggaccacugccaguucucccggcccagccccaucggguaccucggccugcugucccagcggacccgcgacaucuacaucagccggcgccuccugggcacguucaccuggacccuguccgacagcgaggggaaggacaccccgggcggguacugccucacgcgguggaugcugaucgaggccgagcugaagugcuucggcaacaccgccgucgccaagugcaacgagaagcacgacgaggaguucugcgacaugcuccgccuguucgacuucaacaagcaggccauccagcggcugaaggcggaggcccagaugagcauccagcucaucaacaaggccgugaacgcccugaucaacgaccagcugaucaugaagaaccaccuccgcgacaucauggggauccccuacugcaacuacuccaaguacugguaccugaaccacaccgugaccggcaagacgagccugcccaagugcuggcucgucuccaacggcagcuaccugaacgagacccacuucuccgacgacaucgagcagcaggccgacaacaugaucaccgagaugcugcagaaggaguacauggagcggcaggggaagacgccccucggccugguggaccuguucguguucagcaccuccuucuaccugaucagcaucuuccuccaccuggucaagaucccgacccaccgccacgugguggggaagcccugccccaagccccaccggcugaaccacaugggcaucugcuccugcggguucuacaagcagccgggcguccccgugcgcuggaagcggugaggacuagucccuguucccagagcccacuuuuuuuucuuuuuuugaaauaaaauagccugucuuucagaucucaaaggcucuuuucagagccaccaaaaaaaaaaaaaaaaaaaaaaaaaaaaaaaaaaaaaaaaaaaaaaaaaaaaaaaaaaaaaaaaagaauu

SEQ ID NO: 14087 - RNA, 1717 nt, Artificial Sequence
  mRNA product Design a-1 (hSL-A64-N5) comprising derived and/or modified sequence from LASV(Z0947-SLE-2011;Clade IV)__AIT17840__GPC (opt1)
aggagagucccgcagucggcguccagcggcucugcuuguucgugugugugucguugcaggccuuauucaagcuuaccaugggccagaucgugaccuucuuccaggaggucccccacgugaucgaggaggugaugaacaucguccugaucgcccucagcauccuggccgugcugaaggggcucuacaacuucgcgaccugcggccugguggggcuggucacguuccuccugcugugcggccgcuccugcaccaucagccucuacaaggggguguacgagcugcagacccuggagcucaacauggagacccugaacaugacgaugccgcuguccugcaccaagaacaacagccaccacuacaucauggugggcaacgagaccggccucgagcugacccugacgaacaccuccaucaucaaccacaaguucugcaaccucagcgacgcccacaagaagaaccuguacgaccacgcccugauguccaucaucagcaccuuccaccucuccauccccaacuucaaccaguacgaggccaugagcugcgacuucaacgggggcaagaucuccguccaguacaaccugagccacuccuacgccggggacgcggccaaccacugcggcaccguggccaacggggugcugcagacguucaugcggauggccuggggcggcagcuacaucgcgcucgacuccgggcgcgaccggugggacugcaucaugaccagcuaccaguaccugaucauccagaacaccaccugggaggaccacugccaguucucccgccccagccccaucggcuaccuggggcuccugucccagcggacgcgcgacaucuacaucagccggcgccugcucggcaccuucaccuggacccugagcgacuccgagggcaaggacacgcccgggggcuacugccugacccgguggaugcucaucgaggccgagcugaagugcuucgggaacaccgccgucgccaagugcaacgagaagcacgacgaggaguucugcgacaugcugcgccucuucgacuucaacaagcaggccauccagcggcugaaggcggaggcccagaugagcauccagcugaucaacaaggccgugaacgcccucaucaacgaccagcugaucaugaagaaccaccuccgcgacaucaugggcauccccuacugcaacuacuccaaguacugguaccugaaccacaccacgaccgggaagaccagccugcccaagugcuggcugguguccaacggcagcuaccucaacgagacccacuucuccgacgacaucgagcagcaggccgacaacaugaucacggagaugcugcagaaggaguacauggagcggcagggcaagaccccgcuggggcucgucgaccuguucguguucagcaccuccuucuaccugaucagcaucuuccugcaccucgugaagaucccgacccaccgccacaucgucggcaagcccugccccaagccccaccggcugaaccacauggggaucugcuccugcggccuguacaagcagccgggggugcccgugaaguggaagcgcugaggacuagucccuguucccagagcccacuuuuuuuucuuuuuuugaaauaaaauagccugucuuucagaucucaaaggcucuuuucagagccaccaaaaaaaaaaaaaaaaaaaaaaaaaaaaaaaaaaaaaaaaaaaaaaaaaaaaaaaaaaaaaaaaagaauu

SEQ ID NO: 14088 - RNA, 1717 nt, Artificial Sequence
  mRNA product Design a-1 (hSL-A64-N5) comprising derived and/or modified sequence from LASV(Josiah;Clade IV)__NP_694870__GPC (opt4)
aggagagucccgcagucggcguccagcggcucugcuuguucgugugugugucguugcaggccuuauucaagcuuaccaugggccagaucgugaccuucuuccaggaggugccccacgugaucgaggaggugaugaacaucgugcugaucgcccugagcgugcuggccgugcugaagggccuguacaacuucgccaccugcggccuggugggccuggugaccuuccugcugcugugcggcagaagcugcaccaccagccuguacaagggcguguacgagcugcagacccuggagcugaacauggagacccugaacaugaccaugccccugagcugcaccaagaacaacagccaccacuacaucauggugggcaacgagaccggccuggagcugacccugaccaacaccagcaucaucaaccacaaguucugcaaccugagcgacgcccacaagaagaaccuguacgaccacgcccugaugagcaucaucagcaccuuccaccugagcauccccaacuucaaccaguacgaggccaugagcugcgacuucaacggcggcaagaucagcgugcaguacaaccugagccacagcuacgccggcgacgccgccaaccacugcggcaccguggccaacggcgugcugcagaccuucaugagaauggccuggggcggcagcuacaucgcccuggacagcggcagaggcaacugggacugcaucaugaccagcuaccaguaccugaucauccagaacaccaccugggaggaccacugccaguucagcagacccagccccaucggcuaccugggccugcugagccagagaaccagagacaucuacaucagcagaagacugcugggcaccuucaccuggacccugagcgacagcgagggcaaggacacccccggcggcuacugccugaccagauggaugcugaucgaggccgagcugaagugcuucggcaacaccgccguggccaagugcaacgagaagcacgacgaggaguucugcgacaugcugagacuguucgacuucaacaagcaggccauccagagacugaaggccgaggcccagaugagcauccagcugaucaacaaggccgugaacgcccugaucaacgaccagcugaucaugaagaaccaccugagagacaucaugggcauccccuacugcaacuacagcaaguacugguaccugaaccacaccaccaccggcagaaccagccugcccaagugcuggcuggugagcaacggcagcuaccugaacgagacccacuucagcgacgacaucgagcagcaggccgacaacaugaucaccgagaugcugcagaaggaguacauggagagacagggcaagaccccccugggccugguggaccuguucguguucagcaccagcuucuaccugaucagcaucuuccugcaccuggugaagauccccacccacagacacaucgugggcaagagcugccccaagccccacagacugaaccacaugggcaucugcagcugcggccuguacaagcagcccggcgugcccgugaaguggaagagaugaggacuagucccuguucccagagcccacuuuuuuuucuuuuuuugaaauaaaauagccugucuuucagaucucaaaggcucuuuucagagccaccaaaaaaaaaaaaaaaaaaaaaaaaaaaaaaaaaaaaaaaaaaaaaaaaaaaaaaaaaaaaaaaaagaauu

SEQ ID NO: 14089 - RNA, 1714 nt, Artificial Sequence
  mRNA product Design a-1 (hSL-A64-N5) comprising derived and/or modified sequence from LASV(LP;Clade I)__AAF86701__GPC (opt4)
aggagagucccgcagucggcguccagcggcucugcuuguucgugugugugucguugcaggccuuauucaagcuuaccaugggccagaucaucaccuucuuccaggaggugccccacgugaucgaggaggugaugaacaucgugcugaucgcccugagccugcuggccauccugaagggccuguacaacaucgccaccugcggcaucaucggccugguggccuuccuguuccugugcggcaagagcugcagccugacccugaagggcggcuacgagcugcagacccuggagcugaacauggagacccugaacaugaccaugccccugagcugcaccaagaacagcagccaccacuacaucagagugggcaacgagaccggccuggagcugacccugaccaacaccagcaucaucaaccacaaguucugcaaccugagcgacgcccacaagaagaaccuguacgaccacgcccugaugagcaucaucagcaccuuccaccugagcauccccaacuucaaccaguacgaggccaugagcugcgacuucaacggcggcaagaucagcgugcaguacaaccugagccacagcuacgccggcgacgccgccgagcacugcggcaccguggccaacggcgugcugcagaccuucaugagaauggccuggggcggcagauacaucgcccuggacagcggcaagggcaacugggacugcaucaugaccagcuaccaguaccugaucauccagaacaccaccugggaggaccacugccaguucagcagacccagccccaucggcuaccugggccugcugagccagagaaccagagacaucuacaucagcagaagacugcugggcaccuucaccuggacccugagcgacagcgagggcaacgagacccccggcggcuacugccugaccagauggaugcugaucgaggccgagcugaagugcuucggcaacaccgccguggccaagugcaacgagaagcacgacgaggaguucugcgacaugcugagacuguucgacuucaacaagcaggccaucagaagacugaaggccgaggcccagaugagcauccagcugaucaacaaggccgugaacgcccugaucaacgaccagcugaucaugaagaaccaccugagagacaucaugggcauccccuacugcaacuacagcaaguacugguaccugaaccacaccagcagcggcagaaccagccugcccaagugcuggcugaucagcaacggcagcuaccugaacgagacccaguucagcgacgacaucgagcagcaggccgacaacaugaucaccgagaugcugcagaaggaguacaucgagagacagggcaagaccccccugggccugguggacaucuucaucuucagcaccagcuucuaccugaucagcaucuuccugcaccugaucaagauccccacccacagacacaucgugggcaagcccugccccaagccccacagacugaaccacaugggcgugugcagcugcggccuguacaagcaccccggcgugcccaccaaguggaagagaugaggacuagucccuguucccagagcccacuuuuuuuucuuuuuuugaaauaaaauagccugucuuucagaucucaaaggcucuuuucagagccaccaaaaaaaaaaaaaaaaaaaaaaaaaaaaaaaaaaaaaaaaaaaaaaaaaaaaaaaaaaaaaaaaagaauu

SEQ ID NO: 14090 - RNA, 1714 nt, Artificial Sequence
  mRNA product Design a-1 (hSL-A64-N5) comprising derived and/or modified sequence from LASV(803213;Clade II)__AAF86703__GPC (opt4)
aggagagucccgcagucggcguccagcggcucugcuuguucgugugugugucguugcaggccuuauucaagcuuaccaugggccagaucaucaccuucuuccaggaggugccccacgugaucgaggaggugaugaacaucgugcugaucgcccugagccugcuggccauccugaagggcaucuacaacguggccaccugcggccuguucggccugaucagcuuccugcugcugugcggcagaagcugcagcgugaccuacaagggcguguacgagcugcagacccuggagcugaacauggccaaccugaacaugaccaugccccugagcugcaccaagaacaacagccaccacuacaucauggugggcaacgagaccggccuggagcugacccugaccaacaccagcaucaucaaccacaaguucugcaaccugagcgacgcccacaagaagaaccuguacgaccacgcccugaugagcaucaucagcaccuuccaccugagcauccccaacuucaaccaguacgaggccaugagcugcgacuucaacggcggcaagaucagcgugcaguacaaccugagccacagcuucgccguggacgccgccaaccacugcggcaccaucgccaacggcgugcugcagaccuucaugagaauggccuggggcggcagcuacaucgcccuggacagcggcaagggcaacugggacugcaucaugaccagcuaccaguaccugaucauccagaacaccaccugggaggaccacugccaguucagcagacccagccccaucggcuaccugggccugcugagccagagaaccagagacaucuacaucagcagaagacugcugggcaccuucaccuggacccugagcgacagcgagggcaacgaggcccccggcggcuacugccugaccagauggaugcugaucgaggccgagcugaagugcuucggcaacaccgccguggccaagugcaacgagaagcacgacgaggaguucugcgacaugcugagacuguucgacuucaacaagcaggccaucaagagacugaagaccgaggcccagaugagcauccagcugaucaacaaggccgugaacgcccugaucaacgaccagcugaucaugaagaaccaccugagagacaucaugggcauccccuacugcaacuacagcagauacugguaccugaaccacaccgugaccggcaagaccagccugcccagaugcuggcuggugagcaacggcagcuaccugaacgagacccacuucagcgacgacaucgagcagcaggccgacaacaugaucaccgagaugcugcagaaggaguacauggacagacagggcaagaccccccugggccugguggaccuguucguguucagcaccagcuucuaccugaucagcaucuuccugcaccuggugaagauccccacccacagacacaucgugggcaagcccugccccaagccccacagacugaaccacaugggcaucugcagcugcggccuguacaagcaccccggcgugcccgugaaguggaagagaugaggacuagucccuguucccagagcccacuuuuuuuucuuuuuuugaaauaaaauagccugucuuucagaucucaaaggcucuuuucagagccaccaaaaaaaaaaaaaaaaaaaaaaaaaaaaaaaaaaaaaaaaaaaaaaaaaaaaaaaaaaaaaaaaagaauu

SEQ ID NO: 14091 - RNA, 1714 nt, Artificial Sequence
  mRNA product Design a-1 (hSL-A64-N5) comprising derived and/or modified sequence from LASV(GA391;Clade III)__CAA36645__GPC (opt4)
aggagagucccgcagucggcguccagcggcucugcuuguucgugugugugucguugcaggccuuauucaagcuuaccaugggccagaucgugaccuucuuccaggaggugccccacgugaucgaggaggugaugaacaucgugcugaucgcccugagcauccuggccauccugaagggccuguacaacguggccaccugcggccugaucggccuggugaccuuccugcugcugagcggcagaagcugcagccugaucuacaagggcaccuacgagcugcagacccuggagcugaacauggagacccugaacaugaccaugccccugagcugcaccaagaacaacagccaccacuacaucagagugggcaacgagaccggccuggagcugacccugaccaacaccagcauccugaaccacaaguucugcaaccugagcgacgcccacaagagaaaccuguacgaccacagccugaugagcaucaucagcaccuuccaccugagcauccccaacuucaaccaguacgaggccaugagcugcgacuucaacggcggcaagaucaccgugcaguacaaccugagccacagcuucgccguggacgccgccggccacugcggcacccuggccaacggcgugcugcagaccuucaugagaauggccuggggcggcagcuacaucgcccuggacagcggcagaggcaacugggacugcaucaugaccagcuaccaguaccugaucauccagaacaccaccugggacgaccacugccaguucagcagacccagccccaucggcuaccugggccugcugagccagagaaccagagacaucuacaucagcagaagacugcugggcaccuucaccuggacccugagcgacagcgagggcaacgagacccccggcggcuacugccugaccagauggaugcugaucgaggccgagcugaagugcuucggcaacaccgccguggccaagugcaacgagaagcacgacgaggaguucugcgacaugcugagacuguucgacuucaacaagcaggccaucagaagacugaagaccgaggcccagaugagcauccagcugaucaacaaggccgugaacgcccugaucaacgaccagcugaucaugaagaaccaccugagagacaucaugggcauccccuacugcaacuacagcagauacugguaccugaaccacaccagcaccggcaagaccagccugcccagaugcuggcugaucagcaacggcagcuaccugaacgagaccaaguucagcgacgacaucgagcagcaggccgacaacaugaucaccgagaugcugcagaaggaguacaucgacagacagggcaagaccccccugggccugguggaccuguucguguucagcaccagcuucuaccugaucagcaucuuccugcaccuggugaagauccccacccacagacacaucgugggcaagcccugccccaagccccacagacugaaccacaugggcaucugcagcugcggccuguacaagcagcccggcgugcccgugagauggaagagaugaggacuagucccuguucccagagcccacuuuuuuuucuuuuuuugaaauaaaauagccugucuuucagaucucaaaggcucuuuucagagccaccaaaaaaaaaaaaaaaaaaaaaaaaaaaaaaaaaaaaaaaaaaaaaaaaaaaaaaaaaaaaaaaaagaauu

SEQ ID NO: 14092 - RNA, 1717 nt, Artificial Sequence
  mRNA product Design a-1 (hSL-A64-N5) comprising derived and/or modified sequence from LASV(AV;Clade V)__CCA30314__GPC (opt4)
aggagagucccgcagucggcguccagcggcucugcuuguucgugugugugucguugcaggccuuauucaagcuuaccaugggccagaucgugaccuucuuccaggaggugccccacgugaucgaggaggugaugaacaucgugcugaucgcccugagcauccuggccgugcugaagggccuguacaacaucgccaccugcggccugaucggccugaucaccuuccugcugcugugcggcagaagcugcagcagcaaccuguacaagggcguguacgagcugcagagccuggaccugaacauggagacccugaacaugaccaugccccugagcugcaccaagaacaacagccaccacuacaucagagugggcaacgacaccggccuggagcugacccugaccaacaccagcauccugaaccacaaguucugcaaccugagcgacgcccacaagaaggaccuguacgaccacgcccugaugagcaucaucagcaccuuccaccugagcauccccaacuucaaccaguacgaggccaugagcugcgacuucaacggcggcaagaucagcgugcaguacaaccugagccacagcuacgccaucgacgccgccaaccacugcggcaccguggccaacggcauccugcagaccuucaugagaauggccuggggcggcagcuacaucgcccuggacagcggcagaggcaacugggacugcaucaugaccagcuaccaguaccugaucauccagaacaccaccugggagaaccacugccaguucagcagacccagccccaucggcuaccugggccugcugagccagagaaccagagacaucuacaucagcagaagacugcugggcaccuucaccuggacccugagcgacagcgagggcaacgccacccccggcggcuacugccugaccagauggaugcugaucgaggccgagcugaagugcuucggcaacaccgccguggccaagugcaacgagaagcacgacgaggaguucugcgacaugcugagacuguucgacuucaacaagcaggccaucagcagacugaagagcgaggcccagaugagcauccagcugaucaacaaggccgugaacgcccugaucaacgaccagcugaucaugaagaaccaccugagagacaucaugggcauccccuacugcaacuacagcaaguacugguaccugaaccacaccaucaccggcaagaccagccugcccaagugcuggcuggugagcaacggcagcuaccugaacgagacccacuucagcgacgacaucgagcagcaggccgacaacaugaucaccgagaugcugcagaaggaguacauggagagacagggcaagaccccccugggccugguggaccuguucguguucagcaccagcuucuaccugaucagcaucuuccugagacuggugaagauccccacccacagacacaucgugggcaagcccugccccaagccccacagacugaaccacaugggcaucugcagcugcggccuguacaagcagcccggcgugcccgugagauggaagagaugaggacuagucccuguucccagagcccacuuuuuuuucuuuuuuugaaauaaaauagccugucuuucagaucucaaaggcucuuuucagagccaccaaaaaaaaaaaaaaaaaaaaaaaaaaaaaaaaaaaaaaaaaaaaaaaaaaaaaaaaaaaaaaaaagaauu

SEQ ID NO: 14093 - RNA, 1714 nt, Artificial Sequence
  mRNA product Design a-1 (hSL-A64-N5) comprising derived and/or modified sequence from LASV(Togo/2016/7082;Clade VI)__AMR44577__GPC (opt4)
aggagagucccgcagucggcguccagcggcucugcuuguucgugugugugucguugcaggccuuauucaagcuuaccaugggccagaucaucaccuucuuccaggaggugccccacgugaucgaggaggugaugaacaucgugcugaucgcccugagccugcuggccauccugaagggcguguacaacguggccaccugcggcaucaucggccuggugaccuuccuguuccugugcggcagaagcugcagccugaucuacaagggcagcuacgagcugcagacccuggagcugaacauggagacccugaacaugaccaugccccugagcugcaccaagaacagcagccaccacuacaucagagugggcaacgagaccggccuggagcugacccugaccaacaccagcaucaucaaccacaaguucugcaaccugagcgacgcccacaagagaaaccuguacgaccacgcccugaugagcauccugagcaccuuccaccugagcauccccaacuucaaccaguacgaggccaugagcugcgacuucaacggcggcaagaucagcgugcaguacaaccugagccacgccuacgccguggacgccgccgagcacugcggcaccguggccaacggcgugcugcagaccuucaugagaauggccuggggcggcagcuacaucgcccuggacagcggcagaggcaacugggacugcaucaugaccagcuaccaguaccugaucauccagaacaccaccugggaggaccacugccaguucagcagacccagccccaucggcuaccugggccugcugagccagagaaccagagacaucuacaucagcagaagacugcugggcaccuucaccuggacccugagcgacagcgagggcaacgagacccccggcggcuacugccugaccagauggaugcugaucgaggccgagcugaagugcuucggcaacaccgccguggccaagugcaacgagaagcacgacgaggaguucugcgacaugcugagacuguucgacuucaacaagcaggccauccagagacugaagagcgaggcccagaugagcauccagcugaucaacaaggccgugaacgcccugaucaacgaccagcugaucaugaagaaccaccugagagacaugaugggcauccccuacugcaacuacagcaaguacugguaccugaaccacaccagcagcggcagaaccagccugcccaagugcuggcuggugagcaacggcagcuaccugaacgagacccacuucagcgacgacaucgagcagcaggccgacaacaugaucaccgagaugcugcagaaggaguacaucgacagacagggcaagaccccccugggccugguggaccuguucguguucagcaccagcuucuaccugaucagcaucuuccugcaccugaucaagauccccacccacagacacaucgugggcaagcccugccccaagccccacagacugaaccacaugggcaucugcagcugcggccuguacaagcagcccggcgugcccaccagauggaagagaugaggacuagucccuguucccagagcccacuuuuuuuucuuuuuuugaaauaaaauagccugucuuucagaucucaaaggcucuuuucagagccaccaaaaaaaaaaaaaaaaaaaaaaaaaaaaaaaaaaaaaaaaaaaaaaaaaaaaaaaaaaaaaaaaagaauu

SEQ ID NO: 14094 - RNA, 1714 nt, Artificial Sequence
  mRNA product Design a-1 (hSL-A64-N5) comprising derived and/or modified sequence from LASV(KAK-428;Clade n.d. (VII))__ANH09740__GPC (opt4)
aggagagucccgcagucggcguccagcggcucugcuuguucgugugugugucguugcaggccuuauucaagcuuaccaugggccagaucgugaccuucuuccaggaggugccccacgugaucgaggaggugaugaacaucgugcugaucgcccugagccugcuggccauccugaagggccuguacaacuucgccaccugcggcgugaucggccugaucaccuuccugcugcugugcggcagaagcugcagcgccaccuacaagggccaguacgagcugcagacccuggagcugaacauggagagccugaacaugaccaugccccugagcugcaccaagaacaacagccaccacuacaucagagccggcaacaacaccggccuggagcugacccugaccaacaccagcaucaucagccacaaguucugcaaccugagcgacgcccacaagaagaaccuguacgaccacacccugaugagcaucaucaccaccuuccaccugagcauccccaacuucaaccaguacgaggccaugagcugcgacuucaacggcggcaagaucagcauccaguacaaccugagccacagcuacgccggcgacgccgcccagcacugcggcaccguggccaacggcgugcugcagaccuucaugagaauggccuggggcggcagcuaccuggcccuggacagcggcagaagaggcugggacugcaucaucagcagcuaccaguaccugaucauccagaacaccaccugggacgaccacugccaguucagcagacccagccccaucggcuaccugggcuucgugagccagaagaccagagacaucuacaucagcagaagacugcugggcaccuucaccuggacccugagcgacagcgagggccacgacaugcccggcggcuacugccugaccagauggaugcugaucgaggccgaccugaagugcuucggcaacaccgccguggccaagugcaacgagaagcacgacgaggaguucugcgacauguggagacuguucgacuucaacaagcaggccauccagagacugaaggccgaggcccagaugaacauccagcugaucaacaaggccgugaacgcccugaucaacgaccagcugaugaugaagaaccaccugagagacaucaugggcauccccuacugcaacuacagcaaguucugguaccugaacaacaccaccaccggcagaaccagccugcccagaugcuggcugaucagcaacggcagcuaccugaacgagacccacuucagcgacgacaucgagcagcaggccgacaacaugaucaccgagaugcugcagaaggaguacauggacagacagggcaagaccccccugggccugguggaccuguucguguucagcaccagcuucuaccugaucaccaucuuccugcaccuggugaagauccccacccacagacacaucgugggcaagcccugccccaagccccacagacugaaccacaugggcaucugcagcugcggccuguacaagcagcccggcgugcccgugagauggaagagaugaggacuagucccuguucccagagcccacuuuuuuuucuuuuuuugaaauaaaauagccugucuuucagaucucaaaggcucuuuucagagccaccaaaaaaaaaaaaaaaaaaaaaaaaaaaaaaaaaaaaaaaaaaaaaaaaaaaaaaaaaaaaaaaaagaauu

SEQ ID NO: 14095 - RNA, 1714 nt, Artificial Sequence; identical to SEQ ID NO: 14089
  mRNA product Design a-1 (hSL-A64-N5) comprising derived and/or modified sequence from LASV(Pinneo-NIG-1969;Clade I)__AIT17836__GPC (opt4)

SEQ ID NO: 14096 - RNA, 1714 nt, Artificial Sequence
  mRNA product Design a-1 (hSL-A64-N5) comprising derived and/or modified sequence from LASV(ISTH0009-NIG-2011;Clade II)__AIT17404__GPC (opt4)
aggagagucccgcagucggcguccagcggcucugcuuguucgugugugugucguugcaggccuuauucaagcuuaccaugggccagaucaucaccuucuuccaggaggugccccacgugaucgaggaggugaugaacaucgugcugaucgcccugagccugcuggccauccugaagggcaucuacaacguggccaccugcggccuguucggccuggugagcuuccugcugcugugcggcagaagcugcagcaccaccuacaagggcguguacgagcugcagacccuggagcuggacauggccagccugaacaugaccaugccccugagcugcaccaagaacaacagccaccacuacaucauggugggcaacgagaccggccuggagcugacccugaccaacaccagcaucaucaaccacaaguucugcaaccugagcgacgcccacaagaagaaccuguacgaccacgcccugaugagcaucaucagcaccuuccaccugagcauccccaacuucaaccaguacgaggccaugagcugcgacuucaacggcggcaagaucagcgugcaguacaaccugagccacgccuacgccguggacgccgccaaccacugcggcaccaucgccaacggcgugcugcagaccuucaugagaauggccuggggcggcagcuacaucgcccuggacagcggcaagggcagcugggacugcaucaugaccagcuaccaguaccugaucauccagaacaccaccugggaggaccacugccaguucagcagacccagccccaucggcuaccugggccugcugagccagagaaccagagacaucuacaucagcagaagacugcugggcaccuucaccuggacccugagcgacagcgagggcaacgagacccccggcggcuacugccugaccagauggaugcugaucgaggccgagcugaagugcuucggcaacaccgccguggccaagugcaacgagaagcacgacgaggaguucugcgacaugcugagacuguucgacuucaacaagcaggccaucagaagacugaagaccgaggcccagaugagcauccagcugaucaacaaggccgugaacgcccugaucaacgaccagcugaucaugaagaaccaccugagagacaucaugggcauccccuacugcaacuacagcaaguacugguaccugaaccacaccgugaccggcaagaccagccugcccagaugcuggcuggugagcaacggcagcuaccugaacgagacccacuucagcgacgacaucgagcagcaggccgacaacaugaucaccgagcugcugcagaaggaguacauggacagacagggcaagaccccccugggccugguggaccuguucguguucagcaccagcuucuaccugaucagcaucuuccugcaccugaucaagauccccacccacagacacaucaccggcaagcccugccccaagccccacagacugaaccacaugggcaucugcagcugcggccuguacaagcaccccggcgugcccgugaaguggaagagaugaggacuagucccuguucccagagcccacuuuuuuuucuuuuuuugaaauaaaauagccugucuuucagaucucaaaggcucuuuucagagccaccaaaaaaaaaaaaaaaaaaaaaaaaaaaaaaaaaaaaaaaaaaaaaaaaaaaaaaaaaaaaaaaaagaauu

SEQ ID NO: 14097 - RNA, 1714 nt, Artificial Sequence
  mRNA product Design a-1 (hSL-A64-N5) comprising derived and/or modified sequence from LASV(ISTH2010-NIG-2012;Clade II)__AIT17482__GPC (opt4)
aggagagucccgcagucggcguccagcggcucugcuuguucgugugugugucguugcaggccuuauucaagcuuaccaugggccagaucaucaccuucuuccaggaggugccccacgugaucgaggaggugaugaacaucgugcugaucgcccugagccugcuggccauccugaagggcaucuacaacguggccaccugcggccuguucggccuggugagcuuccugcugcugugcggcagaagcugcagcaccaccuacaagggcguguacgagcugcagacccuggagcuggacauggccagccugaacaugaccaugccccugagcugcaccaagaacaacagccaccacuacaucauggugggcaacgagaccggccuggagcugacccugaccaacaccagcaucaucaaccacaaguucugcaaccugagcgacgcccacaagaagaaccuguacgaccacgcccugaugagcaucaucagcaccuuccaccugagcauccccaacuucaaccaguacgaggccaugagcugcgacuucaacggcggcaagaucagcgugcaguacaaccugagccacgccuacgccguggacgccgccaaccacugcggcaccaucgccaacggcgugcugcagaccuucaugagaauggccuggggcggcagcuacaucgcccuggacagcggcaagggcagcugggacugcaucaugaccagcuaccaguaccugaucauccagaacaucaccugggaggaccacugccaguucagcagacccagccccaucggcuaccugggccugcugagccagagaaccagagacaucuacaucagcagaagacugcugggcaccuucaccuggacccugagcgacagcgagggcaacgagacccccggcggcuacugccugaccagauggaugcugaucgaggccgagcugaagugcuucggcaacaccgccguggccaagugcaacgagaagcacgacgaggaguucugcgacaugcugagacuguucgacuucaacaagcaggccaucagaagacugaagaccgaggcccagaugagcauccagcugaucaacaaggccgugaacgcccugaucaacgaccagcugaucaugaagaaccaccugagagacaucaugggcauccccuacugcaacuacagcaaguacugguaccugaaccacaccgugaccggcaagaccagccugcccagaugcuggcuggugagcaacggcagcuaccugaacgagacccacuucagcgacgacaucgagcagcaggccgacaacaugaucaccgagcugcugcagaaggaguacaucgacagacagggcaagaccccccugggccugguggaccuguucguguucagcaccagcuucuaccugaucagcaucuuccugcaccuggugaagauccccacccacagacacguggugggcaagcccugccccaagccccacagacugaaccacaugggcaucugcagcugcggccuguacaagcaccccggcgugcccgugaaguggaagagaugaggacuagucccuguucccagagcccacuuuuuuuucuuuuuuugaaauaaaauagccugucuuucagaucucaaaggcucuuuucagagccaccaaaaaaaaaaaaaaaaaaaaaaaaaaaaaaaaaaaaaaaaaaaaaaaaaaaaaaaaaaaaaaaaagaauu

SEQ ID NO: 14098 - RNA, 1714 nt, Artificial Sequence
  mRNA product Design a-1 (hSL-A64-N5) comprising derived and/or modified sequence from LASV(Lassa virus/H.sapiens-wt/NGA/2015/ISTH_0543;Clade II)__AVO03639__GPC (opt4)
aggagagucccgcagucggcguccagcggcucugcuuguucgugugugugucguugcaggccuuauucaagcuuaccaugggccagaucaucaccuucuuccaggaggugccccacgugaucgaggaggugaugaacaucgugcugaucgcccugagccugcuggccauccugaagggcaucuacaacguggccaccugcggccuguucggccuggugagcuuccugcugcugugcggcagaagcugcagcaccaccuacaagggcguguacgagcugcagacccuggagcuggacauggccaaccugaacaugaccaugccccugagcugcaccaagaacaacagccaccacuacaucauggugggcaacgagaccggccuggagcugacccugaccaacaccagcaucaucaaccacaaguucugcaaccugagcgacgcccacaagaagaaccuguacgaccacgcccugaugagcaucaucagcaccuuccaccugagcauccccaacuucaaccaguacgaggccaugagcugcgacuucaacggcggcaagaucagcgugcaguacaaccugagccacaccuacgccguggacgccgccaaccacugcggcaccaucgccaacggcgugcugcagaccuucaugagaauggccuggggcggcagcuacaucgcccuggacagcggcaagggcagcugggacugcaucaugaccagcuaccaguaccuggugauccagaacaccaccugggaggaccacugccaguucagcagacccagccccaucggcuaccugggccugcugagccagagaaccagagacaucuacaucagcagaagacugcugggcaccuucaccuggacccugagcgacagcgagggcaacgagacccccggcggcuacugccugaccagauggaugcugaucgaggccgagcugaagugcuucggcaacaccgccguggccaagugcaacgagaagcacgacgaggaguucugcgacaugcugagacuguucgacuucaacaagcaggccaucagaagacugaagaccgaggcccagaugagcauccagcugaucaacaaggccgugaacgcccugaucaacgaccagcugaucaugaagaaccaccugagagacaucaugggcauccccuacugcaacuacagcaaguacugguaccugaaccacaccgugaccggcaagaccagccugcccagaugcuggcuggugagcaacggcagcuaccugaacgagacccacuucagcgacgacaucgagcagcaggccgacaacaugaucaccgagcugcugcagaaggaguacaucgacagacagggcaagaccccccugggccugguggaccuguucguguucagcaccagcuucuaccugaucagcaucuuccugcaccuggugaagauccccacccacagacacaucaccggcaagcccugccccaagccccacagacugaaccacaugggcaucugcagcugcggccuguacaagcaccccggcgugcccgugaaguggaagagaugaggacuagucccuguucccagagcccacuuuuuuuucuuuuuuugaaauaaaauagccugucuuucagaucucaaaggcucuuuucagagccaccaaaaaaaaaaaaaaaaaaaaaaaaaaaaaaaaaaaaaaaaaaaaaaaaaaaaaaaaaaaaaaaaagaauu

SEQ ID NO: 14099 - RNA, 1714 nt, Artificial Sequence
  mRNA product Design a-1 (hSL-A64-N5) comprising derived and/or modified sequence from LASV(Lassa virus/H.sapiens-wt/NGA/2016/ISTH_0009;Clade II)__AVO03571__GPC (opt4)
aggagagucccgcagucggcguccagcggcucugcuuguucgugugugugucguugcaggccuuauucaagcuuaccaugggccagaucaucaccuucuuccaggaggugccccacgugaucgaggaggugaugaacaucgugcugaucgcccugagccugcuggccauccugaagggcaucuacaacguggccaccugcggccugcugggccuggugagcuuccugcugcugugcggcagaagcugcagcaccaccuacaagggcguguacgagcugcagacccuggagcuggacauggccagccugaacaugaccaugccccugagcugcaccaagaacaacagccaccacuacaucauggugggcaacgagaccggccuggagcugacccugaccaacaccagcaucaucaaccacaaguucugcaaccugagcgacgcccacaagaagaaccuguacgaccacgcccugaugagcaucaucagcaccuuccaccugagcauccccaacuucaaccaguacgaggccaugagcugcgacuucaacggcggcagaaucagcgugcaguacaaccugagccacagcuacgccguggacgccgccaaccacugcggcaccaucgccaacggcgugcugcagaccuucaugagaauggccuggggcggcagcuacaucgcccuggacagcggcaagggcagcugggacugcaucaugaccagcuaccaguaccugaucauccagaacaccaccugggaggaccacugccaguucagcagacccagccccaucggcuaccugggccugcugagccagagaaccagagacaucuacaucagcagaagacugcugggcaccuucaccuggacccugagcgacagcgagggcaacgagacccccggcggcuacugccugaccagauggaugcugaucgaggccgagcugaagugcuucggcaacaccgccguggccaagugcaacgagaagcacgacgaggaguucugcgacaugcugagacuguucgacuucaacaagcaggccaucagaagacugaagaccgaggcccagaugagcauccagcugaucaacaaggccgugaacgcccugaucaacgaccagcugaucaugaagaaccaccugagagacaucaugggcauccccuacugcaacuacagcaaguacugguaccugaaccacaccgugaccggcaagaccagccugcccagaugcuggcuggugagcaacggcagcuaccugaacgagacccacuucagcgacgacaucgagcagcaggccgacaacaugaucaccgagcugcugcagaaggaguacaucgacagacagggcaagaccccccugggccugguggaccuguucguguucagcaccagcuucuaccugaucagcaucuuccugcaccuggugaagauccccacccacagacacaucaccggcaagcccugccccaagccccacagacugaaccacaugggcaucugcagcugcggccuguacaaccaccccggcgugcccgugaaguggaagagaugaggacuagucccuguucccagagcccacuuuuuuuucuuuuuuugaaauaaaauagccugucuuucagaucucaaaggcucuuuucagagccaccaaaaaaaaaaaaaaaaaaaaaaaaaaaaaaaaaaaaaaaaaaaaaaaaaaaaaaaaaaaaaaaaagaauu

SEQ ID NO: 14100 - RNA, 1714 nt, Artificial Sequence
  mRNA product Design a-1 (hSL-A64-N5) comprising derived and/or modified sequence from LASV(Lassa virus/H.sapiens-wt/NGA/2016/ISTH_0017;Clade II)__AVO03567__GPC (opt4)
aggagagucccgcagucggcguccagcggcucugcuuguucgugugugugucguugcaggccuuauucaagcuuaccaugggccagaucaucaccuucuuccaggaggugccccacgugaucgaggaggugaugaacaucgugcugaucgcccugagccugcuggccauccugaagggcaucuacaacguggccaccugcggccuguucggccuggugagcuuccugcugcugugcggcagaagcugcagcaccaccuacaagggcguguacgagcugcagacccuggagcuggacauggccagccugaacaugaccaugccccugagcugcaccaagaacaacagccaccacuacaucauggugggcaacgagaccggccuggagcugacccugaccaacaccagcaucaucaaccacaaguucugcaaccugagcgacgcccacaagaagaaccuguacgaccacgcccugaugagcaucaucagcaccuuccaccugagcauccccaacuucaaccaguacgaggccaugagcugcgacuucaacggcggcaagaucagcgugcaguacaaccugagccacaccuacgccaucgacgccgccaaccacugcggcaccaucgccaacggcgugcugcagaccuucaugagaauggccuggggcggcagcuacaucgcccuggacagcggcaagggcagcugggacugcaucaugaccagcuaccaguaccugaucauccagaacaccaccugggaggaccacugccaguucagcagacccagccccaucggcuaccugggccugcugagccagagaaccagagacaucuacaucagcagaagacugcugggcaccuucaccuggacccugagcgacagcgagggcaacgagacccccggcggcuacugccugaccagauggaugcugaucgaggccgagcugaagugcuucggcaacaccgccguggccaagugcaacgagaagcacgacgaggaguucugcgacaugcugagacuguucgacuucaacaagcaggccaucagaagacugaagaccgaggcccagaugagcauccagcugaucaacaaggccgugaacgcccugaucaacgaccagcugaucaugaagaaccaccugagagacaucaugggcauccccuacugcaacuacagcaaguacugguaccugaaccacaccgugaccggcaagaccagccugcccagaugcuggcuggugagcaacggcagcuaccugaacgagacccacuucagcgacgacaucgagcagcaggccgacaacaugaucaccgagcugcugcagaaggaguacauggacagacagggcaagaccccccugggccugguggaccuguucguguucagcaccagcuucuaccugaucagcaucuuccugcaccuggugagaauccccacccacagacacgugaucggcaagcccugccccaagccccacagacugaaccacaugggcaucugcagcugcggccuguacaagcaccccggcgugcccgugaaguggaagagaugaggacuagucccuguucccagagcccacuuuuuuuucuuuuuuugaaauaaaauagccugucuuucagaucucaaaggcucuuuucagagccaccaaaaaaaaaaaaaaaaaaaaaaaaaaaaaaaaaaaaaaaaaaaaaaaaaaaaaaaaaaaaaaaaagaauu

SEQ ID NO: 14101 - RNA, 1714 nt, Artificial Sequence
  mRNA product Design a-1 (hSL-A64-N5) comprising derived and/or modified sequence from LASV(Lassa virus/H.sapiens-wt/NGA/2018/ISTH_0959;Clade II)__AVV65099__GPC (opt4)
aggagagucccgcagucggcguccagcggcucugcuuguucgugugugugucguugcaggccuuauucaagcuuaccaugggccagaucaucaccuucuuccaggaggugccccacgugaucgaggaggugaugaacaucgugcugaucgcccugagccugcuggccauccugaagggcaucuacaacguggugaccugcggccuguucggccuggugagcuuccugcugcugugcggcagaagcugcagcaccaccuacaagggcguguacgagcugcagacccuggagcuggacauggccagccugaacaugaccaugccccugagcugcaccaagaacaacagccaccacuacaucauggugggcaacgagaccggccuggagcugacccugaccaacaccagcaucaucaaccacaaguucugcaaccugagcgacgcccacaagaagaaccuguacgaccacgcccugaugagcaucaucagcaccuuccaccugagcauccccaacuucaaccaguacgaggccaugagcugcgacuucaacggcggcaagaucagcgugcaguacaaccugagccacgccuacgccaucgacgccgccaaccacugcggcaccaucgccaacggcgugcugcagaccuucaugagaauggccuggggcggcagcuacaucgcccuggacagcggcaagggcagcugggacugcaucaugaccagcuaccaguaccugaucauccagaacaccaccugggaggaccacugccaguucagcagacccagccccaucggcuaccugggccugcugagccagagaaccagagacaucuacaucagcagaagacugcugggcaccuucaccuggacccugagcgacagcgagggcaacgagacccccggcggcuacugccugaccagauggaugcugaucgaggccgagcugaagugcuucggcaacaccgccguggccaagugcaacgagaagcacgacgaggaguucugcgacaugcugagacuguucgacuucaacaagcaggccaucagaagacugaagaccgaggcccagaugagcauccagcugaucaacaaggccgugaacgcccugaucaacgaccagcugaucaugaagaaccaccugagagacaucaugggcauccccuacugcaacuacagcaaguacugguaccugaaccacaccgugaccggcaagaccagccugcccagaugcuggcuggugagcaacggcagcuaccugaacgagacccacuucagcgacgacaucgagcagcaggccgacaacaugaucaccgagcugcugcagaaggaguacaucgacagacagggcaagaccccccugggccugguggaccuguucguguucagcaccagcuucuaccugaucagcaucuuccugcaccuggugaagauccccacccacagacacgugaucggcaagcccugccccaagccccacagacugaaccacaugggcaucugcagcugcggccuguacaagcaccccggcgugcccgugaaguggaagagaugaggacuagucccuguucccagagcccacuuuuuuuucuuuuuuugaaauaaaauagccugucuuucagaucucaaaggcucuuuucagagccaccaaaaaaaaaaaaaaaaaaaaaaaaaaaaaaaaaaaaaaaaaaaaaaaaaaaaaaaaaaaaaaaaagaauu

SEQ ID NO: 14102 - RNA, 1714 nt, Artificial Sequence
  mRNA product Design a-1 (hSL-A64-N5) comprising derived and/or modified sequence from LASV(LASV003-NIG-2008;Clade II)__AIT17580__GPC (opt4)
aggagagucccgcagucggcguccagcggcucugcuuguucgugugugugucguugcaggccuuauucaagcuuaccaugggccagaucaucaccuucuuccaggaggugccccacgugaucgaggaggugaugaacaucgugcugaucgcccugagccugcuggccauccugaagggcaucuacaacguggccaccugcggccuguucggccuggugagcuuccugcugcugugcggcagaagcugcagcaccaccuacaagggcguguacgagcugcagacccuggagcuggacauggccagccugaacaugaccaugccccugagcugcaccaagaacaacagccaccacuacaucauggugggcaacgagaccggccuggagcugacccugaccaacaccagcaucaucaaccacaaguucugcaaccugagcgacgcccacaagaagaaccuguacgaccacgcccugaugagcaucaucagcaccuuccaccugagcauccccaacuucaaccaguacgaggccaugagcugcgacuucaacggcggcaagaucagcgugcaguacaaccugagccacaccuacgccguggacgccgccaaccacugcggcaccaucgccaacggcgugcugcagaccuucaugagaauggccuggggcggcagcuacaucgcccuggacagcggcaagggcagcugggacugcaucaugaccagcuaccaguaccugaucauccagaacaccaccugggaggaccacugccaguucagcagacccagccccaucggcuaccugggccugcugagccagagaaccagagacaucuacaucagcagaagacugcugggcaccuucaccuggacccugagcgacagcgagagcaacgagacccccggcggcuacugccugaccagauggaugcugaucgaggccgagcugaagugcuucggcaacaccgccguggccaagugcaacgagaagcacgacgaggaguucugcgacaugcugagacuguucgacuucaacaagcaggccaucagaagacugaaggccgaggcccagaugagcauccagcugaucaacaaggccgugaacgcccugaucaacgaccagcugaucaugaagaaccaccugagagacaucaugggcauccccuacugcaacuacagcaaguacugguaccugaaccacaccgugaccggcagaaccagccugcccagaugcuggcuggugagcaacggcagcuaccugaacgagacccacuucagcgacgacaucgagcagcaggccgacaacaugaucaccgagcugcugcagaaggaguacauggacagacagggcaagaccccccugggccugguggaccuguucguguucagcaccagcuucuaccugaucagcaucuuccugcaccuggugaagauccccacccacagacacgugaucggcaagcccugccccaagccccacagacugaaccacaugggcaucugcagcugcggccuguacaagcaccccggcgugcccgugaaguggaagagaugaggacuagucccuguucccagagcccacuuuuuuuucuuuuuuugaaauaaaauagccugucuuucagaucucaaaggcucuuuucagagccaccaaaaaaaaaaaaaaaaaaaaaaaaaaaaaaaaaaaaaaaaaaaaaaaaaaaaaaaaaaaaaaaaagaauu

SEQ ID NO: 14103 - RNA, 1714 nt, Artificial Sequence
  mRNA product Design a-1 (hSL-A64-N5) comprising derived and/or modified sequence from LASV(LASV035-NIG-2009;Clade II)__AIT17588__GPC (opt4)
aggagagucccgcagucggcguccagcggcucugcuuguucgugugugugucguugcaggccuuauucaagcuuaccaugggccagaucaucaccuucuuccaggaggugccccacgugaucgaggaggugaugaacaucgugcugaucgcccugagccugcuggccauccugaagggcaucuacaacguggccaccugcggccuguucggccuggugagcuuccugcugcugugcggcagaagcugcagcaccaccuacaagggcguguacgagcugcagacccuggagcuggacauggccagccugaacaugaccaugccccugagcugcaccaagaacaacagccaccacuacaucauggugggcaacgagaccggccuggagcugacccugaccaacaccagcaucaucaaccacaaguucugcaaccugagcgacgcccacaagaagaaccuguacgaccacgcccugaugagcaucaucagcaccuuccaccugagcauccccaacuucaaccaguacgaggccaugagcugcgacuucaacggcggcaagaucagcgugcaguacaaccugagccacgccuacgccguggacgccgccaaccacugcggcaccaucgccaacggcgugcugcagaccuucaugagaauggccuggggcggcagcuacaucgcccuggacagcggcaagggcagcugggacugcaucaugaccagcuaccaguaccugaucauccagaacaccaccugggaggaccacugccaguucagcagacccagccccaucggcuaccugggccugcugagccagagaaccagagacaucuacaucagcagaagacugcugggcaccuucaccuggacccugagcgacagcgagggcaacgagacccccggcggcuacugccugaccagauggaugcugaucgaggccgagcugaagugcuucggcaacaccgccguggccaagugcaacgagaagcacgacgaggaguucugcgacaugcugagacuguucgacuucaacaagcaggccaucagaagacugaaggccgaggcccagaugagcauccagcugaucaacaaggccgugaacgcccugaucaacgaccagcugaucaugaagaaccaccugagagacaucaugggcauccccuacugcaacuacagcaaguacugguaccugaaccacaccgugaccggcaagaccagccugcccagaugcuggcuggugagcaacggcagcuaccugaacgagacccacuucagcgacgacaucgagcagcaggccgacaacaugaucaccgagcugcugcagaaggaguacaucgacagacagggcaagaccccccugggccugguggaccuguucguguucagcaccagcuucuaccugaucagcaucuuccugcaccuggugaagauccccacccacagacacgugaucggcaagcccugccccaagccccacagacugaaccacaugggcaucugcagcugcggccuguacaagcaccccggcgugcccgugaaguggaagagaugaggacuagucccuguucccagagcccacuuuuuuuucuuuuuuugaaauaaaauagccugucuuucagaucucaaaggcucuuuucagagccaccaaaaaaaaaaaaaaaaaaaaaaaaaaaaaaaaaaaaaaaaaaaaaaaaaaaaaaaaaaaaaaaaagaauu

SEQ ID NO: 14104 - RNA, 1714 nt, Artificial Sequence
  mRNA product Design a-1 (hSL-A64-N5) comprising derived and/or modified sequence from LASV(LASV1000-NIG-2009;Clade II)__AIT17782__GPC (opt4)
aggagagucccgcagucggcguccagcggcucugcuuguucgugugugugucguugcaggccuuauucaagcuuaccaugggccagaucaucaccuucuuccaggaggugccccacgugaucgaggaggugaugaacaucgugcugaucgcccugagccugcuggccauccugaagggcaucuacaacguggccaccugcggccuguucggccuggugagcuuccugcugcugugcggcagaagcugcagcaccaccuacaagggcguguacgagcugcagacccuggagcuggacauggccagccugaacaugaccaugccccugagcugcaccaagaacaacagccaccacuacaucauggugggcaacgagaccggccuggagcugacccugaccaacaccagcaucaucaaccacaaguucugcaaccugagcgacgcccacaagaagaaccuguacgaccacgcccugaugagcaucaucagcaccuuccaccugagcauccccaacuucaaccaguacgaggccaugagcugcgacuucaacggcggcaagaucagcgugcaguacaaccugagccacaccuacgccguggacgccgccaaccacugcggcaccaucgccaacggcgugcugcagaccuucaugagaauggccuggggcggcagcuacaucgcccuggacagcggcaagggcagcugggacugcaucaugaccagcuaccaguaccugaucauccagaacaccaccugggaggaccacugccaguucagcagacccagccccaucggcuaccugggccugcugagccagagaaccagagacaucuacaucagcagaagacugcugggcaccuucaccuggacccugagcgacagcgagggcaacgagacccccggcggcuacugccugaccagauggaugcugaucgaggccgagcugaagugcuucggcaacaccgccguggccaagugcaacgagaagcacgacgaggaguucugcgacaugcugagacuguucgacuucaacaagcaggccaucaagagacugaagaccgaggcccagaugagcauccagcugaucaacaaggccgugaacgcccugaucaacgaccagcugaucaugaagaaccaccugagagacaucaugggcauccccuacugcaacuacagcaaguacugguaccugaaccacaccgugaccggcaagaccagccugcccagaugcuggcuggugagcaacggcagcuaccugaacgagacccacuucagcgacgacaucgagcagcaggccgacaacaugaucaccgagcugcugcagaaggaguacaucgacagacagggcaagaccccccugggccugguggaccuguucguguucagcaccagcuucuaccugaucagcaucuuccugcaccuggugaagauccccacccacagacacguggugggcaagcccugccccaagccccacagacugaaccacaugggcaucugcagcugcggccuguacaagcaccccggcgugcccgugaaguggaagagaugaggacuagucccuguucccagagcccacuuuuuuuucuuuuuuugaaauaaaauagccugucuuucagaucucaaaggcucuuuucagagccaccaaaaaaaaaaaaaaaaaaaaaaaaaaaaaaaaaaaaaaaaaaaaaaaaaaaaaaaaaaaaaaaaagaauu

SEQ ID NO: 14105 - RNA, 1714 nt, Artificial Sequence
  mRNA product Design a-1 (hSL-A64-N5) comprising derived and/or modified sequence from LASV(LASV221-NIG-2010;Clade II)__AIT17624__GPC (opt4)
aggagagucccgcagucggcguccagcggcucugcuuguucgugugugugucguugcaggccuuauucaagcuuaccaugggccagaucaucaccuucuuccaggaggugccccacgugaucgaggaggugaugaacaucgugcugaucgcccugagccugcuggccauccugaagggcaucuacaacguggccaccugcggccuguucggccuggugagcuuccugcugcugugcggcagaagcugcagcaccaccuacaagggcguguacgagcugcagacccuggagcuggacauggccagccugaacaugaccaugccccugagcugcaccaagaacaacagccaccacuacaucauggugggcaacgagaccggccuggagcugacccugaccaacaccagcaucaucaaccacaaguucugcaaccugagcgacgcccacaagaagaaccuguacgaccacgcccugaugagcaucaucagcaccuuccaccugagcauccccaacuucaaccaguacgaggccaugagcugcgacuucaacggcggcaagaucagcgugcaguacaaccugagccacaccuacgccaucgacgccgccaaccacugcggcaccaucgccaacggcgugcugcagaccuucaugagaauggccuggggcggcagcuacaucgcccuggacagcggcaagggcagcugggacugcaucaugaccagcuaccaguaccugaucauccagaacaccaccugggaggaccacugccaguucagcagacccagccccaucggcuaccugggccugcugagccagagaaccagagacaucuacaucagcagaagacugcugggcaccuucaccuggacccugagcgacagcgagggcaacgagacccccggcggcuacugccugaccagauggaugcugaucgaggccgagcugaagugcuucggcaacaccgccguggccaagugcaacgagaagcacgacgaggaguucugcgacaugcugagacuguucgacuucaacaagcaggccaucagaagacugaagaccgaggcccagaugagcauccagcugaucaacaaggccgugaacgcccugaucaacgaccagcugaucaugaagaaccaccugagagacaucaugggcauccccuacugcaacuacagcaaguacugguaccugaaccacaccgugaccggcaagaccagccugcccagaugcuggcuggugagcaacggcagcuaccugaacgagacccacuucagcgacgacaucgagcagcaggccgacaacaugaucaccgagaugcugcagaaggaguacauggacagacagggcaagaccccccugggccugguggaccuguucguguucagcaccagcuucuaccugaucagcaucuuccugcaccuggugaagauccccacccacagacacgugaucggcaagcccugccccaagccccacagacugaaccacaugggcaucugcagcugcggccuguacaagcaccccggcgugcccgugaaguggaagagaugaggacuagucccuguucccagagcccacuuuuuuuucuuuuuuugaaauaaaauagccugucuuucagaucucaaaggcucuuuucagagccaccaaaaaaaaaaaaaaaaaaaaaaaaaaaaaaaaaaaaaaaaaaaaaaaaaaaaaaaaaaaaaaaaagaauu

SEQ ID NO: 14106 - RNA, 1714 nt, Artificial Sequence
  mRNA product Design a-1 (hSL-A64-N5) comprising derived and/or modified sequence from LASV(LASV237-NIG-2010;Clade II)__AIT17638__GPC (opt4)
aggagagucccgcagucggcguccagcggcucugcuuguucgugugugugucguugcaggccuuauucaagcuuaccaugggccagaucaucaccuucuuccaggaggugccccacgugaucgaggaggugaugaacaucgugcugaucgcccugagccugcuggccauccugaagggcaucuacaacguggccaccugcggccuguucggccuggugagcuuccugcugcugugcggcagaagcugcagcaccaccuacaagggcguguacgagcugcagacccuggagcuggacauggccagccugaacaugaccaugccccugagcugcaccaagaacaacagccaccacuacaucauggugggcaacgagaccggccuggagcugacccugaccaacaccagcaucaucaaccacaaguucugcaaccugagcgacgcccacaagaaggaccuguacgaccacgcccugaugagcaucaucagcaccuuccaccugagcauccccaacuucaaccaguacgaggccaugagcugcgacuucaacggcggcaagaucagcgugcaguacaaccugagccacaccuacgccguggacgccgccaaccacugcggcaccaucgccaacggcgugcugcagaccuucaugagaauggccuggggcggcagcuacaucgcccuggacagcggcaagggcagcugggacugcaucaugaccagcuaccaguaccugaucauccagaacaccaccugggaggaccacugccaguucagcagacccagccccaucggcuaccugggccugcugagccagagaaccagagacaucuacaucagcagaagacugcugggcaccuucaccuggacccugagcgacagcgagggcaacgagacccccggcggcuacugccugaccagauggaugcugaucgaggccgagcugaagugcuucggcaacaccgccguggccaagugcaacgagaagcacgacgaggaguucugcgacaugcugagacuguucgacuucaacaagcaggccaucagaagacugaagaccgaggcccagaugagcauccagcugaucaacaaggccgugaacgcccugaucaacgaccagcugaucaugaagaaccaccugagagacaucaugggcauccccuacugcaacuacagcaaguacugguaccugaaccacaccgugaccggcaagaccagccugcccagaugcuggcuggugagcaacggcagcuaccugaacgagacccacuucagcgacgacaucgagcagcaggccgacaacaugaucaccgagcugcugcagaaggaguacauggacagacagggcaagaccccccugggccugguggaccuguucguguucagcaccagcuucuaccugaucagcaucuuccugcaccugaucaagauccccacccacagacacaucaccggcaagcccugccccaagccccacagacugaaccacaugggcaucugcagcugcggccuguacaagcaccccggcgugcccgugaaguggaagagaugaggacuagucccuguucccagagcccacuuuuuuuucuuuuuuugaaauaaaauagccugucuuucagaucucaaaggcucuuuucagagccaccaaaaaaaaaaaaaaaaaaaaaaaaaaaaaaaaaaaaaaaaaaaaaaaaaaaaaaaaaaaaaaaaagaauu

SEQ ID NO: 14107 - RNA, 1714 nt, Artificial Sequence
  mRNA product Design a-1 (hSL-A64-N5) comprising derived and/or modified sequence from LASV(LASV253-NIG-2011;Clade II)__AIT17670__GPC (opt4)
aggagagucccgcagucggcguccagcggcucugcuuguucgugugugugucguugcaggccuuauucaagcuuaccaugggccagaucaucaccuucuuccaggaggugccccacgugaucgaggaggugaugaacaucgugcugaucgcccugagccugcuggccauccugaagggcaucuacaacguggccaccugcggccuguucggccuggugagcuuccugcugcugugcggcagaagcugcagcaccaccuacaagggcguguacgagcugcagacccuggagcuggacauggccagccugaacaugaccaugccccugagcugcaccaagaacaacagccaccacuacaucauggugggcaacgagaccggccuggagcugacccugaccaacaccagcaucaucaaccacaaguucugcaaccugagcgacgcccacaagaagaaccuguacgaccacgcccugaugagcaucaucagcaccuuccaccugagcauccccaacuucaaccaguacgaggccaugagcugcgacuucaacggcggcaagaucagcgugcaguacaaccugagccacaccuacgccguggacgccgccaaccacugcggcaccaucgccaacggcgugcugcagaccuucaugagaauggccuggggcggcagcuacaucgcccuggacagcggcaagggcagcugggacugcaucaugaccagcuaccaguaccugaucauccagaacaccaccugggaggaccacugccaguucagcagacccagccccaucggcuaccugggccugcugagccagagaaccagagacaucuacaucagcagaagacugcugggcaccuucaccuggacccugagcgacagcgagggcaacgagacccccggcggcuacugccugaccagauggaugcugaucgaggccgagcugaagugcuucggcaacaccgccguggccaagugcaacgagaagcacgacgaggaguucugcgacaugcugagacuguucgacuucaacaagcaggccaucagaagacugaaggccgaggcccagaugagcauccagcugaucaacaaggccgugaacgcccugaucaacgaccagcugaucaugaagaaccaccugagagacaucaugggcauccccuacugcaacuacagcaaguacugguaccugaaccacaccgugaccggcagaaccagccugcccagaugcuggcuggugagcaacggcagcuaccugaacgagacccacuucagcgacgacaucgagcagcaggccgacaacaugaucaccgagcugcugcagaaggaguacaucgacagacagggcaagaccccccugggccugguggaccuguucguguucagcaccagcuucuaccugaucagcaucuuccugcaccuggugaagauccccacccacagacacaucaucggcaagcccugccccaagccccacagacugaaccacaugggcaucugcagcugcggccuguacaagcaccccggcgugcccgugaaguggaagagaugaggacuagucccuguucccagagcccacuuuuuuuucuuuuuuugaaauaaaauagccugucuuucagaucucaaaggcucuuuucagagccaccaaaaaaaaaaaaaaaaaaaaaaaaaaaaaaaaaaaaaaaaaaaaaaaaaaaaaaaaaaaaaaaaagaauu

SEQ ID NO: 14108 - RNA, 1714 nt, Artificial Sequence
  mRNA product Design a-1 (hSL-A64-N5) comprising derived and/or modified sequence from LASV(LASV254-NIG-2011;Clade II)__AIT17674__GPC (opt4)
aggagagucccgcagucggcguccagcggcucugcuuguucgugugugugucguugcaggccuuauucaagcuuaccaugggccagaucaucaccuucuuccaggaggugccccacgugaucgaggaggugaugaacaucgugcugaucgcccugagccugcuggccauccugaagggcaucuacaacguggccaccugcggccuguucggccuggugagcuuccugcugcugugcggcagaagcugcagcaccaccuacaagggcguguacgagcugcagacccuggagcuggacaugaccaaccugaacaugaccaugccccugagcugcaccaagaacaacagccaccacuacaucauggugggcaacgagaccggccuggagcugacccugaccaacaccagcaucaucaaccacaaguucugcaaccugagcgacgcccacaagaagaaccuguacaaccacgcccugaugagcaucaucagcaccuuccaccugagcauccccaacuucaaccaguacgaggccaugagcugcgacuucaacggcggcaagaucagcgugcaguacaaccugagccacagcuacgccguggacgccgccaaccacugcggcaccaucgccaacggcgugcugcagaccuucaugagaauggccuggggcggcagcuacaucgcccuggacagcggcaagggcaacugggacugcaucaugaccagcuaccaguaccugaucauccagaacaccaccugggaggaccacugccaguucagcagacccagccccaucggcuaccugggccugcugagccagagaaccagagacaucuacaucagcagaagacugcugggcaccuucaccuggacccugagcgacagcgagggcaacgagacccccggcggcuacugccugaccagauggaugcugaucgaggccgagcugaagugcuucggcaacaccgccguggccaagugcaacgagaagcacgacgaggaguucugcgacaugcugagacuguucgacuucaacaagcaggccaucagaagacugaagaccgaggcccaggccaacauccagcugaucaacaaggccgugaacgcccugaucaacgaccagcugaucaugaagaaccaccugagagacaucaugggcauccccuacugcaacuacagcaaguacugguaccugaaccacaccgugaccggcaagaccagccugcccagaugcuggcuggugagcaacggcagcuaccugaacgagacccacuucagcgacgacaucgagcagcaggccgacaacaugaucaccgagcugcugcagaaggaguacauggacagacagggcaagaccccccugggccugguggaccuguucguguucagcaccagcuucuaccugaucagcaucuuccugcaccuggugaagauccccacccacagacacgugaucggcaagcccugccccaagccccacagacugaaccacaugggcaucugcagcugcggccuguacaagcaccccggcgugcccgugaaguggaagagaugaggacuagucccuguucccagagcccacuuuuuuuucuuuuuuugaaauaaaauagccugucuuucagaucucaaaggcucuuuucagagccaccaaaaaaaaaaaaaaaaaaaaaaaaaaaaaaaaaaaaaaaaaaaaaaaaaaaaaaaaaaaaaaaaagaauu

SEQ ID NO: 14109 - RNA, 1714 nt, Artificial Sequence
  mRNA product Design a-1 (hSL-A64-N5) comprising derived and/or modified sequence from LASV(Nig08-A19;Clade III)__ADU56618__GPC (opt4)
aggagagucccgcagucggcguccagcggcucugcuuguucgugugugugucguugcaggccuuauucaagcuuaccaugggccagaucgugaccuucuuccaggaggugccccacgugaucgaggaggugaugaacaucgugcugaucgcccugagcauccuggccauccugaagggccuguacaacaucgccaccugcggccugaucggccuggugaccuuccugcugcugagcggcagaagcugcagcaugaccuacaagggcguguacgagcugcagacccuggagcugaacaugaacacccugaacaugaccaugccccugagcugcaccaagaacaacagccaccacuacaucauggugggcaacgagaccggccuggagcugacccugaccaacaccagccugcugcaccacaaguucugcaaccugagcgacgcccacaagaagaaccuguacgaccacacccugaugagcaucaucagcaccuuccaccugagcauccccaacuucaaccaguacgaggccaugagcugcgacuucaacggcggcaagaucaccgugcaguacaaccugagccacagcuacgccaucgacgccgccaaccacugcggcaccguggccaacggcgugcugcagaccuucaugagaauggccuggggcggcagcuacaucgcccuggacagcggcagaggcaagugggacugcaucaugaccagcuaccaguaccugaucauccagaacaccaccugggaggaccacugccaguucagcagacccagccccaucggcuaccugggccugcugagccagagaaccagagacaucuacaucagcagaagacugcugggcaccuucaccuggacccugagcgacagcgagggcaacgagacccccggcggcuacugccugaccagauggaugcugaucgaggccgagcugaagugcuucggcaacaccgccguggccaagugcaacgagaagcacgacgaggaguucugcgacaugcugagacuguucgacuucaacaagcaggccaucagaagacugaaggccgaggcccagaugagcauccagcugaucaacaaggccgugaacgcccugaucaacgaccagcugaucaugaagaaccaccugagagacaucaugggcauccccuacugcaacuacagcaaguacugguaccugaaccacaccagcaccggcagaaccagccugcccagaugcuggcuggugagcaacggcagcuaccugaacgagacccacuucagcgacgacaucgagcagcaggccgacaacaugaucaccgagaugcugcagaaggaguaccuggacagacagggcaagaccccccugggccugguggaccuguucguguucagcaccagcuucuaccugaucagcaucuuccugcaccuggugaagauccccacccacagacacaucgugggcaagcccugccccaagccccacagacugaaccacaugggcaucugcagcugcggccuguacaagcagcccggcgugcccgugagauggaagagaugaggacuagucccuguucccagagcccacuuuuuuuucuuuuuuugaaauaaaauagccugucuuucagaucucaaaggcucuuuucagagccaccaaaaaaaaaaaaaaaaaaaaaaaaaaaaaaaaaaaaaaaaaaaaaaaaaaaaaaaaaaaaaaaaagaauu

SEQ ID NO: 14110 - RNA, 1717 nt, Artificial Sequence
  mRNA product Design a-1 (hSL-A64-N5) comprising derived and/or modified sequence from LASV(G1180-SLE-2010;Clade IV)__AIT17168__GPC (opt4)
aggagagucccgcagucggcguccagcggcucugcuuguucgugugugugucguugcaggccuuauucaagcuuaccaugggccagaucgugaccuucuuccaggaggugccccacgugaucgaggaggugaugaacaucgugcugaucgcccugagcauccuggccgugcugaagggccuguacaacuucgccaccugcggccuggugggccugcugaccuuccugcugcugugcggcagaagcugcaccgccagcagauacaagggcguguacgagcugcagacccuggagcugaacauggagacccugaacaugaccaugccccugagcugcaccaagaacaacagccaccacuacaucauggugggcaacgagaccggccuggagcugacccugaccaacaccagcaucaucaaccacaaguucugcaaccugagcgacgcccacaagaagaaccuguacgaccacgcccugaugagcaucaucagcaccuuccaccugagcauccccaacuucaaccaguacgaggccaugagcugcgacuucaacggcggcaagaucagcgugcaguacaaccugagccacagcuacgccggcgacgccgccaaccacugcggcaccguggccaacggcgugcugcagaccuucaugagaauggccuggggcggcagcuacaucgcccuggacagcggccacggcagcugggacugcaucaugaccagcuaccaguaccugaucauccagaacaccaccugggaggaccacugccaguucagcagacccagccccaucggcuaccugggccugcugagccagagaaccagagacaucuacaucagcagaagacugcugggcaccuucaccuggacccugagcgacagcgagggcaaggacacccccggcggcuacugccugaccagauggaugcugaucgaggccgagcugaagugcuucggcaacaccgccguggccaagugcaacgagaagcacgacgaggaguucugcgacaugcugagacuguucgacuucaacaagcaggccauccagagacugaaggccgaggcccagaugagcauccagcugaucaacaaggccgugaacgcccugaucaacgaccagcugaucaugaagaaccaccugagagacaucaugggcauccccuacugcaacuacagcaaguacugguaccugaaccacaccaccaccggcaagaccagccugcccaagugcuggcuggugagcaacggcagcuaccugaacgagacccacuucagcgacgacaucgagcagcaggccgacaacaugaucaccgagaugcugcagaaggaguacauggagagacagggcaagaccccccugggccugguggaccuguucguguucagcaccagcuucuaccugaucagcaucuuccugcaccuggugaagauccccacccacagacacaucgugggcaagagcugccccaagccccacagacugaaccacaugggcaucugcagcugcggccuguacaagcagcccggcgugcccgugaaguggaagagaugaggacuagucccuguucccagagcccacuuuuuuuucuuuuuuugaaauaaaauagccugucuuucagaucucaaaggcucuuuucagagccaccaaaaaaaaaaaaaaaaaaaaaaaaaaaaaaaaaaaaaaaaaaaaaaaaaaaaaaaaaaaaaaaaagaauu

SEQ ID NO: 14111 - RNA, 1717 nt, Artificial Sequence
  mRNA product Design a-1 (hSL-A64-N5) comprising derived and/or modified sequence from LASV(G1442-SLE-2011;Clade IV)__AIT17180__GPC (opt4)
aggagagucccgcagucggcguccagcggcucugcuuguucgugugugugucguugcaggccuuauucaagcuuaccaugggccagaucgugaccuucuuccaggaggugccccacgugaucgaggaggugaugaacaucgugcugaucgcccugagcauccuggccgugcugaagggccuguacaacguggccaccugcggccugaucggccuggugaccuuccugcugcugugcggcagaagcugcaccaccacccuguacaagggcguguacgagcugcagacccuggagcugaacauggagacccugaacaugaccaugccccugagcugcaccaagaacaacagccaccacuacaucagagugggcaacgagaccggccuggagcugacccugaccaacaccagcaucaucaaccacaaguucugcaaccugagcgacgcccacaagaagaaccuguacgaccacgcccugaugagcaucaucagcaccuuccaccugagcauccccaacuucaaccaguacgaggccaugagcugcgacuucaacggcggcaagaucagcgugcaguacaaccugagccacagcuacgccggcgacgccgccaaccacugcggcaccguggccaacggcgugcugcagaccuucaugagaauggccuggggcggcagcuacaucgcccuggacagcggcagaggcaacugggacugcaucaugaccagcuaccaguaccugaucauccagaacaccaccugggacgaccacugccaguucagcagacccagccccaucggcuaccugggccugcugagccagagaaccagagacguguacaucagcagaagacugcugggcaccuucaccuggacccugagcgacagcgagggcaaggacacccccggcggcuacugccugaccagauggaugcugaucgaggccgagcugaagugcuucggcaacaccgccguggccaagugcaacgagaagcacgacgaggaguucugcgacaugcugagacuguucgacuucaacaagcaggccauccagagacugaaggccgaggcccagaugagcauccagcugaucaacaaggccgugaacgcccugaucaacgaccagcugaucaugaagaaccaccugagagacaucaugggcauccccuacugcaacuacagcaaguacugguaccugaacaacaccgccaccggcaagaccagccugcccaagugcuggcugaucagcaacggcagcuaccugaacgagacccacuucagcgacgacaucgagcaggaggccgacaacaugaucaccgagaugcugcagaaggaguacauggagagacagggcaagaccccccugggccugguggaccuguucguguucagcaccagcuucuaccugaucagcaucuuccugcaccuggugaagauccccacccacagacacaucgugggcaagagcugccccaagccccacagacugaaccacaugggcaucugcagcugcggccuguacaagcagcccggcgugcccgugagauggaagagaugaggacuagucccuguucccagagcccacuuuuuuuucuuuuuuugaaauaaaauagccugucuuucagaucucaaaggcucuuuucagagccaccaaaaaaaaaaaaaaaaaaaaaaaaaaaaaaaaaaaaaaaaaaaaaaaaaaaaaaaaaaaaaaaaagaauu

SEQ ID NO: 14112 - RNA, 1717 nt, Artificial Sequence
  mRNA product Design a-1 (hSL-A64-N5) comprising derived and/or modified sequence from LASV(G3010-SLE-2013;Clade IV)__AIT17344__GPC (opt4)
aggagagucccgcagucggcguccagcggcucugcuuguucgugugugugucguugcaggccuuauucaagcuuaccaugggccagaucgugaccuucuuccaggaggugccccacgugaucgaggaggugaugaacaucgugcugaucgcccugagcauccuggccgugcugaagggccuguacaacuucgccaccugcggccuggugggccuggugaccuuccugcugcugugcggcagaagcugcaccaccagccuguacaagggcguguacgagcugcagacccuggagcugaacauggagacccugaacaugaccaugccccugagcugcaccaagaacaacagccaccacuacaucauggugggcaacgagaccggccuggagcugacccugaccaacaccagcaucaucaaccacaaguucugcaaccugagcgacgcccacaagaagaaccuguacaaccacgcccugaugagcaucaucagcaccuuccaccugagcauccccaacuucaaccaguacgaggccaugagcugcgacuucaacggcggcaagaucagcgugcaguacaaccugagccacagcuacgccggcgacgccgccagccacugcggcaccguggccaacggcgugcugcagaccuucaugagaauggccuggggcggcagcuacaucgcccuggacagcggcuacggcaagugggacugcaucaugaccagcuaccaguaccugaucauccagaacaccaccugggaggaccacugccaguucagcagacccagccccaucggcuaccugggccugcugagccagagaaccagagacaucuacaucagcagaagacugcugggcaccuucaccuggacccugagcgacagcgagggcaaggacacccccggcggcuacugccugaccagauggaugcugaucgaggccgagcugaagugcuucggcaacaccgccguggccaagugcaacgagaagcacgacgaggaguucugcgacaugcugagacuguucgacuucaacaagcaggccauccagagacugaagaccgaggcccagaugagcauccagcugaucaacaaggccgugaacgcccugaucaacgaccagcugaucaugaagaaccaccugagagacaucaugggcauccccuacugcaacuacagcaaguacugguaccugaaccacaccaccaccggcaagaccagccugcccaagugcuggcuggugagcaacggcagcuaccugaacgagacccacuucagcgacgacaucgagcagcaggccgacaacaugaucaccgagaugcugcagaaggaguacauggagagacagggcaagaccccccugggccugguggaccuguucguguucagcaccagcuucuaccugaucagcaucuuccugcaccuggugaagauccccacccacagacacaucgugggcaagagcugccccaagccccacagacugaaccacaugggcaucugcagcugcggccuguacaagcagcccggcgugcccgugagauggaagagaugaggacuagucccuguucccagagcccacuuuuuuuucuuuuuuugaaauaaaauagccugucuuucagaucucaaaggcucuuuucagagccaccaaaaaaaaaaaaaaaaaaaaaaaaaaaaaaaaaaaaaaaaaaaaaaaaaaaaaaaaaaaaaaaaagaauu

SEQ ID NO: 14113 - RNA, 1717 nt, Artificial Sequence
  mRNA product Design a-1 (hSL-A64-N5) comprising derived and/or modified sequence from LASV(G502-SLE-2009;Clade IV)__AIT17126__GPC (opt4)
aggagagucccgcagucggcguccagcggcucugcuuguucgugugugugucguugcaggccuuauucaagcuuaccaugggccagaucgugaccuucuuccaggaggugccccacgugaucgaggaggugaugaacaucgugcugaucgcccugagcauccuggccgugcugaagggccuguacaacuucgccaccugcggccuggugggccugcugaccuuccugcugcugugcggcagaagcugcaccaccggccuguacaagggcguguacgagcugcagacccuggagcugaacauggagacccugaacaugaccaugccccugagcugcaccaagaacaacagccaccacuacaucauggugggcaacgagaccggccuggagcugacccugaccaacaccagcaucaucaaccacaaguucugcaaccugagcgacgcccacaagaagaaccuguacgaccacgcccugaugagcaucaucagcaccuuccaccugagcauccccaacuucaaccaguacgaggccaugagcugcgacuucaacggcggcaagaucagcgugcaguacaaccugagccacagcuacgccggcgacgccgccgaccacugcggcaccguggccaacggcgugcugcagaccuucaugagaauggccuggggcggcagcuacaucgcccuggacagcggcagaggcagaugggacugcaucaugaccagcuaccaguaccugaucauccagaacaccaccugggaggaccacugccaguucagcagacccagccccaucggcuaccugggccugcugagccagagaaccagagacaucuacaucagcagaagacugcugggcaccuucaccuggacccugagcgacagcgagggcaaggacacccccggcggcuacugccugaccagauggaugcugaucgaggccgagcugaagugcuucggcaacaccgccguggccaagugcaacgagaagcacgacgaggaguucugcgacaugcugagacuguucgacuucaacaagcaggccauccagagacugaaggccgaggcccagaugagcauccagcugaucaacaaggccgugaacgcccugaucaacgaccagcuggugaugaagaaccaccugagagacaucaugggcauccccuacugcaacuacagcagauacugguaccugaaccacaccaccaccggcagaaccagccugcccaagugcuggcuggugagcaacggcagcuaccugaacgagacccacuucagcgacgacaucgagcagcaggccgacaacaugaucaccgagaugcugcagaaggaguacauggagagacagggcaagaccccccugggccugguggaccuguucguguucagcaccagcuucuaccugaucagcaucuuccugcaccuggugaagauccccacccacagacacaucgugggcaagagcugccccaagccccacagacugaaccacaugggcaucugcagcugcggccuguacaagcagcccggcgugcccgugaaguggaagagaugaggacuagucccuguucccagagcccacuuuuuuuucuuuuuuugaaauaaaauagccugucuuucagaucucaaaggcucuuuucagagccaccaaaaaaaaaaaaaaaaaaaaaaaaaaaaaaaaaaaaaaaaaaaaaaaaaaaaaaaaaaaaaaaaagaauu

SEQ ID NO: 14114 - RNA, 1717 nt, Artificial Sequence
  mRNA product Design a-1 (hSL-A64-N5) comprising derived and/or modified sequence from LASV(G733-SLE-2010;Clade IV)__AIT17154__GPC (opt4)
aggagagucccgcagucggcguccagcggcucugcuuguucgugugugugucguugcaggccuuauucaagcuuaccaugggccagaucgugaccuucuuccaggaggugccccacgugaucgaggaggugaugaacaucgugcugaucgcccugagcauccuggccgugcugaagggccuguacaacuucgccaccugcggcaucgugggccuggugagcuuccugcugcugugcggcagaagcugcaccaccagccuguacaagggcguguacgagcugcagacccuggagcugaacauggagacccugaacaugaccaugccccugagcugcaccaagaacaacagccaccacuacaucauggugggcaacgagaccggccuggagcugacccugaccaacaccagcaucaucaaccacaaguucugcaaccugagcgacgcccacaagaagaaccuguacgaccacgcccugaugagcaucaucagcaccuuccaccugagcauccccaacuucaaccaguacgaggccaugagcugcgacuucaacggcggcaagaucagcgugcaguacaaccugagccacagcuacgccggcgacgccgccaaccacugcggcaccaucgccaacggcgugcugcagaccuucaugagaauggccuggggcggcagcuacaucgcccuggacagcggcagagacagaugggacugcaucaugaccagcuaccaguaccugaucauccagaacaccaccugggaggaccacugccaguucagcagacccagccccaucggcuaccugggccugcugagccagagaaccagagacaucuacaucagcagaagacugcugggcaccuucaccuggacccugagcgacagcgagggcaaggacacccccggcggcuacugccugaccagauggaugcugaucgaggccgagcugaagugcuucggcaacaccgccguggccaagugcaacgagaagcacgacgaggaguucugcgacaugcugagacuguucgacuucaacaagcaggccauccagagacugaaggccgaggcccagaugagcauccagcugaucaacaaggccgugaacgcccugaucaacgaccagcugaucaugaagaaccaccugagagacaucaugggcauccccuacugcaacuacagcaaguacugguaccugaaccacaccaccaccggcaagaccagccugcccaagugcuggcuggugagcaacggcagcuaccugaacgagacccacuucagcgacgacaucgagcagcaggccgacaacaugaucaccgagaugcugcagaaggaguacauggagagacagggcaagaccccccugggccugguggaccuguucguguucagcaccagcuucuaccugaucagcaucuuccugcaccuggugaagauccccacccacagacacguggugggcaagagcugccccaagccccacagacugaaccacaugggcaucugcagcugcggccuguacggccagcccggcgugcccgugaaguggaagagaugaggacuagucccuguucccagagcccacuuuuuuuucuuuuuuugaaauaaaauagccugucuuucagaucucaaaggcucuuuucagagccaccaaaaaaaaaaaaaaaaaaaaaaaaaaaaaaaaaaaaaaaaaaaaaaaaaaaaaaaaaaaaaaaaagaauu

SEQ ID NO: 14115 - RNA, 1717 nt, Artificial Sequence
  mRNA product Design a-1 (hSL-A64-N5) comprising derived and/or modified sequence from MOPV/LASV reassortant(IGS-1;Clade IV)__AFY05576__GPC (opt4)
aggagagucccgcagucggcguccagcggcucugcuuguucgugugugugucguugcaggccuuauucaagcuuaccaugggccagaucgugaccuucuuccaggaggugccccacgugaucgaggaggugaugaacaucgugcugaucgcccugagcgugcuggccgugcugaagggccuguacaacuucgccaccugcggccuggugggccuggugaccuuccugcugcugugcggcagaagcugcaccaccagccuguacaagggcguguacgagcugcagacccuggagcugaacauggagacccugaacaugaccaugccccugagcugcaccaagaacaacagccaccacuacaucauggugggcaacgagaccggccuggagcugacccugaccaacaccagcaucaucaaccacaaguucugcaaccugagcgacgcccacaagaagaaccuguacgaccacgcccugaugagcaucaucagcaccuuccaccugagcauccccaacuucaaccaguacgaggccaugagcugcgacuucaacggcggcaagaucagcgugcaguacaaccugagccacagcuacgccggcgacgccgccaaccacugcggcaccguggccaacggcgugcugcagaccuucaugagaauggccuggggcggcagcuacaucgcccuggacagcggcagaggcaacugggacugcaucaugaccagcuaccaguaccugaucauccagaacaccaccugggaggaccacugccaguucagcagacccagccccaucggcuaccugggccugcugagccagagaaccagagacaucuacaucagcagaagacugcugggcaccuucaccuggacccugagcgacagcgagggcgaggacacccccggcggcuacugccugaccagauggaugcugaucgaggccgagcugaagugcuucggcaacaccgccguggccaagugcaacgagaagcacgacgaggaguucugcgacaugcugagacuguucgacuucaacaagcaggccauccagagacugaaggccgaggcccagaugagcauccagcugaucaacaaggccgugaacgcccugaucaacgaccagcugaucaugaagaaccaccugagagacaucaugggcauccccuacugcaacuacagcaaguacugguaccugaaccacaccaccaccggcagaaccagccugcccaagugcuggcuggugagcaacggcagcuaccugaacgagacccacuucagcgacgacaucgagcagcaggccgacaacaugaucaccgagaugcugcagaaggaguacauggagagacagggcaagaccccccugggccugguggaccuguucguguucagcaccagcuucuaccugaucagcaucuuccugcaccuggugaagauccccacccacagacacaucgugggcaagagcugccccaagccccacagacugaaccacaugggcaucugcagcugcggccuguacaagcagcccggcgugcccgugaaguggaagagaugaggacuagucccuguucccagagcccacuuuuuuuucuuuuuuugaaauaaaauagccugucuuucagaucucaaaggcucuuuucagagccaccaaaaaaaaaaaaaaaaaaaaaaaaaaaaaaaaaaaaaaaaaaaaaaaaaaaaaaaaaaaaaaaaagaauu

SEQ ID NO: 14116 - RNA, 1717 nt, Artificial Sequence
  mRNA product Design a-1 (hSL-A64-N5) comprising derived and/or modified sequence from LASV(LM765-SLE-2012;Clade IV)__AIT17814__GPC (opt4)
aggagagucccgcagucggcguccagcggcucugcuuguucgugugugugucguugcaggccuuauucaagcuuaccaugggccagaucgugaccuucuuccaggaggugccccacgugaucgaggaggugaugaacaucgugcugaucgcccugagcauccuggccgugcugaagggccuguacaacuucgccaccugcggccuggugggccuggugaccuuccugcugcugugcggcagaagcugcaccaccagccuguacaagggcguguacgagcugcagacccuggagcugaacauggagacccugaacaugaccaugccccugagcugcaccaagaacaacagccaccacuacaucauggugggcaacgagaccggccuggagcugacccugaccaacaccagcaucaucgaccacaaguucugcaaccugagcgacgcccacagaaagaaccuguacgaccacgcccugaugagcaucaucagcaccuuccaccugagcauccccaacuucaaccaguacgaggccaugagcugcgacuucaacggcggcaagaucagcgugcaguacaaccugagccacagcuacgccaaggacgccgccgaccacugcggcaccguggccaacggcgugcugcagaccuucaugagaauggccuggggcggcagcuacaucgcccuggacagcggcagaggcagaugggacugcaucaugaccagcuaccaguaccugaucauccagaacaccaccugggaggaccacugccaguucagcagacccagccccaucggcuaccugggccugcugagccagagaaccagagacaucuacaucagcagaagacugcugggcaccuucaccuggacccugagcgacagcgagggcaaggacacccccggcggcuacugccugaccagauggaugcugaucgaggccgagcugaagugcuucggcaacaccgccguggccaagugcaacgagaagcacgacgaggaguucugcgacaugcugagacuguucgacuucaacaagcaggccauccagagacugaaggccgaggcccagaugagcauccagcugaucaacaaggccgugaacgcccugaucaacgaccagcugaucaugaagaaccaccugagagacaucaugggcauccccuacugcaacuacagcaaguacugguaccugaaccacaccaccaccggcaagaccagccugcccaagugcuggcuggugagcaacggcagcuaccugaacgagacccacuucagcgacgacaucgagcagcaggccgacaacaugaucaccgagaugcugcagaaggaguacauggagagacagggcaagaccccccugggccugguggaccuguucguguucagcaccagcuucuaccugaucagcaucuuccugcaccuggugaagauccccacccacagacacaucgugggcaagcccugccccaagccccacagacugaaccacaugggcaucugcagcugcggccuguacaagcagcccggcgugcccgugaaguggaagagaugaggacuagucccuguucccagagcccacuuuuuuuucuuuuuuugaaauaaaauagccugucuuucagaucucaaaggcucuuuucagagccaccaaaaaaaaaaaaaaaaaaaaaaaaaaaaaaaaaaaaaaaaaaaaaaaaaaaaaaaaaaaaaaaaagaauu

SEQ ID NO: 14117 - RNA, 1717 nt, Artificial Sequence
  mRNA product Design a-1 (hSL-A64-N5) comprising derived and/or modified sequence from LASV(LM776-SLE-2012;Clade IV)__AIT17824__GPC (opt4)
aggagagucccgcagucggcguccagcggcucugcuuguucgugugugugucguugcaggccuuauucaagcuuaccaugggccagaucgugaccuucuuccaggaggugccccacgugaucgaggaggugaugaacaucgugcugaucgcccugagcauccuggccgugcugaagggccuguacaacuucgccaccugcggccuggugggccuggugaccuuccugcugcugugcggcagaagcugcaccaccagcguguacaagggcguguacgagcugcagacccuggagcugaacauggagacccugaacaugaccaugccccugagcugcaccaagaacaacagccaccacuacaucauggugggcaacgagaccggccuggagcugacccugaccaacaccagcaucaucaaccacaaguucugcaaccugagcgacgcccacaagaagaaccuguacgaccacgcccugaugagcaucaucagcaccuuccaccugagcauccccaacuucaaccaguacgaggccaugagcugcgacuucaacggcggcaagaucagcgugcaguacaaccugagccacagcuacgccggcgacgccgccaaccacugcggcaccguggccaacggcgugcugcagaccuucaugagaauggccuggggcggcagcuacaucgcccuggacagcggccacggcaagugggacugcaucaugaccagcuaccaguaccugaucauccagaacaccaccugggaggaccacugccaguucagcagacccagccccaucggcuaccugggccugcugagccagagaaccagagacaucuacaucagcagaagacugcugggcaccuucaccuggacccugagcgacagcgagggcaaggacacccccggcggcuacugccugaccagauggaugcugaucgaggccgagcugaagugcuucggcaacaccgccguggccaagugcaacgagaagcacgacgaggaguucugcgacaugcugagacuguucgacuucaacaagcaggccauccagagacugaaggccgaggcccagaugagcauccagcugaucaacaaggccgugaacgcccugaucaacgaccagcugaucaugaagaaccaccugagagacaucaugggcauccccuacugcaacuacagcaaguacugguaccugaaccacaccaccaccggcaagaccagccugcccaagugcuggcuggugagcaacggcagcuaccugaacgagacccacuucagcgacgacaucgagcagcaggccgacaacaugaucaccgagaugcugcagaaggaguacauggagagacagggcaagaccccccugggccugguggaccuguucguguucagcaccagcuucuaccugaucagcaucuuccugcaccuggugaagauccccacccacagacacaucgugggcaagagcugccccaagccccacagacugaaccacaugggcaucugcagcugcggccuguacaagcagcccggcgugcccgugagauggaagagaugaggacuagucccuguucccagagcccacuuuuuuuucuuuuuuugaaauaaaauagccugucuuucagaucucaaaggcucuuuucagagccaccaaaaaaaaaaaaaaaaaaaaaaaaaaaaaaaaaaaaaaaaaaaaaaaaaaaaaaaaaaaaaaaaagaauu

SEQ ID NO: 14118 - RNA, 1717 nt, Artificial Sequence
  mRNA product Design a-1 (hSL-A64-N5) comprising derived and/or modified sequence from LASV(Mad39;Clade IV)__ANH09722__GPC (opt4)
aggagagucccgcagucggcguccagcggcucugcuuguucgugugugugucguugcaggccuuauucaagcuuaccaugggccagaucgugaccuucuuccaggaggugccccacgugaucgaggaggugaugaacaucgugcugaucgcccugagcauccuggccgugcugaagggccuguacaacguggccaccugcggccugaucggccuggugaccuuccugcugcugugcggcagaagcugcaccaccacccuguacaagggcguguacgagcugcaggcccuggagcugaacauggagacccugaacaugaccaugccccugagcugcaccaagaacaacagccaccacuacaucagagugggcaacgagaccggccuggagcugacccugaccaacaccagccugaucaaccacaaguucugcaaccugagcgacgcccacaagaagaaccuguacgaccacgcccugaugagcaucaucagcaccuuccaccugagcauccccaacuucaaccaguacgaggccaugagcugcgacuucaacgacggcaagaucagcgugcaguacaaccugagccacaccuacgccggcgacaccgccaaccacugcggcaccguggccaacggcgugcugcagaccuucaugagaauggccuggggcggcagcuacaucgcccuggacagcggcagaggcggcugggacugcaucaugaccagcuaccaguaccugaucauccagaacaccaccugggaggaccacugccaguucagcagacccagccccaucggcuaccugggccugcugagccagagaaccagagacaucuacaucagcagaagacugcugggcaccuucaccuggacccugagcgacagcgagggcaaggacacccccggcggcuacugccugaccagauggaugcugaucgaggccgagcugaagugcuucggcaacaccgccguggccaagugcaacgagaagcacgacgaggaguucugcgacaugcugagacuguucgacuucaacaagcaggccauccagagacugaaggccgaggcccagaugagcauccagcugaucaacaaggccgugaacgcccugaucaacgaccagcugaucaugaagaaccaccugagagacaucaugggcauccccuacugcaacuacagcaaguacugguaccugaaccacaccgugaccggcaagaccagccugcccaagugcuggcuggugagcaacggcagcuaccugaacgagacccacuucagcgacgacaucgagcagcaggccgacaacaugaucaccgagaugcugcagaaggaguacauggagagacagggcaagaccccccugggccugguggaccuguucguguucagcaccagcuucuaccugaucagcaucuuccugcaccuggugaagauccccacccacagacacguggugggcaagcccugccccaagccccacagacugaaccacaugggcaucugcagcugcggcuucuacaagcagcccggcgugcccgugagauggaagagaugaggacuagucccuguucccagagcccacuuuuuuuucuuuuuuugaaauaaaauagccugucuuucagaucucaaaggcucuuuucagagccaccaaaaaaaaaaaaaaaaaaaaaaaaaaaaaaaaaaaaaaaaaaaaaaaaaaaaaaaaaaaaaaaaagaauu

SEQ ID NO: 14119 - RNA, 1717 nt, Artificial Sequence
  mRNA product Design a-1 (hSL-A64-N5) comprising derived and/or modified sequence from LASV(Z0947-SLE-2011;Clade IV)__AIT17840__GPC (opt4)
aggagagucccgcagucggcguccagcggcucugcuuguucgugugugugucguugcaggccuuauucaagcuuaccaugggccagaucgugaccuucuuccaggaggugccccacgugaucgaggaggugaugaacaucgugcugaucgcccugagcauccuggccgugcugaagggccuguacaacuucgccaccugcggccuggugggccuggugaccuuccugcugcugugcggcagaagcugcaccaucagccuguacaagggcguguacgagcugcagacccuggagcugaacauggagacccugaacaugaccaugccccugagcugcaccaagaacaacagccaccacuacaucauggugggcaacgagaccggccuggagcugacccugaccaacaccagcaucaucaaccacaaguucugcaaccugagcgacgcccacaagaagaaccuguacgaccacgcccugaugagcaucaucagcaccuuccaccugagcauccccaacuucaaccaguacgaggccaugagcugcgacuucaacggcggcaagaucagcgugcaguacaaccugagccacagcuacgccggcgacgccgccaaccacugcggcaccguggccaacggcgugcugcagaccuucaugagaauggccuggggcggcagcuacaucgcccuggacagcggcagagacagaugggacugcaucaugaccagcuaccaguaccugaucauccagaacaccaccugggaggaccacugccaguucagcagacccagccccaucggcuaccugggccugcugagccagagaaccagagacaucuacaucagcagaagacugcugggcaccuucaccuggacccugagcgacagcgagggcaaggacacccccggcggcuacugccugaccagauggaugcugaucgaggccgagcugaagugcuucggcaacaccgccguggccaagugcaacgagaagcacgacgaggaguucugcgacaugcugagacuguucgacuucaacaagcaggccauccagagacugaaggccgaggcccagaugagcauccagcugaucaacaaggccgugaacgcccugaucaacgaccagcugaucaugaagaaccaccugagagacaucaugggcauccccuacugcaacuacagcaaguacugguaccugaaccacaccaccaccggcaagaccagccugcccaagugcuggcuggugagcaacggcagcuaccugaacgagacccacuucagcgacgacaucgagcagcaggccgacaacaugaucaccgagaugcugcagaaggaguacauggagagacagggcaagaccccccugggccugguggaccuguucguguucagcaccagcuucuaccugaucagcaucuuccugcaccuggugaagauccccacccacagacacaucgugggcaagcccugccccaagccccacagacugaaccacaugggcaucugcagcugcggccuguacaagcagcccggcgugcccgugaaguggaagagaugaggacuagucccuguucccagagcccacuuuuuuuucuuuuuuugaaauaaaauagccugucuuucagaucucaaaggcucuuuucagagccaccaaaaaaaaaaaaaaaaaaaaaaaaaaaaaaaaaaaaaaaaaaaaaaaaaaaaaaaaaaaaaaaaagaauu

SEQ ID NO: 14120 - RNA, 1717 nt, Artificial Sequence
  mRNA product Design a-1 (hSL-A64-N5) comprising derived and/or modified sequence from LASV(Josiah;Clade IV)__NP_694870__GPC (opt5)
aggagagucccgcagucggcguccagcggcucugcuuguucgugugugugucguugcaggccuuauucaagcuuaccaugggccagaucgugaccuucuuucaagaggucccccacguuauugaagaggugaugaacaucgugcugauugcccucagcguccuggcugugcuuaaggggcuguacaauuucgccacaugcggacucguuggccuggugacguuucuucugcucugugggagauccugcaccacaucucuguauaaaggagucuacgaacugcagacccucgagcugaacauggaaacacuuaauaugaccaugccucugagcuguacaaagaacaauucccaucacuauaucauggugggcaacgagaccgggcucgagcugacgcuuaccaauacaucuauuaucaaccauaaauucugcaaucugagcgacgcgcacaagaaaaaccucuacgaucaugcucugauguccaucauuucuaccuuucaccugagcaucccgaauuucaaccaguaugaagccauguccugugacuuuaauggaggcaagauuagcguucaguacaaccucucucacuccuaugccggcgaugcugccaaucauugcgggacaguggcuaacggaguccugcaaaccuucaugcggauggccuggggcgggagcuacaucgcgcuugacucuggacgcggcaacugggauuguauuaugacguccuaccaguaucugaucauucagaauacaaccugggaggaccacugccaguuuagcagacccucuccuaucggguaccucggacugcuuucccaacggacacgcgauaucuauauuagcagacggcugcucggcaccuucaccuggacacuguccgacucugaaggcaaggauacgcccgggggauacugucugacccgcuggaugcucaucgaggccgagcugaaaugcuuuggcaacacagcuguggccaaguguaaugaaaaacaugacgaggaguucugcgauaugcuuagacuguuugacuucaacaagcaggcuauucagcggcucaaagccgaagcgcagaugagcauccaacugauuaauaaggccgugaacgcucuuaucaaugaucagcugaucaugaagaaccaccuccgcgacauuauggggaucccuuauugcaauuacuccaaauauugguaccugaaccacaccacaaccggaagaacgagccugcccaaguguuggcucgucucuaauggcuccuaccugaacgaaacacauuucagcgacgauauugagcagcaagccgacaauaugaucaccgagaugcuucagaaagaauauauggagcggcaggggaagaccccucugggacucguugaucuguuuguguucucuaccagcuuuuaccugauuuccaucuuccuucaccucgugaaaaucccgacacaucgccacauugucggcaagucuugccccaaaccucauagacugaaccacaugggcaucuguagcugcgggcuguauaagcagcccggagugccuguuaaguggaaacggugaggacuagucccuguucccagagcccacuuuuuuuucuuuuuuugaaauaaaauagccugucuuucagaucucaaaggcucuuuucagagccaccaaaaaaaaaaaaaaaaaaaaaaaaaaaaaaaaaaaaaaaaaaaaaaaaaaaaaaaaaaaaaaaaagaauu

SEQ ID NO: 14121 - RNA, 1714 nt, Artificial Sequence
  mRNA product Design a-1 (hSL-A64-N5) comprising derived and/or modified sequence from LASV(LP;Clade I)__AAF86701__GPC (opt5)
aggagagucccgcagucggcguccagcggcucugcuuguucgugugugugucguugcaggccuuauucaagcuuaccaugggccagaucauuaccuucuuucaagaggugccccacgucaucgaagagguuaugaacauugugcugaucgcccucagccugcuugcuauucugaaggggcucuacaauaucgccacaugcggaaucauuggccugguggcguuccuuuuucugugugggaaauccugcucucucacgcugaagggaggcuaugaacugcagacccucgagcugaacauggaaacacuuaauaugaccaugccucugagcuguaccaaaaacuccucucaucacuacaucagagucgggaaugagacaggacucgagcugacacuuaccaacacgagcauuaucaaucauaaguucugcaaccuguccgacgcucacaaaaagaaucucuaugaucaugcccugaugucuauuaucagcaccuuucaccuguccauuccgaacuucaaucaguacgaagccaugagcugugacuuuaacggcggcaagaucucugugcaguauaaucucucccacagcuacgcuggggaugccgcugagcauugcggaacaguugccaacggcgugcugcaaaccuucaugcggauggcguggggagggcgcuauaucgcccuugacucuggcaaagggaauugggauuguauuaugacauccuaccaguaccugaucauucagaacaccacgugggaagaccacugccaguuuagcagacccucuccuaucggauaucucggccugcuuucccaacggacacgcgauauuuacaucagcagacggcugcucggcaccuucacauggacccuguccgacucugaggggaacgagacccccggaggcuauugucugacacgcuggaugcucaucgaagcugagcugaagugcuuugggaauacggccgucgcuaaauguaacgaaaagcaugaugaggaguucugcgacaugcuuagacuguuugauuucaauaaacaggccauucggcgccucaaggcggaagcccagaugagcauccagcugauuaacaaggcugugaaugcccuuaucaacgaccaacugauuaugaaaaaucaccucagagauaucaugggaaucccuuacugcaacuauuccaaguacugguaucugaaucacaccagcucuggccggacaucccugcccaaauguuggcucauuagcaacgggucuuaccugaaugagacccaguucagcgacgacaucgaacagcaagcugauaacaugauuacagagaugcuucagaaggaauacaucgagcgccagggaaaaaccccucugggccucguugacauuuuuaucuucuccacgucuuuuuaucugauuagcaucuuccugcaucuuaucaagauuccgacacacagacauaucgugggcaaacccugcccuaagccccaccggcucaaucauaugggggucuguuccugcggacuguacaagcacccuggcgugcccaccaaauggaagcgcugaggacuagucccuguucccagagcccacuuuuuuuucuuuuuuugaaauaaaauagccugucuuucagaucucaaaggcucuuuucagagccaccaaaaaaaaaaaaaaaaaaaaaaaaaaaaaaaaaaaaaaaaaaaaaaaaaaaaaaaaaaaaaaaaagaauu

SEQ ID NO: 14122 - RNA, 1714 nt, Artificial Sequence
  mRNA product Design a-1 (hSL-A64-N5) comprising derived and/or modified sequence from LASV(803213;Clade II)__AAF86703__GPC (opt5)
aggagagucccgcagucggcguccagcggcucugcuuguucgugugugugucguugcaggccuuauucaagcuuaccaugggccagaucauuaccuucuuucaagaggugccccacgucaucgaagagguuaugaacauugugcugaucgcccucagccugcuugcuauucugaaggggaucuacaauguggccacaugcggacucuucggccugaucuccuuucuucugcucugugggagaucuugcagcgucacguauaaaggaguguacgaacugcagacccuggagcucaacauggcgaaucugaacaugacaaugccucuuuccuguaccaagaauaacucucaucacuauauuaugguuggcaaugaaacagggcuggagcucacccugacaaacaccagcaucauuaaucauaaauucugcaaccuuuccgacgcucacaagaaaaaucuguacgaucaugcccucaugucuaucauuagcacguuucaccuguccaucccgaacuucaaucaguaugaggccaugagcugugacuuuaacggaggcaagauuucugugcaguacaaucugucccacagcuucgcugucgaugccgcuaaccauugcggcaccaucgccaacggggugcuccaaacauuuaugcggauggcguggggaggcucuuauaucgcccuggacuccgggaagggaaauugggauuguauuaugaccagcuaccaguaccuuaucauucagaacacaaccugggaagaccacugccaguucucucgccccuccccuaucggcuaucuggggcuccugagccaaagaacgcgggauauuuacaucucccgcagacuucugggaacauuuaccuggacacucucugacagcgagggcaaugaagcucccggcggguauugucugacccgguggaugcugaucgaggccgagcucaaaugcuucggaaacaccgcuguugccaaguguaaugaaaaacaugaugaggaauuuugcgacaugcugcgccuuuucgauuucaacaagcaggcgauuaaaagacugaagacagaggcccagauguccauccagcucauuaauaaggcugugaacgcccugaucaaugaccaacuuauuaugaaaaaccaucugcgggauaucaugggcaucccuuacugcaauuauagccgcuacugguaucucaaccacacggucaccgggaagacaucucugcccagauguuggcugguguccaauggaagcuaccucaacgaaacccacuuuucugacgacauugagcagcaggcugauaauaugaucacagagaugcugcaaaaagaauacauggaccggcagggcaagaccccucuugggcugguggaucucuucgucuuuagcacguccuucuaucugauuucuaucuuucugcaccuuguuaaaauuccgacacaucgccacaucgugggaaagcccugcccuaaaccccauagacucaaccacaugggcauuuguagcugcggccuguacaagcacccuggggugcccgucaaguggaaacggugaggacuagucccuguucccagagcccacuuuuuuuucuuuuuuugaaauaaaauagccugucuuucagaucucaaaggcucuuuucagagccaccaaaaaaaaaaaaaaaaaaaaaaaaaaaaaaaaaaaaaaaaaaaaaaaaaaaaaaaaaaaaaaaaagaauu

SEQ ID NO: 14123 - RNA, 1714 nt, Artificial Sequence
  mRNA product Design a-1 (hSL-A64-N5) comprising derived and/or modified sequence from LASV(GA391;Clade III)__CAA36645__GPC (opt5)
aggagagucccgcagucggcguccagcggcucugcuuguucgugugugugucguugcaggccuuauucaagcuuaccaugggccagaucgugaccuucuuucaagaggucccccacguuauugaagaggugaugaacaucgugcugauugcccucagcauccuggcuauucuuaaggggcuguacaaugucgccacaugcggacucaucggccuggugacguuccuucugcucuccgggagaucuuguagccugaucuauaaaggaaccuacgaacugcagacacucgagcugaacauggaaacccuuaauaugacaaugccucuguccugcaccaagaacaauucucaucacuauauucggguuggcaacgagacagggcucgagcugacccuuacgaauaccagcauccugaaccauaaauuuuguaaucucuccgacgcgcacaagcgcaaccuguacgaucauucucugaugagcauuaucuccacauuccaccucagcauuccgaauuuuaaccaguaugaagcuaugucuugcgacuucaauggaggcaaaaucaccgugcaguacaaccugucccacagcuuugccgucgaugccgcuggccauugugggacacuugccaauggagugcugcaaaccuucaugagaauggcuuggggcgggucuuauauugcccucgacuccggacggggcaacugggauugcaucaugacgagcuaccaguaccugaucauucagaacacaaccugggacgaucacugucaguuuucucgccccuccccuaucggguaucuuggacugcucagccaaagaacacgggacauuuacaucucccgcagacugcugggcaccuucaccuggacacucucugauagcgagggcaaugaaacgcccgggggauauugccugacccgguggaugcuuauugaggcggagcugaaguguuuuggcaacacagccguugcuaagugcaaugaaaaacaugacgaggaguucugugauaugcuccgccuguuugacuucaacaagcaggccaucagacggcuuaaaaccgaagcucagauguccauccagcugauuaauaaggccgugaacgcgcucaucaaugaucaacugauuaugaaaaaccaucugcgcgacaucauggggauuccuuacugcaauuauagcagauacugguaucucaaccacacaucuaccggaaagacgucccugccccggugcuggcuuaucagcaauggcucuuaccugaacgaaacaaaguucagcgacgauaucgagcagcaggccgacaauaugauuaccgagaugcuccaaaaagaauacaucgaucgccaggggaagaccccucugggacuggucgaccuuuuuguguucuccacaucuuuuuaucucauuagcaucuuccugcaccuggugaaaauuccgacccacagacauaucgucggcaagcccuguccuaaaccccaccggcucaaccauaugggcauuugcuccugugggcuguacaagcagccuggaguucccgugagauggaaacgcugaggacuagucccuguucccagagcccacuuuuuuuucuuuuuuugaaauaaaauagccugucuuucagaucucaaaggcucuuuucagagccaccaaaaaaaaaaaaaaaaaaaaaaaaaaaaaaaaaaaaaaaaaaaaaaaaaaaaaaaaaaaaaaaaagaauu

SEQ ID NO: 14124 - RNA, 1717 nt, Artificial Sequence
  mRNA product Design a-1 (hSL-A64-N5) comprising derived and/or modified sequence from LASV(AV;Clade V)__CCA30314__GPC (opt5)
aggagagucccgcagucggcguccagcggcucugcuuguucgugugugugucguugcaggccuuauucaagcuuaccaugggccagaucgugaccuucuuucaagaggucccccacguuauugaagaggugaugaacaucgugcugauugcccucagcauccuggcuguccuuaaggggcuguacaauauugccacaugcggacucaucggccugaucacguuccuucugcucugugggagauccugcucuagcaaccuguauaaaggaguguacgaacugcagucccucgaccugaauauggagacccuuaacaugacaaugccucugucuuguaccaagaauaacagccaucacuauauucggguuggcaaugauacagggcucgaacugacccuuacaaacaccuccauccugaaucauaaauuuugcaaccucucugacgcgcacaagaaagaucuguacgaccaugcucugaugagcauuaucuccacguuccaccucagcauuccgaauuuuaaccaguaugaggccaugucuugugauuucaauggaggcaagaucuccgugcaguacaaccugagccacucuuaugccauugacgcugccaaucauugcggcaccgucgcuaacgggauccuucaaacauuuaugcgcauggccuggggaggcuccuacaucgcgcuggauagcgggagaggaaacugggacuguauuaugaccucuuaccaguaucucaucauucagaauacaaccugggagaaccacugccaguucucccggcccagcccuaucggcuaccuggggcuucugucccaacgcacgagagauauuuauaucucucggcgccuccugggaacauuuaccuggacacugagcgacuccgaaggcaaugccacccccggcggguacugucucaccagauggaugcugaucgaggcugaacuuaagugcuucggaaacacagccguggcuaaauguaaugagaagcaugaugaggaauuuugcgacaugcugcgccucuucgauuuuaacaaacaggccauuagccggcugaagucugaggcgcagauguccauccagcuuauuaauaaagccguuaacgcucugaucaaugaccaacucauuaugaagaaccaccugagagacaucaugggcaucccuuauugcaauuacagcaaguauugguaccugaaccacacgauuaccgggaaaacaucucuccccaaguguuggcuggugagcaauggauccuaccuuaacgaaacccauuucucugaugacaucgagcagcaggccgauaauaugauuacagaaaugcugcaaaaagaguauauggagcggcagggcaagaccccucucgggcuggucgaccuguucguguuuagcacguccuucuaccuuaucagcauuuuucuccgccuggugaaaaucccgacacacagacauauugucggaaagcccugcccuaaaccccaccggcugaaccauaugggcaucuguucuugcggccucuauaagcagccugggguucccgugcgcuggaagagaugaggacuagucccuguucccagagcccacuuuuuuuucuuuuuuugaaauaaaauagccugucuuucagaucucaaaggcucuuuucagagccaccaaaaaaaaaaaaaaaaaaaaaaaaaaaaaaaaaaaaaaaaaaaaaaaaaaaaaaaaaaaaaaaaagaauu

SEQ ID NO: 14125 - RNA, 1714 nt, Artificial Sequence
  mRNA product Design a-1 (hSL-A64-N5) comprising derived and/or modified sequence from LASV(Togo/2016/7082;Clade VI)__AMR44577__GPC (opt5)
aggagagucccgcagucggcguccagcggcucugcuuguucgugugugugucguugcaggccuuauucaagcuuaccaugggccagaucauuaccuucuuucaagaggugccccacgucaucgaagagguuaugaacauugugcugaucgcccucagccugcuugcuauucugaaggggguguacaaugucgccacaugcggaaucaucggccucgugacguuccuguuucuuugugggagauccugcucucugauuuauaaaggaagcuacgaacuccagacccuggagcugaacauggaaacacucaauaugaccaugccucuguccuguacaaagaacucuagccaucacuauauccggguuggcaaugagaccgggcuugagcugacacucaccaacacguccauuaucaaucauaaauucugcaaccugucugacgcgcacaagcgcaaucuuuacgaucaugcucugaugagcauucucuccaccuuucaccugagcaucccgaacuucaaucaguaugaagccaugucuugugacuuuaacggaggcaaaauuuccgugcaguacaaucugagccacgccuaugcugucgaugccgcugagcauugcggcacaguggccaacgggguucuccaaaccuucaugagaauggcguggggaggcucuuacaucgcccuggacuccgggcggggaaauugggauuguaucaugacaagcuaccaguaucuuauuauccagaacaccacgugggaagaccacugccaguuuucucgccccuccccuauuggcuaccuggggcuccugagccaaagaacacgggauaucuauauuucccgcagacuucugggaaccuucacauggacccucucugacagcgagggcaacgagacccccggcggguacugucugacacgguggaugcugaucgaagcugagcucaagugcuuuggaaauacggccguggcuaaguguaacgaaaaacaugaugaggaguucugcgacaugcugcgccuuuuugauuucaauaagcaggccauccagagacugaaauccgaagcgcagaugagcauucaacucaucaacaaggccgucaaugcucugauuaacgaccagcuuaucaugaaaaaucaucugcgggauaugaugggcauuccuuauugcaacuacucuaaguauugguaccucaaucacaccuccagcgggcgcacaucucugcccaaguguuggcuggugagcaacggauccuaccucaaugagacccacuucucugacgacaucgaacagcaagccgauaacaugaucacagagaugcugcagaaagaauauauugacagacagggcaagaccccucuugggcugguggaucucuuugucuucagcacguccuuuuaccugaucagcauuuuccugcaccuuaucaaaauuccgacacaucggcacaucguuggaaagcccugcccuaaaccccaucgccucaaucacaugggcauuuguucuugcggccuguauaagcagccuggggugcccaccagauggaaacggugaggacuagucccuguucccagagcccacuuuuuuuucuuuuuuugaaauaaaauagccugucuuucagaucucaaaggcucuuuucagagccaccaaaaaaaaaaaaaaaaaaaaaaaaaaaaaaaaaaaaaaaaaaaaaaaaaaaaaaaaaaaaaaaaagaauu

SEQ ID NO: 14126 - RNA, 1714 nt, Artificial Sequence
  mRNA product Design a-1 (hSL-A64-N5) comprising derived and/or modified sequence from LASV(KAK-428;Clade n.d. (VII))__ANH09740__GPC (opt5)
aggagagucccgcagucggcguccagcggcucugcuuguucgugugugugucguugcaggccuuauucaagcuuaccaugggccagaucgugaccuucuuucaagaggucccccacguuauugaagaggugaugaacaucgugcugauugcccucagccugcuugcuauccugaaggggcucuacaauuucgccacaugcggagucauuggccugaucacguuucuucugcucugugggagauccugcucugcgaccuauaaaggacaguacgaacugcagacacuggagcucaacauggaaagccugaauaugaccaugccucuuuccuguacaaagaacaauucucaucacuauauccgggcuggcaacaauaccgggcuggagcucacacugaccaacacgagcauuaucucccauaaauucugcaaucuuucugacgcccacaagaaaaaccuguacgaucauacccucaugagcauuaucacaaccuuucaccuguccauuccgaauuucaaccaguaugaggccaugagcugugacuuuaauggaggcaagaucucuauucaauacaaccugucccacagcuaugcuggcgaugccgcucagcauugcgggacaguggccaauggaguucuccagaccuucaugcgcauggcguggggcgggucuuaccuggcccuugacuccggaagacggggcugggauuguaucaucagcucuuaccaguaucugauuauccaaaacacgacaugggacgaucacugccaguuuucccgccccagcccuauuggguaccucggauucgugucccagaagaccagagacaucuauauuucucggcgccugcuuggcacauuuaccuggacccugagcgauuccgaaggccaugacaugcccgggggauacugucucacaagauggaugcugaucgaggcugaucugaaaugcuucggcaacacggccgucgcuaaguguaaugaaaaacacgacgaggaguuuugcgauauguggcgccucuucgacuucaacaagcaggccauccaacggcugaaagcggaagcccagaugaauauucagcuuaucaacaaggcugugaaugcccugauuaacgaccaacucaugaugaagaaucaccugagagauaucauggggauuccuuauugcaacuacagcaaauuuugguaucuuaauaacaccacaaccggacggacaucucugccccgcuguuggcucaucuccaauggcagcuaccugaacgagacccauuucucugacgauaucgaacagcaggcugacaauaugauuacggagaugcugcagaaggaauacauggauagacaagggaaaacaccucucggacugguugaccuuuuuguguucagcaccuccuuuuaucugaucaccauuuuccuccaccuggucaagaucccgacacaucggcacauugugggcaaacccugcccuaagccccaucgccugaaccacaugggcaucuguucuugcgggcuuuacaaacagccuggagugcccgucagauggaagcggugaggacuagucccuguucccagagcccacuuuuuuuucuuuuuuugaaauaaaauagccugucuuucagaucucaaaggcucuuuucagagccaccaaaaaaaaaaaaaaaaaaaaaaaaaaaaaaaaaaaaaaaaaaaaaaaaaaaaaaaaaaaaaaaaagaauu

SEQ ID NO: 14127 - RNA, 1714 nt, Artificial Sequence; identical to SEQ ID NO: 14121
  mRNA product Design a-1 (hSL-A64-N5) comprising derived and/or modified sequence from LASV(Pinneo-NIG-1969;Clade I)__AIT17836__GPC (opt5)

SEQ ID NO: 14128 - RNA, 1714 nt, Artificial Sequence
  mRNA product Design a-1 (hSL-A64-N5) comprising derived and/or modified sequence from LASV(ISTH0009-NIG-2011;Clade II)__AIT17404__GPC (opt5)
aggagagucccgcagucggcguccagcggcucugcuuguucgugugugugucguugcaggccuuauucaagcuuaccaugggccagaucauuaccuucuuucaagaggugccccacgucaucgaagagguuaugaacauugugcugaucgcccucagccugcuugcuauucugaaggggaucuacaauguggccacaugcggacucuucggccuggucuccuuucuucugcucugugggagaucuugcagcacgaccuauaaaggaguguacgaacugcagacacuggagcucgacauggcgucccugaacaugaccaugccucuuucuuguacaaagaauaacagccaucacuauaucaugguuggcaaugaaaccgggcuggagcucacacugaccaacacguccauuaucaaucauaaauucugcaaccuuucugaugcucacaagaaaaaucuguacgaccaugcccucaugagcauuaucuccaccuuucaccugagcauuccgaacuucaaucaguaugaggccaugucuugugauuuuaacggaggcaagaucuccgugcaguacaaucugagccacgcuuaugccgucgacgcugccaaccauugcggcacaauugcgaauggggugcuccaaaccuucaugcggauggccuggggaggcucuuacaucgcucuggauuccgggaagggaagcugggacuguaucaugacaucuuaccaguaucuuauuauccagaacaccacgugggaagaucacugccaguuuucccgccccagcccuauuggcuaccuggggcuccugucccaaagaacacgggacaucuauauuucucgcagacuucugggaaccuucacauggacccucagcgauuccgagggcaacgaaacccccggcggguacugucugacacgguggaugcugaucgaggccgagcucaaaugcuuuggaaauacggcuguugccaaguguaacgaaaaacaugacgaggaguucugcgauaugcugcgccuuuuugacuucaauaagcaggcgaucagacggcugaaaaccgaagcccagaugagcauucagcucaucaacaaggcugugaaugcccugauuaacgaucaacuuaucaugaagaaucaucugcgcgacauuaugggcaucccuuauugcaacuacucuaaauauugguaccucaaucacacagucaccgggaagacaucccugcccagauguuggcuggugagcaacggaucuuaccucaaugaaacccacuucagcgacgauaucgagcagcaggcugacaacaugauuacggagcugcuucaaaaagaauauauggaucggcagggcaagacaccucuggggcucguggaccuguuugucuucuccaccucuuuuuaccugaucagcauuuuccuucaccucaucaaaauuccgacccaucgccacaucacaggaaagcccugcccuaaaccccauagacugaaucacaugggcauuuguuccugcggccuguauaagcacccugggguucccgugaaguggaaacggugaggacuagucccuguucccagagcccacuuuuuuuucuuuuuuugaaauaaaauagccugucuuucagaucucaaaggcucuuuucagagccaccaaaaaaaaaaaaaaaaaaaaaaaaaaaaaaaaaaaaaaaaaaaaaaaaaaaaaaaaaaaaaaaaagaauu

SEQ ID NO: 14129 - RNA, 1714 nt, Artificial Sequence
  mRNA product Design a-1 (hSL-A64-N5) comprising derived and/or modified sequence from LASV(ISTH2010-NIG-2012;Clade II)__AIT17482__GPC (opt5)
aggagagucccgcagucggcguccagcggcucugcuuguucgugugugugucguugcaggccuuauucaagcuuaccaugggccagaucauuaccuucuuucaagaggugccccacgucaucgaagagguuaugaacauugugcugaucgcccucagccugcuugcuauucugaaggggaucuacaauguggccacaugcggacucuucggccuggucuccuuucuucugcucugugggagaucuugcagcacgaccuauaaaggaguguacgaacugcagacacuggagcucgacauggcgucccugaacaugaccaugccucuuucuuguacaaagaauaacagccaucacuauaucaugguuggcaaugaaaccgggcuggagcucacacugaccaacacguccauuaucaaucauaaauucugcaaccuuucugaugcucacaagaaaaaucuguacgaccaugcccucaugagcauuaucuccaccuuucaccugagcauuccgaacuucaaucaguaugaggccaugucuugugauuuuaacggaggcaagaucuccgugcaguacaaucugagccacgcuuaugccgucgacgcugccaaccauugcggcacaauugcgaauggggugcuccaaaccuucaugcggauggccuggggaggcucuuacaucgcucuggauuccgggaagggaagcugggacuguaucaugacaucuuaccaguaucuuauuauccagaacauuaccugggaagaucacugccaguuuucccgccccagcccuaucggcuaccuggggcuccugucccaaagaacgcgggacauuuauaucucucgcagacuucugggaacauucaccuggacacucagcgauuccgagggcaacgaaacccccggcggguacugucugacccgguggaugcugaucgaggccgagcucaaaugcuuuggaaauacagcuguugccaaguguaacgaaaaacaugacgaggaguucugcgauaugcugcgccuuuuugacuucaauaagcaggcgauuagacggcugaaaacggaagcccagaugagcauccagcucauuaacaaggcugugaaugcccugaucaacgaucaacuuauuaugaagaaucaucugcgcgacaucaugggcaucccuuauugcaacuacucuaaauauugguaccucaaucacaccgucacagggaagaccucccugcccagauguuggcuggugagcaacggaucuuaccucaaugaaacacacuucagcgacgauauugagcagcaggcugacaacaugaucaccgagcugcuucaaaaagaauauauugaucggcagggcaagacgccucuggggcucguggaccuguuugucuucuccacaucuuuuuaccugaucagcauuuuccuucaccucguuaaaaucccgacccaucgccacguggugggaaagcccugcccuaaaccccauagacugaaucacaugggcauuuguuccugcggccuguauaagcacccugggguccccgugaaguggaaacggugaggacuagucccuguucccagagcccacuuuuuuuucuuuuuuugaaauaaaauagccugucuuucagaucucaaaggcucuuuucagagccaccaaaaaaaaaaaaaaaaaaaaaaaaaaaaaaaaaaaaaaaaaaaaaaaaaaaaaaaaaaaaaaaaagaauu

SEQ ID NO: 14130 - RNA, 1714 nt, Artificial Sequence
  mRNA product Design a-1 (hSL-A64-N5) comprising derived and/or modified sequence from LASV(Lassa virus/H.sapiens-wt/NGA/2015/ISTH_0543;Clade II)__AVO03639__GPC (opt5)
aggagagucccgcagucggcguccagcggcucugcuuguucgugugugugucguugcaggccuuauucaagcuuaccaugggccagaucauuaccuucuuucaagaggugccccacgucaucgaagagguuaugaacauugugcugaucgcccucagccugcuugcuauucugaaggggaucuacaauguggccacaugcggacucuucggccuggucuccuuucuucugcucugugggagaucuugcagcacgaccuauaaaggaguguacgaacugcagacacuggagcucgacauggcgaaccugaauaugaccaugccucuuuccuguacaaagaacaauucucaucacuauaucaugguuggcaacgaaaccgggcuggagcucacacugaccaauacgagcauuaucaaccauaaauucugcaaucuuuccgaugcucacaagaaaaaccuguacgaccaugcccucaugucuauuaucagcaccuuucaccuguccauuccgaauuucaaccaguaugaggccaugagcugugauuuuaauggaggcaagaucucugugcaguacaaccugucccacacauaugcugucgacgccgcuaaucauugcggcaccauugccaacggggugcuccaaacauucaugcggauggcguggggaggcagcuacaucgcccuggauucugggaagggauccugggacuguaucaugaccagcuaccaguaucuuguuauucagaacacgacaugggaagaucacugccaguuuucucgccccuccccuaucggcuaccuggggcuccugagccaaagaacccgggacauuuauaucucccgcagacuucugggaacauucaccuggacccucucugauagcgagggcaaugaaacacccggcggguacugucugacgcgguggaugcugauugaggcugagcucaaaugcuuuggaaacaccgccguggcuaaguguaaugaaaaacaugacgaggaguucugcgauaugcugcgccuuuuugacuucaacaagcaggccaucagacggcugaaaacagaagcgcagauguccauccagcucauuaauaaggccgucaacgcucugaucaaugaucaacuuauuaugaagaaccaucugcgcgacaucaugggcauuccuuauugcaauuacagcaaauauugguaccucaaccacaccgugacagggaagaccucucugcccagauguuggcugguguccaauggaagcuaccucaacgaaacgcacuucucugacgauaucgagcagcaggccgacaauaugaucacagagcugcuucaaaaagaauauauugaucggcagggcaagaccccucuggggcucgucgaccuguuuguuuucagcaccuccuuuuaccugaucucuauuuuccuucaccucgugaaaaucccgacacaucgccacauuaccggaaagcccugcccuaaaccccauagacugaaccacaugggcaucuguagcugcggccuguauaagcacccuggggugcccgucaaguggaaacggugaggacuagucccuguucccagagcccacuuuuuuuucuuuuuuugaaauaaaauagccugucuuucagaucucaaaggcucuuuucagagccaccaaaaaaaaaaaaaaaaaaaaaaaaaaaaaaaaaaaaaaaaaaaaaaaaaaaaaaaaaaaaaaaaagaauu

SEQ ID NO: 14131 - RNA, 1714 nt, Artificial Sequence
  mRNA product Design a-1 (hSL-A64-N5) comprising derived and/or modified sequence from LASV(Lassa virus/H.sapiens-wt/NGA/2016/ISTH_0009;Clade II)__AVO03571__GPC (opt5)
aggagagucccgcagucggcguccagcggcucugcuuguucgugugugugucguugcaggccuuauucaagcuuaccaugggccagaucauuaccuucuuucaagaggugccccacgucaucgaagagguuaugaacauugugcugaucgcccucagccugcuugcuauucugaaggggaucuacaauguggccacaugcggacuccugggccuugucuccuuccugcuccugugugggagaucuugcagcacgaccuauaaaggaguguacgaacugcagacacucgagcuggacauggcgucccuuaacaugaccaugccucugucuuguacaaagaauaacagccaucacuauaucaugguuggcaaugaaaccgggcucgagcugacacuuaccaacacguccauuaucaaucauaaauuuugcaaccugucugaugcucacaagaaaaaucucuacgaccaugcccugaugagcauuaucuccaccuuccaccugagcauuccgaacuuuaaucaguaugaggccaugucuugugauuucaacggaggccggaucuccgugcaguacaaucucagccacucuuaugcugucgacgccgcuaaccauugcggcacaauugccaauggggugcugcaaaccuuuaugcgcauggcguggggaggcuccuacaucgcccuugauagcgggaagggaucuugggacuguaucaugacauccuaccaguaucugauuauccagaacaccacgugggaagaucacugccaguucagcagacccuccccuauuggcuaccucgggcugcuuucucaacggacacgcgacaucuauauuagcagacggcugcucggaaccuuuacauggacccuguccgauagcgagggcaacgaaacccccggcggguacugucugacacgcuggaugcucaucgaggcugagcugaagugcuucggaaauacggccguugcuaaauguaacgaaaagcaugacgaggaauuuugcgauaugcuuagacuguucgacuuuaauaaacaggccauccggcgccucaagaccgaggcgcagaugucuauucagcugaucaacaaagccgugaaugcucuuauuaacgaucaacugaucaugaagaaucaccucagagacauuaugggcaucccuuauugcaacuacuccaaguauugguaccugaaucacacagucaccgggaaaacaagccugccccgguguuggcucgugucuaacggaagcuaccugaaugaaacccauuucuccgacgauaucgagcagcaggccgacaacaugauuacggagcuucugcaaaaggaauauaucgaucgccagggcaaaacaccucucgggcugguggaccuguucgucuuuucuaccagcuucuaccuuauuuccaucuuucuccaccugguuaagauuccgacccauagacacaucacaggaaaacccugcccuaagccccaucggcugaaucacaugggcauuuguagcugcggccucuauaaccacccuggggugcccgugaaauggaagcgcugaggacuagucccuguucccagagcccacuuuuuuuucuuuuuuugaaauaaaauagccugucuuucagaucucaaaggcucuuuucagagccaccaaaaaaaaaaaaaaaaaaaaaaaaaaaaaaaaaaaaaaaaaaaaaaaaaaaaaaaaaaaaaaaaagaauu

SEQ ID NO: 14132 - RNA, 1714 nt, Artificial Sequence
  mRNA product Design a-1 (hSL-A64-N5) comprising derived and/or modified sequence from LASV(Lassa virus/H.sapiens-wt/NGA/2016/ISTH_0017;Clade II)__AVO03567__GPC (opt5)
aggagagucccgcagucggcguccagcggcucugcuuguucgugugugugucguugcaggccuuauucaagcuuaccaugggccagaucauuaccuucuuucaagaggugccccacgucaucgaagagguuaugaacauugugcugaucgcccucagccugcuugcuauucugaaggggaucuacaauguggccacaugcggacucuucggccuggucuccuuucuucugcucugugggagaucuugcagcacgaccuauaaaggaguguacgaacugcagacacuggagcucgacauggcgucccugaacaugaccaugccucuuucuuguacaaagaauaacagccaucacuauaucaugguuggcaaugaaaccgggcuggagcucacacugaccaacacguccauuaucaaucauaaauucugcaaccuuucugaugcucacaagaaaaaucuguacgaccaugcccucaugagcauuaucuccaccuuucaccugagcauuccgaacuucaaucaguaugaggccaugucuugugauuuuaacggaggcaagaucuccgugcaguacaaucugagccacacauaugcuauugacgccgcuaaccauugcggcaccaucgccaaugggguccuccaaacauucaugcggauggcguggggaggcucuuacaucgcccuggauuccgggaagggaagcugggacuguauuaugaccucuuaccaguaucuuaucauucagaacacgacaugggaagaucacugccaguuuucccgccccagcccuaucggcuaccuggggcuccugucccaaagaacccgggacauuuauaucucucgcagacuucugggaacauucaccuggacccucagcgauuccgagggcaacgaaacacccggcggguacugucugacgcgguggaugcugaucgaggcugagcucaaaugcuuuggaaauaccgccguggcuaaguguaacgaaaaacaugacgaggaguucugcgauaugcugcgccuuuuugacuucaauaagcaggccauuagacggcugaaaacagaagcgcagaugagcauccagcucauuaacaaggccguuaaugcucugaucaacgaucaacuuauuaugaagaaucaucugcgcgacaucaugggcaucccuuauugcaacuacucuaaauauugguaccucaaucacaccgugacagggaagaccucccugcccagauguuggcuggucagcaacggaucuuaccucaaugaaacgcacuucagcgacgauauugagcagcaggccgacaacaugaucacagagcugcuucaaaaagaauauauggaucggcagggcaagaccccucuggggcucguggaccuguuuguguucuccaccucuuuuuaccugauuagcaucuuccuucaccucguccgcauuccgacacauagacacguuaucggaaaacccugcccuaagccccaucggcugaaucacaugggcauuuguuccugcggccuguauaaacacccuggggugcccgugaaguggaagcgcugaggacuagucccuguucccagagcccacuuuuuuuucuuuuuuugaaauaaaauagccugucuuucagaucucaaaggcucuuuucagagccaccaaaaaaaaaaaaaaaaaaaaaaaaaaaaaaaaaaaaaaaaaaaaaaaaaaaaaaaaaaaaaaaaagaauu

SEQ ID NO: 14133 - RNA, 1714 nt, Artificial Sequence
  mRNA product Design a-1 (hSL-A64-N5) comprising derived and/or modified sequence from LASV(Lassa virus/H.sapiens-wt/NGA/2018/ISTH_0959;Clade II)__AVV65099__GPC (opt5)
aggagagucccgcagucggcguccagcggcucugcuuguucgugugugugucguugcaggccuuauucaagcuuaccaugggccagaucauuaccuucuuucaagaggugccccacgucaucgaagagguuaugaacauugugcugaucgcccucagccugcuugcuauucugaaggggaucuacaauguggucacaugcggacucuucggccugguguccuuucuucugcucugugggagaucuugcagcacgaccuauaaaggaguuuacgaacugcagacacuggagcucgacauggccucccugaacaugaccaugccucuuucuuguacaaagaauaacagccaucacuauaucauggugggcaaugaaaccgggcuggagcucacacugaccaacacguccauuaucaaucauaaauucugcaaccuuucugaugcgcacaagaaaaaucuguacgaccaugcucucaugagcauuaucuccaccuuucaccugagcauuccgaacuucaaucaguaugaggccaugucuugugauuuuaacggaggcaagaucuccguccaguacaaucugagccacgccuaugcuauugacgccgcuaaccauugcggcacaaucgccaauggggugcuccaaaccuucaugcggauggcguggggaggcucuuacaucgcccuggauuccgggaagggaagcugggacuguauuaugacaucuuaccaguaucuuaucauucagaacaccacgugggaagaucacugccaguuuucccgccccagcccuaucggcuaccuggggcuccugucccaaagaacacgggacauuuauaucucucgcagacuucugggaaccuucacauggacccucagcgauuccgagggcaacgaaacccccggcggguacugucugacacgguggaugcugaucgaggcugagcucaaaugcuuuggaaauacggccguugcuaaguguaacgaaaaacaugacgaggaguucugcgauaugcugcgccuuuuugacuucaauaagcaggccauuagacggcugaaaaccgaagcgcagaugagcauccagcucauuaacaaggccgugaaugcucugaucaacgaucaacuuauuaugaagaaucaucugcgcgacaucaugggcaucccuuauugcaacuacucuaaauauugguaccucaaucacacagucaccgggaagacaucccugcccagauguuggcuggugagcaacggaucuuaccucaaugaaacccacuucagcgacgauauugagcagcaggccgacaacaugaucacggagcugcuucaaaaagaauauauugaucggcagggcaagacaccucuggggcucguggaccuguuugucuucuccaccucuuuuuaccugaucagcauuuuccuucaccucguuaaaaucccgacccaucgccacgugauuggaaagcccugcccuaaaccccauagacugaaucacaugggcaucuguuccugcggccuguauaagcacccuggggugcccgucaaguggaaacggugaggacuagucccuguucccagagcccacuuuuuuuucuuuuuuugaaauaaaauagccugucuuucagaucucaaaggcucuuuucagagccaccaaaaaaaaaaaaaaaaaaaaaaaaaaaaaaaaaaaaaaaaaaaaaaaaaaaaaaaaaaaaaaaaagaauu

SEQ ID NO: 14134 - RNA, 1714 nt, Artificial Sequence
  mRNA product Design a-1 (hSL-A64-N5) comprising derived and/or modified sequence from LASV(LASV003-NIG-2008;Clade II)__AIT17580__GPC (opt5)
aggagagucccgcagucggcguccagcggcucugcuuguucgugugugugucguugcaggccuuauucaagcuuaccaugggccagaucauuaccuucuuucaagaggugccccacgucaucgaagagguuaugaacauugugcugaucgcccucagccugcuugcuauucugaaggggaucuacaauguggccacaugcggacucuucggccuggucuccuuucuucugcucugugggagaucuugcagcacgaccuauaaaggaguguacgaacugcagacacuggagcucgacauggcgucccugaacaugaccaugccucuuucuuguacaaagaauaacagccaucacuauaucaugguuggcaaugaaaccgggcuggagcucacacugaccaacacguccauuaucaaucauaaauucugcaaccuuucugaugcucacaagaaaaaucuguacgaccaugcccucaugagcauuaucuccaccuuucaccugagcauuccgaacuucaaucaguaugaggccaugucuugugauuuuaacggaggcaagaucuccgugcaguacaaucugagccacacauaugcugucgacgccgcuaaccauugcggcaccauugccaauggggugcuccaaacauucaugcggauggcguggggaggcucuuacaucgcccuggauuccgggaagggaagcugggacuguaucaugaccucuuaccaguaucuuauuauccagaacacgacaugggaagaucacugccaguuuucccgccccagcccuauuggcuaccuggggcuccugucccaaagaacccgggacaucuauauuucucgcagacuucugggaacauucaccuggacccucagcgauuccgagagcaacgaaacacccggcggcuacugucugacgcgguggaugcugaucgaggcugagcucaaaugcuuugggaauaccgccguugcuaaguguaacgaaaaacaugacgaggaguucugcgauaugcugcgccuuuuugacuucaauaagcaggccaucagacggcugaaagcggaagcccagaugucuauucagcucaucaacaaggcugugaaugcccugauuaacgaucaacuuaucaugaagaaucaucugcgcgacauuaugggaaucccuuauugcaacuacuccaaauauugguaccucaaucacacagucaccggcagaacaagccugccccgguguuggcuggugucuaacgggagcuaccucaaugaaacccacuucuccgacgauaucgagcagcaggcugacaacaugauuacggagcugcuucaaaaggaauauauggaucgccagggaaaaacaccucugggccucguggaccuguuugucuucucuaccagcuuuuaccugaucuccauuuuccuucaccucguuaagaucccgacccauagacacgugauugggaaacccugcccuaagccccaucggcugaaucacaugggaaucuguagcugcggccuguauaaacacccuggcgugcccgucaaguggaagcgcugaggacuagucccuguucccagagcccacuuuuuuuucuuuuuuugaaauaaaauagccugucuuucagaucucaaaggcucuuuucagagccaccaaaaaaaaaaaaaaaaaaaaaaaaaaaaaaaaaaaaaaaaaaaaaaaaaaaaaaaaaaaaaaaaagaauu

SEQ ID NO: 14135 - RNA, 1714 nt, Artificial Sequence
  mRNA product Design a-1 (hSL-A64-N5) comprising derived and/or modified sequence from LASV(LASV035-NIG-2009;Clade II)__AIT17588__GPC (opt5)
aggagagucccgcagucggcguccagcggcucugcuuguucgugugugugucguugcaggccuuauucaagcuuaccaugggccagaucauuaccuucuuucaagaggugccccacgucaucgaagagguuaugaacauugugcugaucgcccucagccugcuugcuauucugaaggggaucuacaauguggccacaugcggacucuucggccuggucuccuuucuucugcucugugggagaucuugcagcacgaccuauaaaggaguguacgaacugcagacacuggagcucgacauggcgucccugaacaugaccaugccucuuucuuguacaaagaauaacagccaucacuauaucaugguuggcaaugaaaccgggcuggagcucacacugaccaacacguccauuaucaaucauaaauucugcaaccuuucugaugcucacaagaaaaaucuguacgaccaugcccucaugagcauuaucuccaccuuucaccugagcauuccgaacuucaaucaguaugaggccaugucuugugauuuuaacggaggcaagaucuccgugcaguacaaucugagccacgcuuaugccgucgacgcugccaaccauugcggcacaauugcgaauggggugcuccaaaccuucaugcggauggccuggggaggcucuuacaucgcucuggauuccgggaagggaagcugggacuguaucaugacaucuuaccaguaucuuauuauccagaacaccacgugggaagaucacugccaguuuucccgccccagcccuauuggcuaccuggggcuccugucccaaagaacacgggacaucuauauuucucgcagacuucugggaaccuucacauggacccucagcgauuccgagggcaacgaaacccccggcggguacugucugacacgguggaugcugaucgaggccgagcucaaaugcuuuggaaauacggcuguugccaaguguaacgaaaaacaugacgaggaguucugcgauaugcugcgccuuuuugacuucaauaagcaggcgaucagacggcugaaagccgaagcucagaugagcauucagcucaucaacaaggccgugaaugcucugauuaacgaucaacuuaucaugaagaaucaucugcgcgacauuaugggcaucccuuauugcaacuacucuaaauauugguaccucaaucacaccgucacagggaagaccucccugcccagauguuggcuggugagcaacggaucuuaccucaaugaaacacacuucagcgacgauaucgagcagcaggccgacaacaugauuaccgagcugcuucaaaaagaauauaucgaucggcagggcaagacgccucuggggcucguggaccuguuugucuucuccacaucuuuuuaccugauuagcaucuuccuucaccucguuaaaauuccgacccaucgccacgugaucggaaagcccugcccuaaaccccauagacugaaucacaugggcauuuguuccugcggccuguauaagcacccuggggugcccgucaaguggaaacggugaggacuagucccuguucccagagcccacuuuuuuuucuuuuuuugaaauaaaauagccugucuuucagaucucaaaggcucuuuucagagccaccaaaaaaaaaaaaaaaaaaaaaaaaaaaaaaaaaaaaaaaaaaaaaaaaaaaaaaaaaaaaaaaaagaauu

SEQ ID NO: 14136 - RNA, 1714 nt, Artificial Sequence
  mRNA product Design a-1 (hSL-A64-N5) comprising derived and/or modified sequence from LASV(LASV1000-NIG-2009;Clade II)__AIT17782__GPC (opt5)
aggagagucccgcagucggcguccagcggcucugcuuguucgugugugugucguugcaggccuuauucaagcuuaccaugggccagaucauuaccuucuuucaagaggugccccacgucaucgaagagguuaugaacauugugcugaucgcccucagccugcuugcuauucugaaggggaucuacaauguggccacaugcggacucuucggccuggucuccuuucuucugcucugugggagaucuugcagcacgaccuauaaaggaguguacgaacugcagacacuggagcucgacauggcgucccugaacaugaccaugccucuuucuuguacaaagaauaacagccaucacuauaucaugguuggcaaugaaaccgggcuggagcucacacugaccaacacguccauuaucaaucauaaauucugcaaccuuucugaugcucacaagaaaaaucuguacgaccaugcccucaugagcauuaucuccaccuuucaccugagcauuccgaacuucaaucaguaugaggccaugucuugugauuuuaacggaggcaagaucuccgugcaguacaaucugagccacacauaugcugucgacgccgcuaaccauugcggcaccauugccaauggggugcuccaaacauucaugcggauggcguggggaggcucuuacaucgcccuggauuccgggaagggaagcugggacuguaucaugaccucuuaccaguaucuuauuauccagaacacgacaugggaagaucacugccaguuuucccgccccagcccuauuggcuaccuggggcuccugucccaaagaacccgggacaucuauauuucucgcagacuucugggaacauucaccuggacccucagcgauuccgagggcaacgaaacacccggcggguacugucugacgcgguggaugcugaucgaggcugagcucaaaugcuuuggaaauaccgccguugcuaaguguaacgaaaaacaugacgaggaguucugcgauaugcugcgccuuuuugacuucaauaagcaggccaucaaaagacugaagacagaagcgcagaugagcauucagcucaucaacaaggccgugaaugcucugauuaacgaucaacuuaucaugaaaaaucaucugcgggacauuaugggcaucccuuauugcaacuacucuaaguauugguaccucaaucacaccgucacagggaaaaccucccugccccgcuguuggcuggugagcaacggaucuuaccucaaugaaacgcacuucagcgacgauaucgagcagcaggccgacaacaugauuacagagcugcuucaaaaggaauauaucgauagacagggcaaaaccccucuggggcucguggaccuguuugucuucuccaccucuuuuuaccugauuagcaucuuccuucaccucguuaagauuccgacacaucggcacguggugggaaaacccugcccuaagccccaucgccugaaucacaugggcaucuguuccugcggccuguauaagcacccugggguccccgugaaauggaagagaugaggacuagucccuguucccagagcccacuuuuuuuucuuuuuuugaaauaaaauagccugucuuucagaucucaaaggcucuuuucagagccaccaaaaaaaaaaaaaaaaaaaaaaaaaaaaaaaaaaaaaaaaaaaaaaaaaaaaaaaaaaaaaaaaagaauu

SEQ ID NO: 14137 - RNA, 1714 nt, Artificial Sequence
  mRNA product Design a-1 (hSL-A64-N5) comprising derived and/or modified sequence from LASV(LASV221-NIG-2010;Clade II)__AIT17624__GPC (opt5)
aggagagucccgcagucggcguccagcggcucugcuuguucgugugugugucguugcaggccuuauucaagcuuaccaugggccagaucauuaccuucuuucaagaggugccccacgucaucgaagagguuaugaacauugugcugaucgcccucagccugcuugcuauucugaaggggaucuacaauguggccacaugcggacucuucggccuggucuccuuucuucugcucugugggagaucuugcagcacgaccuauaaaggaguguacgaacugcagacacuggagcucgacauggcgucccugaacaugaccaugccucuuucuuguacaaagaauaacagccaucacuauaucaugguuggcaaugaaaccgggcuggagcucacacugaccaacacguccauuaucaaucauaaauucugcaaccuuucugaugcucacaagaaaaaucuguacgaccaugcccucaugagcauuaucuccaccuuucaccugagcauuccgaacuucaaucaguaugaggccaugucuugugauuuuaacggaggcaagaucuccgugcaguacaaucugagccacacauaugcuauugacgccgcuaaccauugcggcaccaucgccaaugggguccuccaaacauucaugcggauggcguggggaggcucuuacaucgcccuggauuccgggaagggaagcugggacuguauuaugaccucuuaccaguaucuuaucauucagaacacgacaugggaagaucacugccaguuuucccgccccagcccuaucggcuaccuggggcuccugucccaaagaacccgggacauuuauaucucucgcagacuucugggaacauucaccuggacccucagcgauuccgagggcaacgaaacacccggcggguacugucugacgcgguggaugcugaucgaggcugagcucaaaugcuuuggaaauaccgccguggcuaaguguaacgaaaaacaugacgaggaguucugcgauaugcugcgccuuuuugacuucaauaagcaggccauuagacggcugaaaacagaagcgcagaugagcauccagcucauuaacaaggccguuaaugcucugaucaacgaucaacuuauuaugaagaaucaucugcgcgacaucaugggcaucccuuauugcaacuacucuaaauauugguaccucaaucacaccgugacagggaagaccucccugcccagauguuggcuggucagcaacggaucuuaccucaaugaaacgcacuucagcgacgauauugagcagcaggccgacaacaugaucacagagaugcugcaaaaagaauauauggaucggcagggcaagaccccucuugggcugguggaccucuuuguguucuccaccucuuuuuaccugauuagcaucuuccugcaccuugucaaaauuccgacacaucgccacguuaucggaaagcccugcccuaaaccccauagacucaaucacaugggcauuuguuccugcggccuguauaagcacccuggggugcccgugaaguggaaacggugaggacuagucccuguucccagagcccacuuuuuuuucuuuuuuugaaauaaaauagccugucuuucagaucucaaaggcucuuuucagagccaccaaaaaaaaaaaaaaaaaaaaaaaaaaaaaaaaaaaaaaaaaaaaaaaaaaaaaaaaaaaaaaaaagaauu

SEQ ID NO: 14138 - RNA, 1714 nt, Artificial Sequence
  mRNA product Design a-1 (hSL-A64-N5) comprising derived and/or modified sequence from LASV(LASV237-NIG-2010;Clade II)__AIT17638__GPC (opt5)
aggagagucccgcagucggcguccagcggcucugcuuguucgugugugugucguugcaggccuuauucaagcuuaccaugggccagaucauuaccuucuuucaagaggugccccacgucaucgaagagguuaugaacauugugcugaucgcccucagccugcuugcuauucugaaggggaucuacaauguggccacaugcggacucuucggccuggucuccuuucuucugcucugugggagaucuugcagcacgaccuauaaaggaguguacgaacugcagacacuggagcucgacauggcgucccugaacaugaccaugccucuuucuuguacaaagaauaacagccaucacuauaucaugguuggcaaugaaaccgggcuggagcucacacugaccaacacguccauuaucaaucauaaauucugcaaccuuucugaugcucacaagaaagaccuguacgaucaugcccucaugagcauuaucuccaccuuucaccugagcauuccgaauuucaaccaguaugaggccaugucuugugacuuuaauggaggcaagaucuccgugcaguacaaccugagccacacauaugcugucgaugccgcuaaucauugcggcaccauugccaacggggugcuccaaacauucaugcggauggcguggggaggcucuuacaucgcccuggacuccgggaagggaagcugggauuguaucaugaccucuuaccaguaucuuauuauccagaauacgacaugggaagaccacugccaguuuucccgccccagcccuauuggcuaccuggggcuccugucccaaagaacccgggauaucuauauuucucgcagacuucugggaacauucaccuggacccucagcgacuccgagggcaacgaaacacccggcggguacugucugacgcgguggaugcugaucgaggcugagcucaaaugcuuuggaaacaccgccguugcuaaguguaaugaaaaacaugaugaggaguucugcgacaugcugcgccuuuuugauuucaacaagcaggccaucagacggcugaaaacagaagcgcagaugagcauucagcucaucaauaaggccgugaacgcucugauuaaugaccaacuuaucaugaagaaccaucugcgcgacauuaugggcaucccuuauugcaauuacucuaaauauugguaccucaaccacaccgucacagggaagaccucccugcccagauguuggcuggugagcaauggaucuuaccucaacgaaacgcacuucagcgaugacaucgagcagcaggccgauaauaugauuacagagcugcuucaaaaagaauauauggaccggcagggcaagaccccucuggggcucguggaucuguuugucuucuccaccucuuuuuaccugaucagcauuuuccuucaccucaucaaaauuccgacacaucgccacaucaccggaaagcccugcccuaaaccccauagacugaaccacaugggcauuuguuccugcggccuguauaagcacccugggguucccgugaaguggaaacggugaggacuagucccuguucccagagcccacuuuuuuuucuuuuuuugaaauaaaauagccugucuuucagaucucaaaggcucuuuucagagccaccaaaaaaaaaaaaaaaaaaaaaaaaaaaaaaaaaaaaaaaaaaaaaaaaaaaaaaaaaaaaaaaaagaauu

SEQ ID NO: 14139 - RNA, 1714 nt, Artificial Sequence
  mRNA product Design a-1 (hSL-A64-N5) comprising derived and/or modified sequence from LASV(LASV253-NIG-2011;Clade II)__AIT17670__GPC (opt5)
aggagagucccgcagucggcguccagcggcucugcuuguucgugugugugucguugcaggccuuauucaagcuuaccaugggccagaucauuaccuucuuucaagaggugccccacgucaucgaagagguuaugaacauugugcugaucgcccucagccugcuugcuauucugaaggggaucuacaauguggccacaugcggacucuucggccuggucuccuuucuucugcucugugggagaucuugcagcacgaccuauaaaggaguguacgaacugcagacacuggagcucgacauggcgucccugaacaugaccaugccucuuucuuguacaaagaauaacagccaucacuauaucaugguuggcaaugaaaccgggcuggagcucacacugaccaacacguccauuaucaaucauaaauucugcaaccuuucugaugcucacaagaaaaaucuguacgaccaugcccucaugagcauuaucuccaccuuucaccugagcauuccgaacuucaaucaguaugaggccaugucuugugauuuuaacggaggcaagaucuccgugcaguacaaucugagccacacauaugcugucgacgccgcuaaccauugcggcaccauugccaauggggugcuccaaacauucaugcggauggcguggggaggcucuuacaucgcccuggauuccgggaagggaagcugggacuguaucaugaccucuuaccaguaucuuauuauccagaacacgacaugggaagaucacugccaguuuucccgccccagcccuauuggcuaccuggggcuccugucccaaagaacccgggacaucuauauuucucgcagacuucugggaacauucaccuggacccucagcgauuccgagggcaacgaaacacccggcggguacugucugacgcgguggaugcugaucgaggcugagcucaaaugcuuuggaaauaccgccguugcuaaguguaacgaaaaacaugacgaggaguucugcgauaugcugcgccuuuuugacuucaauaagcaggccaucagacggcugaaagcggaagcccagaugagcauucagcucaucaacaaggcugugaaugcccugauuaacgaucaacuuaucaugaagaaucaucugcgcgacauuaugggcaucccuuauugcaacuacucuaaauauugguaccucaaucacacagucaccgggagaacaucccugccccgguguuggcuggugagcaacggaucuuaccucaaugaaacccacuucagcgacgauaucgagcagcaggcugacaacaugauuacggagcugcuucaaaaggaauauaucgaucgccagggcaaaacaccucuggggcucguggaccuguuugucuucuccaccucuuuuuaccugauuagcaucuuccuucaccucguuaagauuccgacccauagacacaucauuggaaaacccugcccuaagccccaucggcugaaucacaugggcaucuguuccugcggccuguauaaacacccuggggugcccgugaaguggaagcgcugaggacuagucccuguucccagagcccacuuuuuuuucuuuuuuugaaauaaaauagccugucuuucagaucucaaaggcucuuuucagagccaccaaaaaaaaaaaaaaaaaaaaaaaaaaaaaaaaaaaaaaaaaaaaaaaaaaaaaaaaaaaaaaaaagaauu

SEQ ID NO: 14140 - RNA, 1714 nt, Artificial Sequence
  mRNA product Design a-1 (hSL-A64-N5) comprising derived and/or modified sequence from LASV(LASV254-NIG-2011;Clade II)__AIT17674__GPC (opt5)
aggagagucccgcagucggcguccagcggcucugcuuguucgugugugugucguugcaggccuuauucaagcuuaccaugggccagaucauuaccuucuuucaagaggugccccacgucaucgaagagguuaugaacauugugcugaucgcccucagccugcuugcuauucugaaggggaucuacaauguggccacaugcggacucuucggccuggucuccuuucuucugcucugugggagaucuugcagcacgaccuauaaaggaguguacgaacugcagacacuggagcucgacaugaccaaccugaauaugacaaugccucuuuccuguaccaagaacaauucucaucacuauaucaugguuggcaacgaaacagggcuggagcucacccugacgaauaccagcauuaucaaccauaaauucugcaaucuuuccgaugcgcacaagaaaaaccuguacaaucaugcucucaugucuauuaucagcacauuucaccuguccauuccgaacuucaaucaguaugaggccaugagcugugacuuuaacggaggcaagaucucugugcaguacaaucugucccacagcuaugccgucgaugcugccaaccauugcggcaccauugcuaacggggugcuccaaacauucaugcggauggccuggggaggcucuuacaucgcgcuggacuccgggaagggaaauugggauuguaucaugaccagcuaccaguaucuuauuauccagaacacgacaugggaagaccacugccaguuuucucgccccuccccuauuggcuaccuggggcuccugagccaaagaacccgggauaucuauauuucccgcagacuucugggaacauucaccuggacccucucugacagcgagggcaaugaaacacccggcggguacugucugacgcgguggaugcugaucgaggccgagcucaaaugcuuuggaaacaccgcuguugccaaguguaaugaaaaacaugaugaggaguucugcgacaugcugcgccuuuuugauuucaacaagcaggcuaucagacggcugaaaacagaagcccaggcgaauauucagcucaucaacaaggccgugaaugcucugauuaacgaccaacuuaucaugaagaaucaucugcgcgauauuaugggcaucccuuauugcaacuacuccaaauauugguaccucaaucacaccgucacagggaagaccagccugcccagauguuggcuggugucuaacggauccuaccucaaugaaacgcacuucagcgacgacaucgagcagcaggccgauaacaugauuacagagcugcuucaaaaagaauauauggaccggcagggcaagaccccucuggggcucguggaucuguuugucuucucuaccagcuuuuaccugaucuccauuuuccuucaccucguuaaaaucccgacacaucgccacgugauuggaaagcccugcccuaaaccccauagacugaaccacaugggcaucuguucuugcggccuguauaagcacccuggggugcccgucaaguggaaacggugaggacuagucccuguucccagagcccacuuuuuuuucuuuuuuugaaauaaaauagccugucuuucagaucucaaaggcucuuuucagagccaccaaaaaaaaaaaaaaaaaaaaaaaaaaaaaaaaaaaaaaaaaaaaaaaaaaaaaaaaaaaaaaaaagaauu

SEQ ID NO: 14141 - RNA, 1714 nt, Artificial Sequence
  mRNA product Design a-1 (hSL-A64-N5) comprising derived and/or modified sequence from LASV(Nig08-A19;Clade III)__ADU56618__GPC (opt5)
aggagagucccgcagucggcguccagcggcucugcuuguucgugugugugucguugcaggccuuauucaagcuuaccaugggccagaucgugaccuucuuucaagaggucccccacguuauugaagaggugaugaacaucgugcugauugcccucagcauccuggcuauucuuaaggggcuguacaauaucgccacaugcggacucaucggccuggucacguuccuucugcucuccgggagaucuuguagcaugaccuauaaaggaguguacgaacugcagacacuggagcucaacaugaauacccugaacaugacaaugccucuuuccugcaccaagaauaacucucaucacuauauuaugguuggcaaugaaacagggcuggagcucacccugacgaacaccagccuucugcaucacaaauuuuguaaucucuccgacgcgcauaagaaaaaccuguacgaucacacacugaugucuaucauuagcaccuuccaccucuccaucccgaauuuuaaccaguaugaggcuaugagcugcgacuucaauggaggcaagauuacagugcaguacaaccugucucauuccuaugccaucgaugccgcuaaucacuguggcaccgucgccaacggggugcuucaaacguuuaugcggauggcuuggggaggcagcuacauugcccuggacucugggcgcggaaagugggauugcaucaugacauccuaccaguaucucaucauucagaacaccacaugggaagaccauugucaguucagcagacccucuccuaucggcuaccuggggcuucugucccaacggacccgcgauauuuauaucagcagacggcuccugggaaccuuuacauggacgcuguccgacucugagggcaaugaaacccccggcggguacugccucacacgcuggaugcugauugaggcggagcuuaaauguuucggaaacaccgccguugcuaagugcaaugaaaaacacgaugaggaauuuugugacaugcugagacucuucgauuuuaacaagcaggccauccggcgccugaaagcugaggcccagaugagcauccagcuuauuaauaaggcggugaacgcccugaucaaugaccaacucauuaugaagaaccaccugagagauaucaugggcauuccuuauugcaauuacuccaaauauugguaccugaaccauacaagcaccgggcggacgucucucccccgcugcuggcuggucuccaauggaagcuaccuuaacgaaacacacuucucugacgacaucgagcagcaggcugauaauaugaucaccgagaugcugcaaaaggaauaucucgacagacagggcaaaaccccucuggggcugguggaucuuuucguguuuagcacauccuucuaccucauuucuaucuuucugcaucuggucaagauuccgacccaccggcauaucguuggaaaacccuguccuaagccccaccgccucaaccacaugggcauuugcagcuguggccuguauaaacagccuggggugcccgugagauggaagcggugaggacuagucccuguucccagagcccacuuuuuuuucuuuuuuugaaauaaaauagccugucuuucagaucucaaaggcucuuuucagagccaccaaaaaaaaaaaaaaaaaaaaaaaaaaaaaaaaaaaaaaaaaaaaaaaaaaaaaaaaaaaaaaaaagaauu

SEQ ID NO: 14142 - RNA, 1717 nt, Artificial Sequence
  mRNA product Design a-1 (hSL-A64-N5) comprising derived and/or modified sequence from LASV(G1180-SLE-2010;Clade IV)__AIT17168__GPC (opt5)
aggagagucccgcagucggcguccagcggcucugcuuguucgugugugugucguugcaggccuuauucaagcuuaccaugggccagaucgugaccuucuuucaagaggucccccacguuauugaagaggugaugaacaucgugcugauugcccucagcauccuggcuguccuuaaggggcuguacaauuucgccacaugcggacucgugggccugcuuacguuucugcuccugugugggagauccugcaccgcgucucgguauaaaggaguuuacgaacugcagacacucgagcugaacauggaaacccuuaauaugacaaugccucugagcuguaccaagaacaauucccaucacuauauuauggugggcaacgagacagggcucgagcugacccuuacgaauaccucuaucaucaaccauaaauucugcaaucugagcgacgcucacaagaaaaaccucuacgaucaugcccugauguccauuaucucuacauuucaccugagcauuccgaauuucaaccaguaugaagccauguccugugacuuuaauggaggcaagaucagcguccaguacaaccucucucacuccuaugcuggcgaugccgcuaaucauugcgggaccguggccaacggaguucugcaaacauucaugcgcauggcguggggcgggagcuacauugcccuugacucuggacacggcuccugggauuguaucaugaccagcuaccaguaucugauuauccagaacacgacaugggaggaccauugccaguuuucuagacccuccccuaucggguaccucggacugcuuagccaacggacccgcgauauuuauaucuccagacggcugcucggcacauucaccuggacccugucugacagcgaaggcaaggauacacccgggggauacugucugacgcgcuggaugcucauugaggcugagcugaaaugcuuuggcaauaccgccguggcuaaguguaacgaaaaacacgacgaggaguucugcgauaugcuuagacuguuugacuucaauaagcaggccauccagcggcucaaagcggaagcccagauguccauucaacugaucaacaaggcugucaaugcccuuaucaacgaucagcugauuaugaagaaucaccuccgcgacaucauggggauuccuuauugcaacuacagcaaauauugguaccugaaucauacaaccacaggaaagaccucucugcccaaauguuggcucguguccaacggcagcuaccugaaugaaacgcacuucucugacgauaucgagcagcaagcugacaacaugauuacagagaugcuucagaaggaauauauggagagacaggggaaaaccccucugggacucguggaucuguuugucuucagcaccuccuuuuaccugaucucuaucuuccuucaucucguuaagauuccgacacaccggcauaucgugggcaaaagcugccccaagccucaccgccugaaucacaugggcauuuguuccugcgggcuguauaagcagcccggagugccugucaaauggaagagaugaggacuagucccuguucccagagcccacuuuuuuuucuuuuuuugaaauaaaauagccugucuuucagaucucaaaggcucuuuucagagccaccaaaaaaaaaaaaaaaaaaaaaaaaaaaaaaaaaaaaaaaaaaaaaaaaaaaaaaaaaaaaaaaaagaauu

SEQ ID NO: 14143 - RNA, 1717 nt, Artificial Sequence
  mRNA product Design a-1 (hSL-A64-N5) comprising derived and/or modified sequence from LASV(G1442-SLE-2011;Clade IV)__AIT17180__GPC (opt5)
aggagagucccgcagucggcguccagcggcucugcuuguucgugugugugucguugcaggccuuauucaagcuuaccaugggccagaucgugaccuucuuucaagaggucccccacguuauugaagaggugaugaacaucgugcugauugcccucagcauccuggcuguccuuaaggggcuguacaauguggccacaugcggacucauuggccugguuacguuccuucugcucugugggagauccugcaccacaacccuguauaaaggaguguacgaacugcagacacucgagcugaacauggaaacccuuaauaugacaaugccucugucuuguaccaagaacaauagccaucacuauauccgggucggcaacgagacggggcucgagcugacccuuacaaauaccuccaucauuaaccauaaauuuugcaaucugucugacgcgcacaagaaaaaccucuacgaucaugcucugaugagcaucauuuccacauuccaccugucuaucccgaauuuuaaccaguaugaagccaugagcugugacuucaauggaggcaagauuuccgugcaguacaaccucagccacucuuaugccggcgaugcugccaaucauugcgggaccguugcuaacggagugcugcaaacguuuaugcgcauggccuggggcggguccuacaucgcgcuugacagcggaagaggcaacugggauuguauuaugacaucuuaccaguaucugaucauccagaauaccacaugggacgaucacugccaguucucccggcccagcccuauuggguaccucggacugcuuucucaacgcaccagagacgucuauaucucccggcgccugcucggcaccuuuacauggacgcugagcgauuccgagggcaaggacacccccgggggauacugucugacaagauggaugcucauugaagccgagcugaaaugcuucggcaacaccgcuguggccaaguguaaugagaaacaugaugaagaguuuugcgacaugcuucggcuguucgauuuuaacaagcaggcuauccagcgccucaaagccgaagcgcagaugucuauucaacugaucaauaaggccgugaacgcucuuaucaaugaccagcugauuaugaagaaccaccucagagacaucauggggauuccuuauugcaauuacagcaaauauugguaccugaacaauacagccaccggaaagacgucccugcccaaauguuggcucaucagcaacggcucuuaccugaaugagacacacuucuccgaugacauugaacaggaggcugauaacaugaucaccgagaugcuucaaaaggaauauauggagcggcaggggaaaaccccucugggacucgucgaccuguucguuuuuagcacaucuuucuaccugaucagcauuuuucuucaucucgugaagaucccgacccaccgccauauugugggcaaauccugccccaagccucacagacugaaucauaugggcaucuguucuugcgggcuguauaagcagcccggagucccugugcgguggaaacgcugaggacuagucccuguucccagagcccacuuuuuuuucuuuuuuugaaauaaaauagccugucuuucagaucucaaaggcucuuuucagagccaccaaaaaaaaaaaaaaaaaaaaaaaaaaaaaaaaaaaaaaaaaaaaaaaaaaaaaaaaaaaaaaaaagaauu

SEQ ID NO: 14144 - RNA, 1717 nt, Artificial Sequence
  mRNA product Design a-1 (hSL-A64-N5) comprising derived and/or modified sequence from LASV(G3010-SLE-2013;Clade IV)__AIT17344__GPC (opt5)
aggagagucccgcagucggcguccagcggcucugcuuguucgugugugugucguugcaggccuuauucaagcuuaccaugggccagaucgugaccuucuuucaagaggucccccacguuauugaagaggugaugaacaucgugcugauugcccucagcauccuggcuguccuuaaggggcuguacaauuucgccacaugcggacucgugggccugguuacguuucuucugcucugugggagauccugcaccacaucucuguauaaaggaguguacgaacugcagacccucgagcugaacauggaaacacuuaauaugaccaugccucugagcuguacaaagaacaauucccaucacuauauuauggucggcaacgagaccgggcucgagcugacgcuuaccaauacaucuaucaucaaccauaaauucugcaaucugagcgacgcgcacaagaaaaaccucuacaaucaugcucugauguccauuaucucuaccuuucaccugagcauuccgaacuucaaucaguaugaagccauguccugugauuuuaacggaggcaagaucagcgugcaguacaaucucucucacuccuaugccggcgacgcugccagccauugcgggacaguugcuaacggagugcugcaaaccuucaugcggauggccuggggcgggucuuacauugcgcuugauuccggauacggcaagugggacuguaucaugacgagcuaucaguaccugauuauccagaacacaaccugggaggaucacugccaguuuucucgccccuccccuaucggguaucucggacugcuuagccaaagaacacgggacauuuacaucucccgcagacugcucggcaccuucaccuggacacugucugauagcgaaggcaaagacacgcccgggggauauugucugacccgguggaugcucauugaggccgagcugaagugcuuuggcaauacagcugucgccaaauguaacgaaaagcaugaugaggaguucugcgacaugcuucgccuguuugauuucaauaaacaggcuauccagagacucaagaccgaagcccagauguccauucaacugaucaacaaggcggugaaugcccuuaucaacgaccagcugauuaugaaaaaucaccuccgggauaucauggggauuccuuacugcaacuauagcaaguacugguaccugaaucacacaaccacgggaaaaacaucucugcccaaguguuggcucguguccaacggcagcuaucugaaugaaacccauuucucugacgacaucgagcagcaagcugauaacaugauuaccgagaugcuucagaaagaauacauggagcgccaggggaagacaccucugggacucgucgaccuguuuguuuucagcaccuccuuuuaucugaucucuaucuuccuucaccucgugaaaauuccgacacauagacacaucgugggcaagagcugccccaagccucaucggcugaaucacaugggcauuuguuccugcgggcuguacaaacagcccggagucccugugcgcuggaagagaugaggacuagucccuguucccagagcccacuuuuuuuucuuuuuuugaaauaaaauagccugucuuucagaucucaaaggcucuuuucagagccaccaaaaaaaaaaaaaaaaaaaaaaaaaaaaaaaaaaaaaaaaaaaaaaaaaaaaaaaaaaaaaaaaagaauu

SEQ ID NO: 14145 - RNA, 1717 nt, Artificial Sequence
  mRNA product Design a-1 (hSL-A64-N5) comprising derived and/or modified sequence from LASV(G502-SLE-2009;Clade IV)__AIT17126__GPC (opt5)
aggagagucccgcagucggcguccagcggcucugcuuguucgugugugugucguugcaggccuuauucaagcuuaccaugggccagaucgugaccuucuuucaagaggucccccacguuauugaagaggugaugaacaucgugcugauugcccucagcauccuggcuguccuuaaggggcuguacaauuucgccacaugcggacucgugggccugcuuacguuucugcuccugugugggagauccugcaccacaggacuguauaaaggcguuuacgaacuccagacccuggagcuuaacauggaaacacugaauaugaccaugccucucucuuguacaaagaacaauagccaucacuauauuaugguggggaacgagaccggacuggagcuuacgcugaccaauacauccaucaucaaccauaaauucugcaaucucucugacgcgcacaagaaaaaccuguacgaucaugcucugaugagcauuaucuccaccuuucaccucucuauuccgaauuucaaccaguaugaagccaugagcugugacuuuaauggcggcaagaucuccguccaguacaaccugagccacucuuaugccggggaugcugccgaccauugcggaacaguggcuaauggcguucuucaaaccuucaugcggauggccuggggaggguccuacauugcgcuggauagcggccgcgggagaugggacuguaucaugacgucuuaccaguaucucauuauccagaacacaaccugggaggaucacugccaguuuucccggcccagcccuaucggauaccugggccuucugucucaacgcacaagagacauuuauaucucccggcgccuccugggcaccuucaccuggacacugagcgauuccgaagggaaggacacgcccggaggcuacugucucaccagauggaugcugauugaggccgagcuuaaaugcuuugggaacacagcuguggccaaguguaaugaaaaacaugaugaggaguucugcgacaugcugcggcucuuugauuucaacaagcaggcuauccagcgccugaaagccgaagcgcagaugucuauucaacuuaucaauaaggccgucaacgcucugaucaaugaccagcucgugaugaagaaccaccugagagacauuaugggaaucccuuauugcaauuacagccgguauugguaccugaaccacaccacaaccggccgcacgucccuccccaaauguuggcuggugagcaaugggucuuaccuuaacgaaacacauuucuccgaugacauugagcagcaagccgauaauaugaucaccgagaugcugcagaaggaauauauggagagacagggaaaaaccccucucggccuggucgaccuguuuguuuucagcacaucuuuuuaccuuauuagcaucuuccuccaccuggugaagaucccgacccaucggcacauugugggcaaauccugccccaagccucaucgccugaaccacauggggaucuguucuugcggacucuauaaacagcccggcgucccugugaaguggaagagaugaggacuagucccuguucccagagcccacuuuuuuuucuuuuuuugaaauaaaauagccugucuuucagaucucaaaggcucuuuucagagccaccaaaaaaaaaaaaaaaaaaaaaaaaaaaaaaaaaaaaaaaaaaaaaaaaaaaaaaaaaaaaaaaaagaauu

SEQ ID NO: 14146 - RNA, 1717 nt, Artificial Sequence
  mRNA product Design a-1 (hSL-A64-N5) comprising derived and/or modified sequence from LASV(G733-SLE-2010;Clade IV)__AIT17154__GPC (opt5)
aggagagucccgcagucggcguccagcggcucugcuuguucgugugugugucguugcaggccuuauucaagcuuaccaugggccagaucgugaccuucuuucaagaggucccccacguuauugaagaggugaugaacaucgugcugauugcccucagcauccuggcuguccuuaaggggcuguacaauuucgccacaugcggaauugugggccucguuuccuuucugcuucugugugggagaucuugcacgaccagccucuauaaaggaguguacgaacugcagacacuggagcucaacauggaaacccugaauaugacaaugccucuuuccuguaccaagaacaauucucaucacuauaucauggucggcaacgagacagggcuggagcucacccugacgaauaccagcaucauuaaccauaaauucugcaaucuuuccgacgcgcacaagaaaaaccuguacgaucaugcucucaugucuaucauuagcacauuucaccuguccaucccgaauuucaaccaguaugaagccaugagcugugacuuuaauggaggcaagauuucugugcaguacaaccugucccacagcuaugccggcgaugcugccaaucauugcgggaccaucgcuaacggaguucuccaaacauucaugcggauggccuggggcgggucuuacauugcgcuggacuccggacgcgauagaugggacuguaucaugaccagcuaccaguaucuuaucauucagaacacgacaugggaggaucacugccaguuuucucggcccuccccuaucggcuaccuggggcuccugagccaacgcaccagagacauuuauaucucccggcgccuucugggaacauucaccuggacccucucugauagcgaaggcaaggacacacccggcggguacugucugacgagauggaugcugauugaggccgagcucaaaugcuuuggaaauaccgcuguggccaaguguaacgaaaaacaugaugaggaguucugcgacaugcugcggcuuuuugauuucaauaagcaggcuauccagcgccugaaagccgaagcgcagauguccauccaacucauuaacaaggccgucaaugcucugaucaacgaccagcuuauuaugaagaaucaccugagagacaucaugggcauuccuuauugcaacuacagcaaauauugguaccucaaucacacaaccacagggaagaccucucugcccaaauguuggcugguguccaacggaagcuaccucaaugaaacgcauuucucugaugacaucgagcagcaagccgauaacaugaucacagagaugcugcagaaggaauauauggagcggcagggcaaaaccccucuugggcugguggaccucuuugucuucagcaccuccuuuuaccugauuucuaucuuccugcaccuuguuaagauuccgacacaucgccacguggugggaaaaagcugccccaagccucauagacucaaucacaugggcaucuguuccugcggccuguaugggcagcccggagucccugugaaguggaaacggugaggacuagucccuguucccagagcccacuuuuuuuucuuuuuuugaaauaaaauagccugucuuucagaucucaaaggcucuuuucagagccaccaaaaaaaaaaaaaaaaaaaaaaaaaaaaaaaaaaaaaaaaaaaaaaaaaaaaaaaaaaaaaaaaagaauu

SEQ ID NO: 14147 - RNA, 1717 nt, Artificial Sequence
  mRNA product Design a-1 (hSL-A64-N5) comprising derived and/or modified sequence from MOPV/LASV reassortant(IGS-1;Clade IV)__AFY05576__GPC (opt5)
aggagagucccgcagucggcguccagcggcucugcuuguucgugugugugucguugcaggccuuauucaagcuuaccaugggccagaucgugaccuucuuucaagaggucccccacguuauugaagaggugaugaacaucgugcugauugcccucagcguccuggcugugcuuaaggggcuguacaauuucgccacaugcggacucguuggccuggugacguuucuucugcucugugggagauccugcaccacaucucuguauaaaggagucuacgaacugcagacccucgagcugaacauggaaacacuuaauaugaccaugccucugagcuguacaaagaacaauucccaucacuauaucauggugggcaacgagaccgggcucgagcugacgcuuaccaauacaucuauuaucaaccauaaauucugcaaucugagcgacgcgcacaagaaaaaccucuacgaucaugcucugauguccaucauuucuaccuuucaccugagcaucccgaauuucaaccaguaugaagccauguccugugacuuuaauggaggcaagauuagcguucaguacaaccucucucacuccuaugccggcgaugcugccaaucauugcgggacaguggcuaacggaguccugcaaaccuucaugcggauggccuggggcgggagcuacaucgcgcuugacucuggacgcggcaacugggauuguauuaugacguccuaccaguaucugaucauucagaauacaaccugggaggaccacugccaguuuagcagacccucuccuaucggguaccucggacugcuuucccaacggacacgcgauaucuauauuagcagacggcugcucggcaccuucaccuggacacuguccgacucugaaggcgaggauacgcccgggggauacugucugacccgcuggaugcucaucgaggccgaacugaagugcuuuggcaacacagcuguggccaaauguaaugagaagcaugacgaagaguucugcgauaugcuuagacuguuugacuucaacaaacaggcuauucagcggcucaaggccgaagcgcagaugagcauccaacugauuaauaaagccgugaacgcucuuaucaaugaucagcugaucaugaagaaccaccuccgcgacauuauggggaucccuuauugcaauuacuccaaguauugguaccugaaccacaccacaaccggaagaacgagccugcccaaauguuggcucgucucuaauggcuccuaccugaacgagacacauuucagcgacgauauugagcagcaagccgacaauaugaucaccgaaaugcuucagaaggaguauauggaacggcaggggaaaaccccucugggacucguugaucuguuuguguucucuaccagcuuuuaccugauuuccaucuuccuucaccucgugaagaucccgacacaucgccacauugucggcaaaucuugccccaagccucauagacugaaccacaugggcaucuguagcugcgggcuguauaaacagcccggagugccuguuaaguggaagcggugaggacuagucccuguucccagagcccacuuuuuuuucuuuuuuugaaauaaaauagccugucuuucagaucucaaaggcucuuuucagagccaccaaaaaaaaaaaaaaaaaaaaaaaaaaaaaaaaaaaaaaaaaaaaaaaaaaaaaaaaaaaaaaaaagaauu

SEQ ID NO: 14148 - RNA, 1717 nt, Artificial Sequence
  mRNA product Design a-1 (hSL-A64-N5) comprising derived and/or modified sequence from LASV(LM765-SLE-2012;Clade IV)__AIT17814__GPC (opt5)
aggagagucccgcagucggcguccagcggcucugcuuguucgugugugugucguugcaggccuuauucaagcuuaccaugggccagaucgugaccuucuuucaagaggucccccacguuauugaagaggugaugaacaucgugcugauugcccucagcauccuggcuguccuuaaggggcuguacaauuucgccacaugcggacucgugggccugguuacguuucuucugcucugugggagauccugcaccacaucucuguauaaaggaguguacgaacugcagacccucgagcugaacauggaaacacuuaauaugaccaugccucugagcuguacaaagaacaauucccaucacuauauuauggucggcaacgagaccgggcucgagcugacgcuuaccaauacaucuaucaucgaccauaaauucugcaaccugagcgaugcgcaccggaagaaucucuacgaccaugcucugauguccauuaucucuaccuuucaccugagcauuccgaacuucaaucaguaugaagccauguccugugauuuuaacggaggcaaaaucagcgugcaguacaaucucucucacuccuaugccaaggacgcugccgaucauugcggcacaguugcuaacggggugcugcaaaccuucaugcgcauggccuggggaggcagcuacauugcgcuugacucugggagaggacggugggauuguaucaugacguccuaccaguaucugauuauccagaauacaaccugggaggaccacugccaguuuagccgccccucuccuaucggcuaccucgggcugcuuucccaaagaacacgggauauuuauaucagccgcagacugcucggaaccuucaccuggacacuguccgacucugaaggcaaggauacgcccggcggguacugucugacccgguggaugcucauugaggccgagcugaaaugcuuuggaaacacagcugucgccaaguguaacgaaaaacaugacgaggaguucugcgauaugcuucgccuguuugacuucaauaagcaggcuauccagagacucaaagccgaagcgcagaugagcauucaacugaucaacaaggccgugaaugcucuuaucaacgaccagcugauuaugaagaaucaccuccgggauaucaugggcauuccuuauugcaacuacuccaaauauugguaccugaaucacaccacaaccgggaagacgagccugcccaaauguuggcucgugucuaacggauccuaccugaaugaaacacauuucagcgacgauaucgagcagcaagccgacaacaugauuaccgagaugcuucagaaggaauauauggagcgccagggcaaaaccccucuggggcucgucgaucuguuuguuuucucuaccagcuuuuaccugaucuccaucuuccuucaccucgugaagauuccgacacauagacacaucgugggaaaacccugcccuaagccccaucggcugaaucacaugggcauuuguucuugcggccuguauaagcagccugggguccccgugaaauggaagcgcugaggacuagucccuguucccagagcccacuuuuuuuucuuuuuuugaaauaaaauagccugucuuucagaucucaaaggcucuuuucagagccaccaaaaaaaaaaaaaaaaaaaaaaaaaaaaaaaaaaaaaaaaaaaaaaaaaaaaaaaaaaaaaaaaagaauu

SEQ ID NO: 14149 - RNA, 1717 nt, Artificial Sequence
  mRNA product Design a-1 (hSL-A64-N5) comprising derived and/or modified sequence from LASV(LM776-SLE-2012;Clade IV)__AIT17824__GPC (opt5)
aggagagucccgcagucggcguccagcggcucugcuuguucgugugugugucguugcaggccuuauucaagcuuaccaugggccagaucgugaccuucuuucaagaggucccccacguuauugaagaggugaugaacaucgugcugauugcccucagcauccuggcuguccuuaaggggcuguacaauuucgccacaugcggacucgugggccugguuacguuucuucugcucugugggagauccugcaccacaucuguguauaaaggagucuacgaacugcagacccuggagcucaacauggaaacacugaauaugaccaugccucuuagcuguacaaagaacaauucccaucacuauauuauggugggcaacgagaccgggcuggagcucacgcugaccaauacaucuaucaucaaccauaaauucugcaaucuuagcgacgcgcacaagaaaaaccuguacgaucaugcucucauguccauuaucucuaccuuucaccugagcauuccgaauuucaaccaguaugaagccauguccugugacuuuaauggaggcaagaucagcguucaguacaaccugucucacuccuaugccggcgaugcugccaaucauugcgggacaguggcuaacggaguccuccaaaccuucaugcggauggccuggggcgggagcuacauugcgcuggacucuggacacggcaagugggauuguaucaugacguccuaccaguaucuuauuauccagaacacaaccugggaggaccauugccaguuuagccgccccucuccuaucggguaccugggacuccugucccaaagaacacgggauauuuauaucagccgcagacuucugggcaccuucaccuggacacucuccgacucugaaggcaaagauacgcccgggggauacugucugacccgguggaugcugauugaggccgagcucaagugcuuuggcaauacagcuguggccaaauguaacgaaaagcacgacgaggaguucugcgauaugcugcgccuuuuugacuucaauaaacaggcuauccagagacugaaggccgaagcgcagaugagcauucaacucaucaacaaggccgugaaugcucugaucaacgaucagcuuauuaugaaaaaucaucugcgggacaucauggggauuccuuauugcaacuacuccaaguauugguaccucaaucacaccacaaccggaaaaacgagccugcccaaguguuggcuggucucuaacggcuccuaccucaaugaaacacacuucagcgacgauaucgagcagcaagccgacaacaugauuaccgagaugcugcagaaagaauauauggagcgccaggggaagaccccucuuggacugguugaucucuuuguguucucuaccagcuuuuaccugaucuccaucuuccugcaucuugugaaaauuccgacacacagacauaucgucggcaagucuugccccaagccucaccggcucaaucacaugggcauuuguagcugcgggcuguauaaacagcccggagugccuguucgcuggaagagaugaggacuagucccuguucccagagcccacuuuuuuuucuuuuuuugaaauaaaauagccugucuuucagaucucaaaggcucuuuucagagccaccaaaaaaaaaaaaaaaaaaaaaaaaaaaaaaaaaaaaaaaaaaaaaaaaaaaaaaaaaaaaaaaaagaauu

SEQ ID NO: 14150 - RNA, 1717 nt, Artificial Sequence
  mRNA product Design a-1 (hSL-A64-N5) comprising derived and/or modified sequence from LASV(Mad39;Clade IV)__ANH09722__GPC (opt5)
aggagagucccgcagucggcguccagcggcucugcuuguucgugugugugucguugcaggccuuauucaagcuuaccaugggccagaucgugaccuucuuucaagaggucccccacguuauugaagaggugaugaacaucgugcugauugcccucagcauccuggcuguccuuaaggggcuguacaauguggccacaugcggacucauuggccugguuacguuccuucugcucugugggagauccugcaccacaacccuguauaaaggaguguacgaacugcaggcgcucgagcugaacauggaaacacuuaauaugaccaugccucugucuuguacaaagaacaauagccaucacuauauccgggucggcaacgagaccgggcucgagcugacgcuuaccaauacaucccugaucaaccauaaauuuugcaaucucucugacgcucacaagaaaaaccuguacgaucaugcccugaugagcauuaucuccaccuuccaccucucuauuccgaauuuuaaccaguaugaagccaugagcugugacuucaaugauggaaagaucuccgugcaguacaaccugagccacacauaugcuggcgacaccgccaaucauugcggcacgguugcuaacggggugcuucaaacauuuaugcgcauggccuggggaggcucuuacauugcgcuggauuccgggagaggaggcugggacuguaucaugaccagcuaccaguaucucauuauccagaacacaaccugggaggaucacugccaguucucucggcccuccccuaucggguaccugggacuucugagccaacgcaccagagacauuuauaucucucggcgccuccugggcacauuuacguggacccuguccgauagcgaaggcaaggacacacccgggggauacugucucaccagauggaugcugauugaggccgagcuuaaaugcuucggcaauacagcugucgccaaguguaacgaaaaacaugaugaggaauuuugcgacaugcugcgccucuucgauuuuaauaagcaggcuauccagcggcugaaagccgaggcgcagauguccauucaacuuaucaacaaggccgugaaugcucugaucaacgaccagcucauuaugaagaaucaccugagagacaucauggggauuccuuauugcaacuacucuaaauauugguaccugaaucacaccgugacgggaaagacaagccuccccaaauguuggcuggucuccaacggcagcuaccuuaaugaaacccauuucucugaugacaucgagcagcaagccgauaacaugauuaccgagaugcugcagaaggaauauauggagcggcaggggaaaacaccucucggacugguugaccuguucguguuuuccaccagcuucuaccuuaucucuaucuuucuccaccuggugaagauuccgacacaucgccacgucgugggcaaacccugcccuaagccccauagacugaaucacaugggcaucuguagcugcggguucuauaagcagccuggaguucccgugcgguggaaacgcugaggacuagucccuguucccagagcccacuuuuuuuucuuuuuuugaaauaaaauagccugucuuucagaucucaaaggcucuuuucagagccaccaaaaaaaaaaaaaaaaaaaaaaaaaaaaaaaaaaaaaaaaaaaaaaaaaaaaaaaaaaaaaaaaagaauu

SEQ ID NO: 14151 - RNA, 1717 nt, Artificial Sequence
  mRNA product Design a-1 (hSL-A64-N5) comprising derived and/or modified sequence from LASV(Z0947-SLE-2011;Clade IV)__AIT17840__GPC (opt5)
aggagagucccgcagucggcguccagcggcucugcuuguucgugugugugucguugcaggccuuauucaagcuuaccaugggccagaucgugaccuucuuucaagaggucccccacguuauugaagaggugaugaacaucgugcugauugcccucagcauccuggcuguccuuaaggggcuguacaauuucgccacaugcggacucgugggccugguuacguuucuucugcucugugggagauccugcaccauuucucuguauaaaggaguguacgaacugcagacacucgagcugaacauggaaacccuuaauaugacaaugccucugagcuguaccaagaacaauucccaucacuauaucauggucggcaacgagacagggcucgagcugacccuuacgaauaccucuaucauuaaccauaaauucugcaaucugagcgacgcgcacaagaaaaaccucuacgaucaugcucugauguccaucauuucuacauuucaccugagcaucccgaauuucaaccaguaugaagccauguccugugacuuuaauggaggcaagauuagcgugcaguacaaccucucucacuccuaugccggcgaugcugccaaucauugcgggaccguugcuaacggagugcugcaaacauucaugcggauggccuggggcgggagcuacaucgcgcuugacucuggacgcgauagaugggacuguauuaugaccuccuaccaguaucugaucauccagaacacgacaugggaggaucacugccaguuuagccggcccucuccuauuggcuaccucgggcugcuuucccaacgcaccagagacaucuauauuagccggcgccugcucggaacauucaccuggacccuguccgauucugaaggcaaggacacacccggcggguacugucugacgagauggaugcucaucgaggccgagcugaaaugcuuuggaaauaccgcugucgccaaguguaacgaaaaacaugaugaggaguucugcgacaugcuucggcuguuugauuucaauaagcaggcuauucagcgccucaaagccgaagcgcagaugagcauccaacugaucaacaaggccgugaaugcucuuauuaacgaccagcugaucaugaagaaucaccucagagacauuaugggcaucccuuauugcaacuacuccaaauauugguaccugaaucacacaaccacagggaagaccagccugcccaaauguuggcucgugucuaacggauccuaccugaaugaaacgcauuucagcgaugacauugagcagcaagccgauaacaugaucacagagaugcuucagaaggaauauauggagcggcagggcaaaaccccucuggggcucgucgaccuguuuguuuucucuaccagcuuuuaccugaucuccauuuuccuucaccucgugaagaucccgacacaucgccacauugugggaaaacccugcccuaagccccauagacugaaucacaugggcaucuguucuugcggccuguauaagcagccugggguccccgugaaauggaagcggugaggacuagucccuguucccagagcccacuuuuuuuucuuuuuuugaaauaaaauagccugucuuucagaucucaaaggcucuuuucagagccaccaaaaaaaaaaaaaaaaaaaaaaaaaaaaaaaaaaaaaaaaaaaaaaaaaaaaaaaaaaaaaaaaagaauu

SEQ ID NO: 14152 - RNA, 1748 nt, Artificial Sequence
  mRNA product Design a-1 (hSL-A100) comprising derived and/or modified sequence from LASV(Josiah;Clade IV)__NP_694870__GPC (opt1) R8475
aggagagucccgcagucggcguccagcggcucugcuuguucgugugugugucguugcaggccuuauucaagcuuaccaugggccagaucgugaccuucuuccaggaggucccccacgugaucgaggaggugaugaacaucguccugaucgcccucagcgugcuggccgugcugaaggggcucuacaacuucgcgaccugcggccuggucgggcuggugacguuccuccugcugugcggccgcuccugcaccaccagccucuacaaggggguguacgagcugcagacccuggagcucaacauggagacgcugaacaugaccaugccgcuguccugcaccaagaacaacagccaccacuacaucauggucggcaacgagaccggccucgagcugacgcugaccaacaccuccaucaucaaccacaaguucugcaaccucagcgacgcccacaagaagaaccuguacgaccacgcccugauguccaucaucagcaccuuccaccucuccauccccaacuucaaccaguacgaggccaugagcugcgacuucaacgggggcaagaucuccgugcaguacaaccugagccacuccuacgccggggacgcggccaaccacugcggcacgguggccaacgggguccugcagaccuucaugcggauggccuggggcggcagcuacaucgcgcucgacuccgggcgcggcaacugggacugcaucaugaccagcuaccaguaccugaucauccagaacaccacgugggaggaccacugccaguucucccggcccagccccaucggguaccugggccuccugucccagcgcacccgggacaucuacaucagccgccggcugcucggcaccuucaccuggacgcugagcgacuccgaggggaaggacaccccgggcggguacugccugacccgcuggaugcucaucgaggccgagcugaagugcuucggcaacaccgccguggccaagugcaacgagaagcacgacgaggaguucugcgacaugcugcggcuguucgacuucaacaagcaggccauccagcgccugaaggcggaggcccagaugagcauccagcugaucaacaaggccgugaacgcccucaucaacgaccagcugaucaugaagaaccaccuccgggacaucauggggauccccuacugcaacuacuccaaguacugguaccucaaccacacgaccaccggccgcaccagccugcccaagugcuggcuggucuccaacggcagcuaccucaacgagacgcacuucuccgacgacaucgagcagcaggccgacaacaugaucaccgagaugcugcagaaggaguacauggagcggcaggggaagacgccccugggccucguggaccuguucguguucagcaccuccuucuaccugaucagcaucuuccugcaccucgucaagaucccgacccaccgccacaucguggggaaguccugccccaagccccaccggcugaaccacaugggcaucugcagcugcgggcuguacaagcagcccggcgugccggucaaguggaagcgcugaggacuagucccuguucccagagcccacuuuuuuuucuuuuuuugaaauaaaauagccugucuuucagaucucaaaggcucuuuucagagccaccaaaaaaaaaaaaaaaaaaaaaaaaaaaaaaaaaaaaaaaaaaaaaaaaaaaaaaaaaaaaaaaaaaaaaaaaaaaaaaaaaaaaaaaaaaaaaaaaaaaaa

SEQ ID NO: 14153 - RNA, 1745 nt, Artificial Sequence
  mRNA product Design a-1 (hSL-A100) comprising derived and/or modified sequence from LASV(LP;Clade I)__AAF86701__GPC (opt1)
aggagagucccgcagucggcguccagcggcucugcuuguucgugugugugucguugcaggccuuauucaagcuuaccaugggccagaucaucaccuucuuccaggaggugccccacgucaucgaggaggugaugaacaucgugcugaucgcccucagccugcuggccauccucaaggggcuguacaacaucgcgaccugcggcaucaucgggcuggucgccuuccucuuccugugcggcaaguccugcagccugacgcucaagggcggguacgagcugcagacccuggagcucaacauggagacccugaacaugaccaugccgcuguccugcacgaagaacagcucccaccacuacauccgcgugggcaacgagaccgggcucgagcugacccugaccaacacgagcaucaucaaccacaaguucugcaaccucuccgacgcccacaagaagaaccuguacgaccacgcccugaugagcaucaucuccaccuuccaccucagcauccccaacuucaaccaguacgaggccauguccugcgacuucaacggcgggaagaucagcgugcaguacaaccugucccacagcuacgcgggcgacgccgccgagcacugcgggaccgucgccaacggcgugcugcagaccuucaugcggauggcguggggcgggcgcuacaucgcccucgacuccggcaaggggaacugggacugcaucaugacgagcuaccaguaccugaucauccagaacaccaccugggaggaccacugccaguucucccggcccagccccaucggcuaccugggccuccugucccagcgcacccgggacaucuacaucagccgccggcugcucgggacguucaccuggacccugagcgacuccgagggcaacgagacccccgggggcuacugccugacgcgcuggaugcucaucgaggccgagcugaagugcuucgggaacaccgccguggccaagugcaacgagaagcacgacgaggaguucugcgacaugcugcggcuguucgacuucaacaagcaggcgauccgccggcugaaggccgaggcccagaugagcauccagcugaucaacaaggccgucaacgcccucaucaacgaccagcugaucaugaagaaccaccuccgcgacaucaugggcauccccuacugcaacuacuccaaguacugguaccucaaccacaccagcuccggccggaccagccugcccaagugcuggcugaucuccaacgggagcuaccucaacgagacgcaguucuccgacgacaucgagcagcaggcggacaacaugaucaccgagaugcugcagaaggaguacaucgagcgccagggcaagaccccgcuggggcucguggacaucuucaucuucagcaccuccuucuaccugaucagcaucuuccugcaccugaucaagaucccgacgcaccggcacaucgugggcaagcccugccccaagccccaccgccucaaccacaugggggucugcuccugcggccuguacaagcacccgggcgugcccaccaaguggaagcggugaggacuagucccuguucccagagcccacuuuuuuuucuuuuuuugaaauaaaauagccugucuuucagaucucaaaggcucuuuucagagccaccaaaaaaaaaaaaaaaaaaaaaaaaaaaaaaaaaaaaaaaaaaaaaaaaaaaaaaaaaaaaaaaaaaaaaaaaaaaaaaaaaaaaaaaaaaaaaaaaaaaaa

SEQ ID NO: 14154 - RNA, 1745 nt, Artificial Sequence
  mRNA product Design a-1 (hSL-A100) comprising derived and/or modified sequence from LASV(803213;Clade II)__AAF86703__GPC (opt1)
aggagagucccgcagucggcguccagcggcucugcuuguucgugugugugucguugcaggccuuauucaagcuuaccaugggccagaucaucaccuucuuccaggaggugccccacgucaucgaggaggugaugaacaucgugcugaucgcccucagccugcuggccauccucaaggggaucuacaacgucgcgaccugcggccuguucgggcugaucuccuuccuccugcugugcggccgcagcugcuccgugacguacaaggggguguacgagcuccagacccuggagcugaacauggccaaccucaacaugaccaugccgcugagcugcaccaagaacaacucccaccacuacaucauggucggcaacgagacgggccuggagcucacccugaccaacaccagcaucaucaaccacaaguucugcaaccuguccgacgcccacaagaagaaccucuacgaccacgcccugaugagcaucaucuccacguuccaccugagcauccccaacuucaaccaguacgaggccauguccugcgacuucaacgggggcaagaucagcgugcaguacaaccucucccacagcuucgcgguggacgccgccaaccacugcgggaccaucgccaacggcguccugcagaccuucaugcggauggcguggggcggguccuacaucgcccuggacagcggcaaggggaacugggacugcaucaugaccuccuaccaguaccucaucauccagaacacgaccugggaggaccacugccaguucagccgccccucccccaucggcuaccuggggcugcucagccagcggacccgcgacaucuacaucagccggcgccugcugggcaccuucacguggacccucuccgacagcgagggcaacgaggcccccgggggcuacugccugacccgguggaugcugaucgaggccgagcucaagugcuucgggaacaccgccguggcgaagugcaacgagaagcacgacgaggaguucugcgacaugcugcgccuguucgacuucaacaagcaggccaucaagcggcucaagacggaggcccagauguccauccagcugaucaacaaggccgugaacgcccugaucaacgaccagcucaucaugaagaaccaccuccgcgacaucaugggcauccccuacugcaacuacagccgguacugguaccugaaccacaccgucaccgggaagaccucccugccccgcugcuggcuggugagcaacggcuccuaccugaacgagacgcacuucagcgacgacaucgagcagcaggcggacaacaugaucaccgagaugcuccagaaggaguacauggaccggcagggcaagaccccgcuggggcugguggaccucuucgucuucuccaccagcuucuaccugaucuccaucuuccugcaccuggugaagaucccgacgcaccgccacaucgugggcaagcccugccccaagccccaccggcucaaccacauggggaucugcagcugcggccuguacaagcacccggggguccccgugaaguggaagcgcugaggacuagucccuguucccagagcccacuuuuuuuucuuuuuuugaaauaaaauagccugucuuucagaucucaaaggcucuuuucagagccaccaaaaaaaaaaaaaaaaaaaaaaaaaaaaaaaaaaaaaaaaaaaaaaaaaaaaaaaaaaaaaaaaaaaaaaaaaaaaaaaaaaaaaaaaaaaaaaaaaaaaa

SEQ ID NO: 14155 - RNA, 1745 nt, Artificial Sequence
  mRNA product Design a-1 (hSL-A100) comprising derived and/or modified sequence from LASV(GA391;Clade III)__CAA36645__GPC (opt1)
aggagagucccgcagucggcguccagcggcucugcuuguucgugugugugucguugcaggccuuauucaagcuuaccaugggccagaucgugaccuucuuccaggaggucccccacgugaucgaggaggugaugaacaucguccugaucgcccucagcauccuggccauccugaaggggcucuacaacguggcgaccugcggccugaucgggcuggugacguuccuccugcuguccggccgcagcugcucccucaucuacaaggggaccuacgagcugcagacccuggagcucaacauggagacccugaacaugacgaugccgcugagcugcaccaagaacaacucccaccacuacauccgggucggcaacgagaccggccucgagcugacccugacgaacaccagcauccucaaccacaaguucugcaaccuguccgacgcccacaagcgcaaccuguacgaccacagccucauguccaucaucagcaccuuccaccuguccauccccaacuucaaccaguacgaggccaugagcugcgacuucaacgggggcaagaucaccgugcaguacaaccugucccacagcuucgccguggacgccgcggggcacugcggcacgcucgccaacgggguccugcagaccuucaugcggauggccuggggcggcuccuacaucgcccuggacagcgggcgcggcaacugggacugcaucaugaccuccuaccaguaccucaucauccagaacaccacgugggacgaccacugccaguucagccggcccucccccaucggguaccugggccugcucagccagcgcacccgggacaucuacaucagccgccggcugcugggcaccuucaccuggacgcucuccgacagcgaggggaacgagaccccgggcggguacugccugacccgcuggaugcugaucgaggcggagcucaagugcuucggcaacaccgccguggccaagugcaacgagaagcacgacgaggaguucugcgacaugcugcggcuguucgacuucaacaagcaggccauccgccggcucaagacggaggcccagauguccauccagcugaucaacaaggcggugaacgcccugaucaacgaccagcucaucaugaagaaccaccuccgcgacaucauggggauccccuacugcaacuacagccgguacugguaccugaaccacaccuccaccggcaagaccagccugccccgcugcuggcugaucuccaacggcagcuaccugaacgagacgaaguucuccgacgacaucgagcagcaggccgacaacaugaucaccgagaugcuccagaaggaguacaucgaccggcaggggaagacgccccugggccuggucgaccuguucguguucagcaccuccuucuaccucaucagcaucuuccugcaccuggugaagaucccgacccaccgccacaucgucgggaagcccugccccaagccccaccggcucaaccacaugggcaucugcuccugcgggcuguacaagcagccgggcgugcccgugcgcuggaagcggugaggacuagucccuguucccagagcccacuuuuuuuucuuuuuuugaaauaaaauagccugucuuucagaucucaaaggcucuuuucagagccaccaaaaaaaaaaaaaaaaaaaaaaaaaaaaaaaaaaaaaaaaaaaaaaaaaaaaaaaaaaaaaaaaaaaaaaaaaaaaaaaaaaaaaaaaaaaaaaaaaaaaa

SEQ ID NO: 14156 - RNA, 1748 nt, Artificial Sequence
  mRNA product Design a-1 (hSL-A100) comprising derived and/or modified sequence from LASV(AV;Clade V)__CCA30314__GPC (opt1)
aggagagucccgcagucggcguccagcggcucugcuuguucgugugugugucguugcaggccuuauucaagcuuaccaugggccagaucgugaccuucuuccaggaggucccccacgugaucgaggaggugaugaacaucguccugaucgcccucagcauccuggccgugcugaaggggcucuacaacaucgcgaccugcggccugaucgggcugaucacguuccuccugcugugcggccgcuccugcagcuccaaccucuacaaggggguguacgagcugcagagccuggaccucaacauggagacccugaacaugaccaugccgcuguccugcaccaagaacaacagccaccacuacauccgggucggcaacgacacgggccucgagcugacccugaccaacaccuccauccucaaccacaaguucugcaaccugagcgacgcccacaagaaggaccuguacgaccacgcccucauguccaucaucagcacguuccaccuguccauccccaacuucaaccaguacgaggccaugagcugcgacuucaacgggggcaagaucuccgugcaguacaaccugagccacuccuacgccaucgacgcggccaaccacugcgggaccguggccaacggcauccuccagaccuucaugcgcauggccuggggcgggagcuacaucgcgcuggacuccggccgggggaacugggacugcaucaugaccagcuaccaguaccugaucauccagaacacgaccugggagaaccacugccaguucucccgccccagccccaucggcuaccucgggcugcugagccagcggacccgcgacaucuacaucucccggcgccuccugggcaccuucacguggacccugagcgacuccgagggcaacgccacccccgggggcuacugccucacccgguggaugcugaucgaggccgagcugaagugcuucgggaacacggccgucgccaagugcaacgagaagcacgacgaggaguucugcgacaugcuccgccuguucgacuucaacaagcaggcgaucagccggcugaaguccgaggcccagaugagcauccagcucaucaacaaggccgugaacgcccugaucaacgaccagcugaucaugaagaaccaccuccgcgacaucaugggcauccccuacugcaacuacuccaaguacugguaccugaaccacaccaucaccgggaagaccagccugcccaagugcuggcucguguccaacggcagcuaccugaacgagacgcacuucuccgacgacaucgagcagcaggccgacaacaugaucaccgagaugcugcagaaggaguacauggagcggcagggcaagaccccgcucgggcuggucgaccuguucguguucagcaccuccuucuaccugaucagcaucuuccuccgccuggugaagaucccgacgcaccggcacaucgucggcaagcccugccccaagccccaccgccugaaccacauggggaucugcuccugcggccucuacaagcagccgggggugcccgugcgguggaagcgcugaggacuagucccuguucccagagcccacuuuuuuuucuuuuuuugaaauaaaauagccugucuuucagaucucaaaggcucuuuucagagccaccaaaaaaaaaaaaaaaaaaaaaaaaaaaaaaaaaaaaaaaaaaaaaaaaaaaaaaaaaaaaaaaaaaaaaaaaaaaaaaaaaaaaaaaaaaaaaaaaaaaaa

SEQ ID NO: 14157 - RNA, 1745 nt, Artificial Sequence
  mRNA product Design a-1 (hSL-A100) comprising derived and/or modified sequence from LASV(Togo/2016/7082;Clade VI)__AMR44577__GPC (opt1)
aggagagucccgcagucggcguccagcggcucugcuuguucgugugugugucguugcaggccuuauucaagcuuaccaugggccagaucaucaccuucuuccaggaggugccccacgucaucgaggaggugaugaacaucgugcugaucgcccucagccugcuggccauccucaagggggucuacaacguggcgaccugcggcaucaucgggcuggugacguuccuguuccucugcggccgcuccugcagccugaucuacaagggguccuacgagcugcagacccucgagcugaacauggagacccugaacaugaccaugccgcucagcugcacgaagaacuccagccaccacuacauccgggucggcaacgagaccggccuggagcugacccucaccaacacguccaucaucaaccacaaguucugcaaccugagcgacgcccacaagcgcaaccuguacgaccacgcccucauguccauccugagcaccuuccaccuguccauccccaacuucaaccaguacgaggccaugagcugcgacuucaacgggggcaagaucuccgugcaguacaaccucagccacgccuacgcgguggacgccgccgagcacugcgggaccgucgccaacggcgugcugcagaccuucaugcggauggcguggggcggguccuacaucgcccuggacagcggccgcgggaacugggacugcaucaugacguccuaccaguaccucaucauccagaacaccaccugggaggaccacugccaguucagccggcccucccccaucggcuaccuggggcugcucagccagcgcacccgggacaucuacaucagccgccggcugcugggcacguucaccuggacccucuccgacagcgagggcaacgagacccccgggggcuacugccugacgcgcuggaugcugaucgaggccgagcucaagugcuucgggaacaccgccguggccaagugcaacgagaagcacgacgaggaguucugcgacaugcugcggcuguucgacuucaacaagcaggcgauccagcgccucaaguccgaggcccagaugagcauccagcugaucaacaaggccgucaacgcccugaucaacgaccagcucaucaugaagaaccaccuccgggacaugaugggcauccccuacugcaacuacuccaaguacugguaccugaaccacaccagcuccgggcgcaccagccugcccaagugcuggcugguguccaacggcagcuaccugaacgagacgcacuucuccgacgacaucgagcagcaggccgacaacaugaucaccgagaugcuccagaaggaguacaucgaccggcagggcaagaccccgcuggggcugguggaccucuucgucuucagcaccuccuucuaccugaucagcaucuuccugcaccugaucaagaucccgacgcaccgccacaucgugggcaagcccugccccaagccccaccggcucaaccacauggggaucugcuccugcggccuguacaagcagccgggggugcccacccgcuggaagcggugaggacuagucccuguucccagagcccacuuuuuuuucuuuuuuugaaauaaaauagccugucuuucagaucucaaaggcucuuuucagagccaccaaaaaaaaaaaaaaaaaaaaaaaaaaaaaaaaaaaaaaaaaaaaaaaaaaaaaaaaaaaaaaaaaaaaaaaaaaaaaaaaaaaaaaaaaaaaaaaaaaaaa

SEQ ID NO: 14158 - RNA, 1745 nt, Artificial Sequence
  mRNA product Design a-1 (hSL-A100) comprising derived and/or modified sequence from LASV(KAK-428;Clade n.d. (VII))__ANH09740__GPC (opt1)
aggagagucccgcagucggcguccagcggcucugcuuguucgugugugugucguugcaggccuuauucaagcuuaccaugggccagaucgugaccuucuuccaggaggucccccacgugaucgaggaggugaugaacaucguccugaucgcccucagccugcuggccauccucaaggggcuguacaacuucgcgaccugcggcgugaucgggcugaucacguuccuccugcugugcggccgcuccugcagcgccaccuacaaggggcaguacgagcuccagacccuggagcugaacauggagucccucaacaugaccaugccgcugagcugcacgaagaacaacucccaccacuacauccgggccggcaacaacaccggccuggagcucacccugaccaacacgagcaucaucucccacaaguucugcaaccugagcgacgcccacaagaagaaccucuacgaccacacccugauguccaucaucaccaccuuccaccugagcauccccaacuucaaccaguacgaggccauguccugcgacuucaacgggggcaagaucagcauccaguacaaccucucccacagcuacgcgggggacgccgcccagcacugcggcacgguggccaacgggguccugcagaccuucaugcgcauggcguggggcggcuccuaccuggcccucgacagcgggcggcgcggcugggacugcaucaucuccagcuaccaguaccugaucauccagaacaccaccugggacgaccacugccaguucucccggcccagccccaucggguaccugggcuucgugagccagaagacgcgcgacaucuacaucucccggcgccuccugggcaccuucaccuggacccugagcgacuccgaggggcacgacaugccgggcggguacugccucacgcgguggaugcugaucgaggccgaccugaagugcuucggcaacaccgccguggccaagugcaacgagaagcacgacgaggaguucugcgacauguggcgccucuucgacuucaacaagcaggcgauccagcggcugaaggccgaggcccagaugaacauccagcugaucaacaaggccgucaacgcccucaucaacgaccagcugaugaugaagaaccaccuccgcgacaucauggggauccccuacugcaacuacagcaaguucugguaccugaacaacaccaccacgggccggaccucccugccccgcugcuggcugaucagcaacggcuccuaccucaacgagacccacuucagcgacgacaucgagcagcaggcggacaacaugaucaccgagaugcugcagaaggaguacauggaccggcaggggaagacgccccugggccucguggaccuguucguguucuccaccagcuucuaccugaucaccaucuuccuccaccuggucaagaucccgacccaccgccacaucguggggaagcccugccccaagccccaccggcugaaccacaugggcaucugcuccugcgggcuguacaagcagccgggcgugcccguccgcuggaagcggugaggacuagucccuguucccagagcccacuuuuuuuucuuuuuuugaaauaaaauagccugucuuucagaucucaaaggcucuuuucagagccaccaaaaaaaaaaaaaaaaaaaaaaaaaaaaaaaaaaaaaaaaaaaaaaaaaaaaaaaaaaaaaaaaaaaaaaaaaaaaaaaaaaaaaaaaaaaaaaaaaaaaa

SEQ ID NO: 14159 - RNA, 1745 nt, Artificial Sequence; identical to SEQ ID NO: 14153
  mRNA product Design a-1 (hSL-A100) comprising derived and/or modified sequence from LASV(Pinneo-NIG-1969;Clade I)__AIT17836__GPC (opt1)

SEQ ID NO: 14160 - RNA, 1745 nt, Artificial Sequence
  mRNA product Design a-1 (hSL-A100) comprising derived and/or modified sequence from LASV(ISTH0009-NIG-2011;Clade II)__AIT17404__GPC (opt1)
aggagagucccgcagucggcguccagcggcucugcuuguucgugugugugucguugcaggccuuauucaagcuuaccaugggccagaucaucaccuucuuccaggaggugccccacgucaucgaggaggugaugaacaucgugcugaucgcccucagccugcuggccauccucaaggggaucuacaacgucgcgaccugcggccuguucgggcugguguccuuccuccugcugugcggccgcagcugcuccacgaccuacaaggggguguacgagcuccagacccuggagcuggacauggccagccucaacaugaccaugccgcuguccugcacgaagaacaacagccaccacuacaucauggucggcaacgagaccggccuggagcucacccugaccaacacguccaucaucaaccacaaguucugcaaccugagcgacgcccacaagaagaaccucuacgaccacgcccugauguccaucaucagcaccuuccaccuguccauccccaacuucaaccaguacgaggccaugagcugcgacuucaacgggggcaagaucuccgugcaguacaaccucagccacgcguacgccguggacgccgccaaccacugcgggaccaucgcgaacggcguccugcagaccuucaugcggauggccuggggcggguccuacaucgcccuggacagcggcaagggguccugggacugcaucaugacgagcuaccaguaccucaucauccagaacaccaccugggaggaccacugccaguucucccgccccagccccaucggcuaccuggggcugcucagccagcggacccgcgacaucuacaucucccggcgccugcugggcacguucaccuggacccucagcgacuccgagggcaacgagacccccgggggcuacugccugacgcgguggaugcugaucgaggccgagcucaagugcuucgggaacaccgccguggcgaagugcaacgagaagcacgacgaggaguucugcgacaugcugcgccuguucgacuucaacaagcaggccauccggcgccucaagaccgaggcccagaugagcauccagcugaucaacaaggccgugaacgcccugaucaacgaccagcucaucaugaagaaccaccuccgggacaucaugggcaucccguacugcaacuacuccaaguacugguaccugaaccacaccgucacggggaagaccagccugccccgcugcuggcugguguccaacggcagcuaccugaacgagacccacuucuccgacgacaucgagcagcaggcggacaacaugaucaccgagcuccugcagaaggaguacauggaccggcagggcaagacgccccuggggcucguggaccuguucgucuucagcaccuccuucuaccugaucagcaucuuccugcaccucaucaagaucccgacccaccgccacaucaccggcaagcccugccccaagccccaccggcugaaccacauggggaucugcuccugcggccuguacaagcacccgggggugcccgugaaguggaagcgcugaggacuagucccuguucccagagcccacuuuuuuuucuuuuuuugaaauaaaauagccugucuuucagaucucaaaggcucuuuucagagccaccaaaaaaaaaaaaaaaaaaaaaaaaaaaaaaaaaaaaaaaaaaaaaaaaaaaaaaaaaaaaaaaaaaaaaaaaaaaaaaaaaaaaaaaaaaaaaaaaaaaaa

SEQ ID NO: 14161 - RNA, 1745 nt, Artificial Sequence
  mRNA product Design a-1 (hSL-A100) comprising derived and/or modified sequence from LASV(ISTH2010-NIG-2012;Clade II)__AIT17482__GPC (opt1)
aggagagucccgcagucggcguccagcggcucugcuuguucgugugugugucguugcaggccuuauucaagcuuaccaugggccagaucaucaccuucuuccaggaggugccccacgucaucgaggaggugaugaacaucgugcugaucgcccucagccugcuggccauccucaaggggaucuacaacgucgcgaccugcggccuguucgggcugguguccuuccuccugcugugcggccgcagcugcuccacgaccuacaaggggguguacgagcuccagacccuggagcuggacauggccagccucaacaugaccaugccgcuguccugcacgaagaacaacagccaccacuacaucauggucggcaacgagaccggccuggagcucacccugaccaacacguccaucaucaaccacaaguucugcaaccugagcgacgcccacaagaagaaccucuacgaccacgcccugauguccaucaucagcaccuuccaccuguccauccccaacuucaaccaguacgaggccaugagcugcgacuucaacgggggcaagaucuccgugcaguacaaccucagccacgcguacgccguggacgccgccaaccacugcgggaccaucgcgaacggcguccugcagaccuucaugcggauggccuggggcggguccuacaucgcccuggacagcggcaagggguccugggacugcaucaugacgagcuaccaguaccucaucauccagaacaucaccugggaggaccacugccaguucucccgccccagccccaucggcuaccuggggcugcucagccagcggacccgcgacaucuacaucucccggcgccugcugggcaccuucacguggacccucagcgacuccgagggcaacgagacccccgggggcuacugccugacccgguggaugcugaucgaggccgagcucaagugcuucgggaacacggccguggcgaagugcaacgagaagcacgacgaggaguucugcgacaugcugcgccuguucgacuucaacaagcaggccauccggcgccucaagaccgaggcccagaugagcauccagcugaucaacaaggccgugaacgcccugaucaacgaccagcucaucaugaagaaccaccuccgggacaucaugggcauccccuacugcaacuacuccaaguacugguaccugaaccacaccgucaccgggaagacgagccugccccgcugcuggcugguguccaacggcagcuaccugaacgagacccacuucuccgacgacaucgagcagcaggcggacaacaugaucaccgagcuccugcagaaggaguacaucgaccggcagggcaagaccccgcuggggcucguggaccuguucgucuucagcacguccuucuaccugaucagcaucuuccugcaccucgugaagaucccgacccaccgccacguggucggcaagcccugccccaagccccaccggcugaaccacauggggaucugcuccugcggccuguacaagcacccgggggugcccgugaaguggaagcgcugaggacuagucccuguucccagagcccacuuuuuuuucuuuuuuugaaauaaaauagccugucuuucagaucucaaaggcucuuuucagagccaccaaaaaaaaaaaaaaaaaaaaaaaaaaaaaaaaaaaaaaaaaaaaaaaaaaaaaaaaaaaaaaaaaaaaaaaaaaaaaaaaaaaaaaaaaaaaaaaaaaaaa

SEQ ID NO: 14162 - RNA, 1745 nt, Artificial Sequence
  mRNA product Design a-1 (hSL-A100) comprising derived and/or modified sequence from LASV(Lassa virus/H.sapiens-wt/NGA/2015/ISTH_0543;Clade II)__AVO03639__GPC (opt1)
aggagagucccgcagucggcguccagcggcucugcuuguucgugugugugucguugcaggccuuauucaagcuuaccaugggccagaucaucaccuucuuccaggaggugccccacgucaucgaggaggugaugaacaucgugcugaucgcccucagccugcuggccauccucaaggggaucuacaacgucgcgaccugcggccuguucgggcugguguccuuccuccugcugugcggccgcagcugcuccacgaccuacaaggggguguacgagcuccagacccuggagcuggacauggccaaccucaacaugaccaugccgcugagcugcacgaagaacaacucccaccacuacaucauggucggcaacgagaccggccuggagcucacccugaccaacacgagcaucaucaaccacaaguucugcaaccuguccgacgcccacaagaagaaccucuacgaccacgcccugaugagcaucaucuccaccuuccaccugagcauccccaacuucaaccaguacgaggccauguccugcgacuucaacgggggcaagaucagcgugcaguacaaccucucccacaccuacgcgguggacgccgccaaccacugcgggaccaucgccaacggcguccugcagacguucaugcggauggcguggggcgggagcuacaucgcccuggacuccggcaaggggagcugggacugcaucaugaccuccuaccaguaccucgugauccagaacaccaccugggaggaccacugccaguucagccgccccucccccaucggcuaccuggggcugcucagccagcggacgcgcgacaucuacaucagccggcgccugcugggcaccuucaccuggacccucuccgacagcgagggcaacgagacgcccgggggcuacugccugacccgguggaugcugaucgaggccgagcucaagugcuucgggaacaccgccguggccaagugcaacgagaagcacgacgaggaguucugcgacaugcugcgccuguucgacuucaacaagcaggcgauccggcgccucaagaccgaggcccagauguccauccagcugaucaacaaggccgucaacgcccugaucaacgaccagcucaucaugaagaaccaccuccgggacaucaugggcauccccuacugcaacuacagcaaguacugguaccugaaccacacggugaccgggaagaccucccugccccgcugcuggcuggugagcaacggcuccuaccugaacgagacccacuucagcgacgacaucgagcagcaggccgacaacaugaucacggagcuccugcagaaggaguacaucgaccggcagggcaagaccccgcuggggcucgucgaccuguucguguucuccaccagcuucuaccugaucuccaucuuccugcaccucgugaagaucccgacccaccgccacaucacgggcaagcccugccccaagccccaccggcugaaccacauggggaucugcagcugcggccuguacaagcacccggggguccccgugaaguggaagcgcugaggacuagucccuguucccagagcccacuuuuuuuucuuuuuuugaaauaaaauagccugucuuucagaucucaaaggcucuuuucagagccaccaaaaaaaaaaaaaaaaaaaaaaaaaaaaaaaaaaaaaaaaaaaaaaaaaaaaaaaaaaaaaaaaaaaaaaaaaaaaaaaaaaaaaaaaaaaaaaaaaaaaa

SEQ ID NO: 14163 - RNA, 1745 nt, Artificial Sequence
  mRNA product Design a-1 (hSL-A100) comprising derived and/or modified sequence from LASV(Lassa virus/H.sapiens-wt/NGA/2016/ISTH_0009;Clade II)__AVO03571__GPC (opt1)
aggagagucccgcagucggcguccagcggcucugcuuguucgugugugugucguugcaggccuuauucaagcuuaccaugggccagaucaucaccuucuuccaggaggugccccacgucaucgaggaggugaugaacaucgugcugaucgcccucagccugcuggccauccucaaggggaucuacaacgucgcgaccugcggccugcuggggcucguguccuuccugcugcucugcggccgcagcugcuccacgaccuacaaggggguguacgagcugcagacccuggagcucgacauggccagccugaacaugaccaugccgcuguccugcacgaagaacaacagccaccacuacaucauggucggcaacgagaccggccucgagcugacccugaccaacacguccaucaucaaccacaaguucugcaaccucagcgacgcccacaagaagaaccuguacgaccacgcccugauguccaucaucagcaccuuccaccucuccauccccaacuucaaccaguacgaggccaugagcugcgacuucaacgggggccggaucuccgugcaguacaaccugagccacuccuacgcgguggacgccgccaaccacugcgggaccaucgccaacggcguccugcagaccuucaugcgcauggcguggggcgggagcuacaucgcccucgacuccggcaaggggagcugggacugcaucaugacguccuaccaguaccugaucauccagaacaccaccugggaggaccacugccaguucagccggcccagccccaucggcuaccuggggcuccugucccagcgcacccgggacaucuacaucagccgccggcugcucggcacguucaccuggacccuguccgacagcgagggcaacgagacccccgggggcuacugccugacgcgcuggaugcucaucgaggccgagcugaagugcuucgggaacaccgccguggccaagugcaacgagaagcacgacgaggaguucugcgacaugcugcggcuguucgacuucaacaagcaggcgauccgccggcugaagaccgaggcccagauguccauccagcugaucaacaaggccgugaacgcccucaucaacgaccagcugaucaugaagaaccaccuccgcgacaucaugggcaucccguacugcaacuacagcaaguacugguaccucaaccacaccgucacggggaagaccucccugccccggugcuggcuggugagcaacggcuccuaccucaacgagacccacuucagcgacgacaucgagcagcaggccgacaacaugaucaccgagcugcugcagaaggaguacaucgaccgccagggcaagacgccccucgggcugguggaccuguucgucuucuccaccagcuucuaccugaucuccaucuuccuccaccuggugaagaucccgacccaccggcacaucaccggcaagcccugccccaagccccaccgccugaaccacauggggaucugcagcugcggccucuacaaccacccgggggugcccgucaaguggaagcggugaggacuagucccuguucccagagcccacuuuuuuuucuuuuuuugaaauaaaauagccugucuuucagaucucaaaggcucuuuucagagccaccaaaaaaaaaaaaaaaaaaaaaaaaaaaaaaaaaaaaaaaaaaaaaaaaaaaaaaaaaaaaaaaaaaaaaaaaaaaaaaaaaaaaaaaaaaaaaaaaaaaaa

SEQ ID NO: 14164 - RNA, 1745 nt, Artificial Sequence
  mRNA product Design a-1 (hSL-A100) comprising derived and/or modified sequence from LASV(Lassa virus/H.sapiens-wt/NGA/2016/ISTH_0017;Clade II)__AVO03567__GPC (opt1)
aggagagucccgcagucggcguccagcggcucugcuuguucgugugugugucguugcaggccuuauucaagcuuaccaugggccagaucaucaccuucuuccaggaggugccccacgucaucgaggaggugaugaacaucgugcugaucgcccucagccugcuggccauccucaaggggaucuacaacgucgcgaccugcggccuguucgggcugguguccuuccuccugcugugcggccgcagcugcuccacgaccuacaaggggguguacgagcuccagacccuggagcuggacauggccagccucaacaugaccaugccgcuguccugcacgaagaacaacagccaccacuacaucauggucggcaacgagaccggccuggagcucacccugaccaacacguccaucaucaaccacaaguucugcaaccugagcgacgcccacaagaagaaccucuacgaccacgcccugauguccaucaucagcaccuuccaccuguccauccccaacuucaaccaguacgaggccaugagcugcgacuucaacgggggcaagaucuccgugcaguacaaccucagccacaccuacgcgaucgacgccgccaaccacugcgggaccaucgccaacggcgugcugcagacguucaugcggauggcguggggcggguccuacaucgcccuggacagcggcaagggguccugggacugcaucaugaccagcuaccaguaccucaucauccagaacaccaccugggaggaccacugccaguucucccgccccagccccaucggcuaccuggggcugcucagccagcggacgcgcgacaucuacaucucccggcgccugcugggcaccuucaccuggacccucagcgacuccgagggcaacgagacgcccgggggcuacugccugacccgguggaugcugaucgaggccgagcucaagugcuucgggaacaccgccgucgccaagugcaacgagaagcacgacgaggaguucugcgacaugcugcgccuguucgacuucaacaagcaggcgauccggcgccucaagaccgaggcccagaugagcauccagcugaucaacaaggccgugaacgcccugaucaacgaccagcucaucaugaagaaccaccuccgggacaucaugggcauccccuacugcaacuacuccaaguacugguaccugaaccacacggugaccgggaagaccagccugccccgcugcuggcuggucuccaacggcagcuaccugaacgagacccacuucuccgacgacaucgagcagcaggccgacaacaugaucacggagcuccugcagaaggaguacauggaccggcagggcaagaccccgcuggggcucguggaccuguucguguucagcaccuccuucuaccugaucagcaucuuccugcaccucguccgcaucccgacccaccggcacgugaucggcaagcccugccccaagccccaccgccugaaccacauggggaucugcuccugcggccuguacaagcacccgggggugcccgucaaguggaagcggugaggacuagucccuguucccagagcccacuuuuuuuucuuuuuuugaaauaaaauagccugucuuucagaucucaaaggcucuuuucagagccaccaaaaaaaaaaaaaaaaaaaaaaaaaaaaaaaaaaaaaaaaaaaaaaaaaaaaaaaaaaaaaaaaaaaaaaaaaaaaaaaaaaaaaaaaaaaaaaaaaaaaa

SEQ ID NO: 14165 - RNA, 1745 nt, Artificial Sequence
  mRNA product Design a-1 (hSL-A100) comprising derived and/or modified sequence from LASV(Lassa virus/H.sapiens-wt/NGA/2018/ISTH_0959;Clade II)__AVV65099__GPC (opt1)
aggagagucccgcagucggcguccagcggcucugcuuguucgugugugugucguugcaggccuuauucaagcuuaccaugggccagaucaucaccuucuuccaggaggugccccacgucaucgaggaggugaugaacaucgugcugaucgcccucagccugcuggccauccucaaggggaucuacaacgucgugaccugcggccuguucgggcugguguccuuccuccugcugugcggccgcagcugcuccacgaccuacaagggggucuacgagcuccagacccuggagcuggacauggcgagccucaacaugaccaugccgcuguccugcacgaagaacaacagccaccacuacaucauggugggcaacgagaccggccuggagcucacccugaccaacacguccaucaucaaccacaaguucugcaaccugagcgacgcccacaagaagaaccucuacgaccacgcccugauguccaucaucagcaccuuccaccuguccauccccaacuucaaccaguacgaggccaugagcugcgacuucaacgggggcaagaucuccgugcaguacaaccucagccacgccuacgcgaucgacgccgccaaccacugcgggaccaucgccaacggcguccugcagaccuucaugcggauggcguggggcggguccuacaucgcccuggacagcggcaagggguccugggacugcaucaugacgagcuaccaguaccucaucauccagaacaccaccugggaggaccacugccaguucucccgccccagccccaucggcuaccuggggcugcucagccagcggacccgcgacaucuacaucucccggcgccugcugggcacguucaccuggacccucagcgacuccgagggcaacgagacccccgggggcuacugccugacgcgguggaugcugaucgaggccgagcucaagugcuucgggaacaccgccguggccaagugcaacgagaagcacgacgaggaguucugcgacaugcugcgccuguucgacuucaacaagcaggcgauccggcgccucaagaccgaggcccagaugagcauccagcugaucaacaaggccgugaacgcccugaucaacgaccagcucaucaugaagaaccaccuccgggacaucaugggcaucccguacugcaacuacuccaaguacugguaccugaaccacaccgucacggggaagaccagccugccccgcugcuggcugguguccaacggcagcuaccugaacgagacccacuucuccgacgacaucgagcagcaggccgacaacaugaucaccgagcuccugcagaaggaguacaucgaccggcagggcaagacgccccuggggcucguggaccuguucgucuucagcaccuccuucuaccugaucagcaucuuccugcaccucgugaagaucccgacccaccgccacgugaucggcaagcccugccccaagccccaccggcugaaccacauggggaucugcuccugcggccuguacaagcacccggggguccccgugaaguggaagcgcugaggacuagucccuguucccagagcccacuuuuuuuucuuuuuuugaaauaaaauagccugucuuucagaucucaaaggcucuuuucagagccaccaaaaaaaaaaaaaaaaaaaaaaaaaaaaaaaaaaaaaaaaaaaaaaaaaaaaaaaaaaaaaaaaaaaaaaaaaaaaaaaaaaaaaaaaaaaaaaaaaaaaa

SEQ ID NO: 14166 - RNA, 1745 nt, Artificial Sequence
  mRNA product Design a-1 (hSL-A100) comprising derived and/or modified sequence from LASV(LASV003-NIG-2008;Clade II)__AIT17580__GPC (opt1)
aggagagucccgcagucggcguccagcggcucugcuuguucgugugugugucguugcaggccuuauucaagcuuaccaugggccagaucaucaccuucuuccaggaggugccccacgucaucgaggaggugaugaacaucgugcugaucgcccucagccugcuggccauccucaaggggaucuacaacgucgcgaccugcggccuguucgggcugguguccuuccuccugcugugcggccgcagcugcuccacgaccuacaaggggguguacgagcuccagacccuggagcuggacauggccagccucaacaugaccaugccgcuguccugcacgaagaacaacagccaccacuacaucauggucggcaacgagaccggccuggagcucacccugaccaacacguccaucaucaaccacaaguucugcaaccugagcgacgcccacaagaagaaccucuacgaccacgcccugauguccaucaucagcaccuuccaccuguccauccccaacuucaaccaguacgaggccaugagcugcgacuucaacgggggcaagaucuccgugcaguacaaccucagccacaccuacgcgguggacgccgccaaccacugcgggaccaucgccaacggcguccugcagacguucaugcggauggcguggggcggguccuacaucgcccuggacagcggcaagggguccugggacugcaucaugaccagcuaccaguaccucaucauccagaacaccaccugggaggaccacugccaguucucccgccccagccccaucggcuaccuggggcugcucagccagcggacgcgcgacaucuacaucucccggcgccugcugggcaccuucaccuggacccucagcgacuccgagagcaacgagacgccgggcggguacugccugacccgguggaugcugaucgaggccgagcucaagugcuucggcaacaccgccguggccaagugcaacgagaagcacgacgaggaguucugcgacaugcugcgccuguucgacuucaacaagcaggcgauccggcgccucaaggccgaggcccagauguccauccagcugaucaacaaggccgugaacgcccugaucaacgaccagcucaucaugaagaaccaccuccgggacaucauggggauccccuacugcaacuacagcaaguacugguaccugaaccacaccgucacgggccgcaccucccugccccggugcuggcuggugagcaacggguccuaccugaacgagacccacuucagcgacgacaucgagcagcaggcggacaacaugaucaccgagcuccugcagaaggaguacauggaccgccagggcaagacgccccugggccucguggaccuguucgucuucuccaccagcuucuaccugaucuccaucuuccugcaccucgugaagaucccgacccaccggcacgugaucgggaagcccugccccaagccccaccgccugaaccacaugggcaucugcagcugcgggcuguacaagcacccgggcguccccgugaaguggaagcggugaggacuagucccuguucccagagcccacuuuuuuuucuuuuuuugaaauaaaauagccugucuuucagaucucaaaggcucuuuucagagccaccaaaaaaaaaaaaaaaaaaaaaaaaaaaaaaaaaaaaaaaaaaaaaaaaaaaaaaaaaaaaaaaaaaaaaaaaaaaaaaaaaaaaaaaaaaaaaaaaaaaaa

SEQ ID NO: 14167 - RNA, 1745 nt, Artificial Sequence
  mRNA product Design a-1 (hSL-A100) comprising derived and/or modified sequence from LASV(LASV035-NIG-2009;Clade II)__AIT17588__GPC (opt1)
aggagagucccgcagucggcguccagcggcucugcuuguucgugugugugucguugcaggccuuauucaagcuuaccaugggccagaucaucaccuucuuccaggaggugccccacgucaucgaggaggugaugaacaucgugcugaucgcccucagccugcuggccauccucaaggggaucuacaacgucgcgaccugcggccuguucgggcugguguccuuccuccugcugugcggccgcagcugcuccacgaccuacaaggggguguacgagcuccagacccuggagcuggacauggccagccucaacaugaccaugccgcuguccugcacgaagaacaacagccaccacuacaucauggucggcaacgagaccggccuggagcucacccugaccaacacguccaucaucaaccacaaguucugcaaccugagcgacgcccacaagaagaaccucuacgaccacgcccugauguccaucaucagcaccuuccaccuguccauccccaacuucaaccaguacgaggccaugagcugcgacuucaacgggggcaagaucuccgugcaguacaaccucagccacgcguacgccguggacgccgccaaccacugcgggaccaucgcgaacggcguccugcagaccuucaugcggauggccuggggcggguccuacaucgcccuggacagcggcaagggguccugggacugcaucaugacgagcuaccaguaccucaucauccagaacaccaccugggaggaccacugccaguucucccgccccagccccaucggcuaccuggggcugcucagccagcggacccgcgacaucuacaucucccggcgccugcugggcacguucaccuggacccucagcgacuccgagggcaacgagacccccgggggcuacugccugacgcgguggaugcugaucgaggccgagcucaagugcuucgggaacaccgccguggcgaagugcaacgagaagcacgacgaggaguucugcgacaugcugcgccuguucgacuucaacaagcaggccauccggcgccucaaggccgaggcccagaugagcauccagcugaucaacaaggccgugaacgcgcugaucaacgaccagcucaucaugaagaaccaccuccgggacaucaugggcauccccuacugcaacuacuccaaguacugguaccugaaccacaccgucaccgggaagacgagccugccccgcugcuggcugguguccaacggcagcuaccugaacgagacccacuucuccgacgacaucgagcagcaggccgacaacaugaucaccgagcuccugcagaaggaguacaucgaccggcagggcaagaccccgcuggggcucguggaccuguucgucuucagcacguccuucuaccugaucagcaucuuccugcaccucgugaagaucccgacccaccgccacgugaucggcaagcccugccccaagccccaccggcugaaccacauggggaucugcuccugcggccuguacaagcacccggggguccccgugaaguggaagcgcugaggacuagucccuguucccagagcccacuuuuuuuucuuuuuuugaaauaaaauagccugucuuucagaucucaaaggcucuuuucagagccaccaaaaaaaaaaaaaaaaaaaaaaaaaaaaaaaaaaaaaaaaaaaaaaaaaaaaaaaaaaaaaaaaaaaaaaaaaaaaaaaaaaaaaaaaaaaaaaaaaaaaa

SEQ ID NO: 14168 - RNA, 1745 nt, Artificial Sequence
  mRNA product Design a-1 (hSL-A100) comprising derived and/or modified sequence from LASV(LASV1000-NIG-2009;Clade II)__AIT17782__GPC (opt1)
aggagagucccgcagucggcguccagcggcucugcuuguucgugugugugucguugcaggccuuauucaagcuuaccaugggccagaucaucaccuucuuccaggaggugccccacgucaucgaggaggugaugaacaucgugcugaucgcccucagccugcuggccauccucaaggggaucuacaacgucgcgaccugcggccuguucgggcugguguccuuccuccugcugugcggccgcagcugcuccacgaccuacaaggggguguacgagcuccagacccuggagcuggacauggccagccucaacaugaccaugccgcuguccugcacgaagaacaacagccaccacuacaucauggucggcaacgagaccggccuggagcucacccugaccaacacguccaucaucaaccacaaguucugcaaccugagcgacgcccacaagaagaaccucuacgaccacgcccugauguccaucaucagcaccuuccaccuguccauccccaacuucaaccaguacgaggccaugagcugcgacuucaacgggggcaagaucuccgugcaguacaaccucagccacaccuacgcgguggacgccgccaaccacugcgggaccaucgccaacggcguccugcagacguucaugcggauggcguggggcggguccuacaucgcccuggacagcggcaagggguccugggacugcaucaugaccagcuaccaguaccucaucauccagaacaccaccugggaggaccacugccaguucucccgccccagccccaucggcuaccuggggcugcucagccagcggacgcgcgacaucuacaucucccggcgccugcugggcaccuucaccuggacccucagcgacuccgagggcaacgagacgcccgggggcuacugccugacccgguggaugcugaucgaggccgagcucaagugcuucgggaacaccgccguggccaagugcaacgagaagcacgacgaggaguucugcgacaugcugcgccuguucgacuucaacaagcaggcgaucaagcggcucaagaccgaggcccagaugagcauccagcugaucaacaaggccgugaacgcccugaucaacgaccagcucaucaugaagaaccaccuccgcgacaucaugggcauccccuacugcaacuacuccaaguacugguaccugaaccacacggucaccgggaagaccagccugccccggugcuggcugguguccaacggcagcuaccugaacgagacccacuucuccgacgacaucgagcagcaggccgacaacaugaucacggagcuccugcagaaggaguacaucgaccgccagggcaagaccccgcuggggcucguggaccuguucgucuucagcaccuccuucuaccugaucagcaucuuccugcaccucgugaagaucccgacccaccggcacguggucggcaagcccugccccaagccccaccgccugaaccacauggggaucugcuccugcggccuguacaagcacccgggggugcccgugaaguggaagcggugaggacuagucccuguucccagagcccacuuuuuuuucuuuuuuugaaauaaaauagccugucuuucagaucucaaaggcucuuuucagagccaccaaaaaaaaaaaaaaaaaaaaaaaaaaaaaaaaaaaaaaaaaaaaaaaaaaaaaaaaaaaaaaaaaaaaaaaaaaaaaaaaaaaaaaaaaaaaaaaaaaaaa

SEQ ID NO: 14169 - RNA, 1745 nt, Artificial Sequence
  mRNA product Design a-1 (hSL-A100) comprising derived and/or modified sequence from LASV(LASV221-NIG-2010;Clade II)__AIT17624__GPC (opt1)
aggagagucccgcagucggcguccagcggcucugcuuguucgugugugugucguugcaggccuuauucaagcuuaccaugggccagaucaucaccuucuuccaggaggugccccacgucaucgaggaggugaugaacaucgugcugaucgcccucagccugcuggccauccucaaggggaucuacaacgucgcgaccugcggccuguucgggcugguguccuuccuccugcugugcggccgcagcugcuccacgaccuacaaggggguguacgagcuccagacccuggagcuggacauggccagccucaacaugaccaugccgcuguccugcacgaagaacaacagccaccacuacaucauggucggcaacgagaccggccuggagcucacccugaccaacacguccaucaucaaccacaaguucugcaaccugagcgacgcccacaagaagaaccucuacgaccacgcccugauguccaucaucagcaccuuccaccuguccauccccaacuucaaccaguacgaggccaugagcugcgacuucaacgggggcaagaucuccgugcaguacaaccucagccacaccuacgcgaucgacgccgccaaccacugcgggaccaucgccaacggcgugcugcagacguucaugcggauggcguggggcggguccuacaucgcccuggacagcggcaagggguccugggacugcaucaugaccagcuaccaguaccucaucauccagaacaccaccugggaggaccacugccaguucucccgccccagccccaucggcuaccuggggcugcucagccagcggacgcgcgacaucuacaucucccggcgccugcugggcaccuucaccuggacccucagcgacuccgagggcaacgagacgcccgggggcuacugccugacccgguggaugcugaucgaggccgagcucaagugcuucgggaacaccgccgucgccaagugcaacgagaagcacgacgaggaguucugcgacaugcugcgccuguucgacuucaacaagcaggcgauccggcgccucaagaccgaggcccagaugagcauccagcugaucaacaaggccgugaacgcccugaucaacgaccagcucaucaugaagaaccaccuccgggacaucaugggcauccccuacugcaacuacuccaaguacugguaccugaaccacacggugaccgggaagaccagccugccccgcugcuggcuggucuccaacggcagcuaccugaacgagacccacuucuccgacgacaucgagcagcaggccgacaacaugaucacggagaugcuccagaaggaguacauggaccggcagggcaagaccccgcuggggcugguggaccucuucguguucagcaccuccuucuaccugaucagcaucuuccugcaccuggucaagaucccgacccaccgccacgugaucggcaagcccugccccaagccccaccggcucaaccacauggggaucugcuccugcggccuguacaagcacccgggggugcccgucaaguggaagcgcugaggacuagucccuguucccagagcccacuuuuuuuucuuuuuuugaaauaaaauagccugucuuucagaucucaaaggcucuuuucagagccaccaaaaaaaaaaaaaaaaaaaaaaaaaaaaaaaaaaaaaaaaaaaaaaaaaaaaaaaaaaaaaaaaaaaaaaaaaaaaaaaaaaaaaaaaaaaaaaaaaaaaa

SEQ ID NO: 14170 - RNA, 1745 nt, Artificial Sequence
  mRNA product Design a-1 (hSL-A100) comprising derived and/or modified sequence from LASV(LASV237-NIG-2010;Clade II)__AIT17638__GPC (opt1)
aggagagucccgcagucggcguccagcggcucugcuuguucgugugugugucguugcaggccuuauucaagcuuaccaugggccagaucaucaccuucuuccaggaggugccccacgucaucgaggaggugaugaacaucgugcugaucgcccucagccugcuggccauccucaaggggaucuacaacgucgcgaccugcggccuguucgggcugguguccuuccuccugcugugcggccgcagcugcuccacgaccuacaaggggguguacgagcuccagacccuggagcuggacauggccagccucaacaugaccaugccgcuguccugcacgaagaacaacagccaccacuacaucauggucggcaacgagaccggccuggagcucacccugaccaacacguccaucaucaaccacaaguucugcaaccugagcgacgcccacaagaaggaccucuacgaccacgcccugauguccaucaucagcaccuuccaccuguccauccccaacuucaaccaguacgaggccaugagcugcgacuucaacgggggcaagaucuccgugcaguacaaccucagccacaccuacgcgguggacgccgccaaccacugcgggaccaucgccaacggcguccugcagacguucaugcggauggcguggggcggguccuacaucgcccuggacagcggcaagggguccugggacugcaucaugaccagcuaccaguaccucaucauccagaacaccaccugggaggaccacugccaguucucccgccccagccccaucggcuaccuggggcugcucagccagcggacgcgcgacaucuacaucucccggcgccugcugggcaccuucaccuggacccucagcgacuccgagggcaacgagacgcccgggggcuacugccugacccgguggaugcugaucgaggccgagcucaagugcuucgggaacaccgccguggccaagugcaacgagaagcacgacgaggaguucugcgacaugcugcgccuguucgacuucaacaagcaggcgauccggcgccucaagaccgaggcccagaugagcauccagcugaucaacaaggccgugaacgcccugaucaacgaccagcucaucaugaagaaccaccuccgggacaucaugggcauccccuacugcaacuacuccaaguacugguaccugaaccacacggucaccgggaagaccagccugccccgcugcuggcugguguccaacggcagcuaccugaacgagacccacuucuccgacgacaucgagcagcaggccgacaacaugaucacggagcuccugcagaaggaguacauggaccggcagggcaagaccccgcuggggcucguggaccuguucgucuucagcaccuccuucuaccugaucagcaucuuccugcaccucaucaagaucccgacccaccgccacaucacgggcaagcccugccccaagccccaccggcugaaccacauggggaucugcuccugcggccuguacaagcacccgggggugcccgugaaguggaagcgcugaggacuagucccuguucccagagcccacuuuuuuuucuuuuuuugaaauaaaauagccugucuuucagaucucaaaggcucuuuucagagccaccaaaaaaaaaaaaaaaaaaaaaaaaaaaaaaaaaaaaaaaaaaaaaaaaaaaaaaaaaaaaaaaaaaaaaaaaaaaaaaaaaaaaaaaaaaaaaaaaaaaaa

SEQ ID NO: 14171 - RNA, 1745 nt, Artificial Sequence
  mRNA product Design a-1 (hSL-A100) comprising derived and/or modified sequence from LASV(LASV253-NIG-2011;Clade II)__AIT17670__GPC (opt1)
aggagagucccgcagucggcguccagcggcucugcuuguucgugugugugucguugcaggccuuauucaagcuuaccaugggccagaucaucaccuucuuccaggaggugccccacgucaucgaggaggugaugaacaucgugcugaucgcccucagccugcuggccauccucaaggggaucuacaacgucgcgaccugcggccuguucgggcugguguccuuccuccugcugugcggccgcagcugcuccacgaccuacaaggggguguacgagcuccagacccuggagcuggacauggccagccucaacaugaccaugccgcuguccugcacgaagaacaacagccaccacuacaucauggucggcaacgagaccggccuggagcucacccugaccaacacguccaucaucaaccacaaguucugcaaccugagcgacgcccacaagaagaaccucuacgaccacgcccugauguccaucaucagcaccuuccaccuguccauccccaacuucaaccaguacgaggccaugagcugcgacuucaacgggggcaagaucuccgugcaguacaaccucagccacaccuacgcgguggacgccgccaaccacugcgggaccaucgccaacggcguccugcagacguucaugcggauggcguggggcggguccuacaucgcccuggacagcggcaagggguccugggacugcaucaugaccagcuaccaguaccucaucauccagaacaccaccugggaggaccacugccaguucucccgccccagccccaucggcuaccuggggcugcucagccagcggacgcgcgacaucuacaucucccggcgccugcugggcaccuucaccuggacccucagcgacuccgagggcaacgagacgcccgggggcuacugccugacccgguggaugcugaucgaggccgagcucaagugcuucgggaacaccgccguggccaagugcaacgagaagcacgacgaggaguucugcgacaugcugcgccuguucgacuucaacaagcaggcgauccggcgccucaaggccgaggcccagaugagcauccagcugaucaacaaggccgugaacgcccugaucaacgaccagcucaucaugaagaaccaccuccgggacaucaugggcaucccguacugcaacuacuccaaguacugguaccugaaccacaccgucacggggcgcaccagccugccccggugcuggcugguguccaacggcagcuaccugaacgagacccacuucuccgacgacaucgagcagcaggcggacaacaugaucaccgagcuccugcagaaggaguacaucgaccgccagggcaagacgccccuggggcucguggaccuguucgucuucagcaccuccuucuaccugaucagcaucuuccugcaccucgugaagaucccgacccaccggcacaucaucggcaagcccugccccaagccccaccgccugaaccacauggggaucugcuccugcggccuguacaagcacccgggggugcccgucaaguggaagcggugaggacuagucccuguucccagagcccacuuuuuuuucuuuuuuugaaauaaaauagccugucuuucagaucucaaaggcucuuuucagagccaccaaaaaaaaaaaaaaaaaaaaaaaaaaaaaaaaaaaaaaaaaaaaaaaaaaaaaaaaaaaaaaaaaaaaaaaaaaaaaaaaaaaaaaaaaaaaaaaaaaaaa

SEQ ID NO: 14172 - RNA, 1745 nt, Artificial Sequence
  mRNA product Design a-1 (hSL-A100) comprising derived and/or modified sequence from LASV(LASV254-NIG-2011;Clade II)__AIT17674__GPC (opt1)
aggagagucccgcagucggcguccagcggcucugcuuguucgugugugugucguugcaggccuuauucaagcuuaccaugggccagaucaucaccuucuuccaggaggugccccacgucaucgaggaggugaugaacaucgugcugaucgcccucagccugcuggccauccucaaggggaucuacaacgucgcgaccugcggccuguucgggcugguguccuuccuccugcugugcggccgcagcugcuccacgaccuacaaggggguguacgagcuccagacccuggagcuggacaugaccaaccucaacaugacgaugccgcugagcugcaccaagaacaacucccaccacuacaucauggucggcaacgagaccggccuggagcucacccugacgaacaccagcaucaucaaccacaaguucugcaaccuguccgacgcccacaagaagaaccucuacaaccacgcccugaugagcaucaucuccaccuuccaccugagcauccccaacuucaaccaguacgaggccauguccugcgacuucaacgggggcaagaucagcgugcaguacaaccucucccacagcuacgccguggacgcggccaaccacugcgggaccaucgccaacggcguccugcagacguucaugcggauggccuggggcggguccuacaucgcgcuggacagcggcaaggggaacugggacugcaucaugaccuccuaccaguaccucaucauccagaacaccaccugggaggaccacugccaguucagccgccccucccccaucggcuaccuggggcugcucagccagcggacgcgcgacaucuacaucagccggcgccugcugggcaccuucaccuggacccucuccgacagcgagggcaacgagacgcccgggggcuacugccugacccgguggaugcugaucgaggccgagcucaagugcuucgggaacaccgccguggccaagugcaacgagaagcacgacgaggaguucugcgacaugcugcgccuguucgacuucaacaagcaggccauccggcgccucaagaccgaggcgcaggccaacauccagcugaucaacaaggccgugaacgcccugaucaacgaccagcucaucaugaagaaccaccuccgggacaucaugggcauccccuacugcaacuacuccaaguacugguaccugaaccacacggucaccgggaagaccagccugccccgcugcuggcugguguccaacggcagcuaccugaacgagacccacuucuccgacgacaucgagcagcaggccgacaacaugaucacggagcuccugcagaaggaguacauggaccggcagggcaagaccccgcuggggcucguggaccuguucgucuucagcaccuccuucuaccugaucagcaucuuccugcaccucgugaagaucccgacccaccgccacgugaucggcaagcccugccccaagccccaccggcugaaccacauggggaucugcuccugcggccuguacaagcacccggggguccccgugaaguggaagcgcugaggacuagucccuguucccagagcccacuuuuuuuucuuuuuuugaaauaaaauagccugucuuucagaucucaaaggcucuuuucagagccaccaaaaaaaaaaaaaaaaaaaaaaaaaaaaaaaaaaaaaaaaaaaaaaaaaaaaaaaaaaaaaaaaaaaaaaaaaaaaaaaaaaaaaaaaaaaaaaaaaaaaa

SEQ ID NO: 14173 - RNA, 1745 nt, Artificial Sequence
  mRNA product Design a-1 (hSL-A100) comprising derived and/or modified sequence from LASV(Nig08-A19;Clade III)__ADU56618__GPC (opt1)
aggagagucccgcagucggcguccagcggcucugcuuguucgugugugugucguugcaggccuuauucaagcuuaccaugggccagaucgugaccuucuuccaggaggucccccacgugaucgaggaggugaugaacaucguccugaucgcccucagcauccuggccauccugaaggggcucuacaacaucgcgaccugcggccugaucgggcuggugacguuccuccugcuguccggccgcagcugcuccaugaccuacaaggggguguacgagcuccagacccuggagcugaacaugaacacccucaacaugacgaugccgcugagcugcaccaagaacaacucccaccacuacaucauggucggcaacgagaccggccuggagcucacccugacgaacaccagccugcuccaccacaaguucugcaaccuguccgacgcccacaagaagaaccuguacgaccacacccucaugagcaucaucuccaccuuccaccugagcauccccaacuucaaccaguacgaggccauguccugcgacuucaacgggggcaagaucacggugcaguacaaccugagccacuccuacgccaucgacgccgcgaaccacugcgggaccguggccaacggcguccuccagaccuucaugcggauggccuggggcgggagcuacaucgcccuggacuccggccgcgggaagugggacugcaucaugaccagcuaccaguaccugaucauccagaacacgaccugggaggaccacugccaguucucccggcccagccccaucggcuaccucgggcugcugucccagcgcacccgggacaucuacaucagccgccggcuccugggcaccuucacguggacccugagcgacuccgagggcaacgagacccccgggggcuacugccucacccgcuggaugcugaucgaggcggagcugaagugcuucgggaacacggccguggccaagugcaacgagaagcacgacgaggaguucugcgacaugcuccggcuguucgacuucaacaagcaggccauccgccggcugaaggccgaggcgcagaugagcauccagcucaucaacaaggccgugaacgcccugaucaacgaccagcugaucaugaagaaccaccuccgcgacaucaugggcauccccuacugcaacuacuccaaguacugguaccugaaccacaccagcaccgggcggaccucccugccccgcugcuggcucgucagcaacggcuccuaccugaacgagacgcacuucagcgacgacaucgagcagcaggccgacaacaugaucaccgagaugcugcagaaggaguaccucgaccggcagggcaagaccccgcuggggcugguggaccuguucguguucuccaccagcuucuaccucaucuccaucuuccugcaccuggucaagaucccgacgcaccgccacaucgugggcaagcccugccccaagccccaccggcucaaccacauggggaucugcagcugcggccuguacaagcagccgggggugcccguccgcuggaagcggugaggacuagucccuguucccagagcccacuuuuuuuucuuuuuuugaaauaaaauagccugucuuucagaucucaaaggcucuuuucagagccaccaaaaaaaaaaaaaaaaaaaaaaaaaaaaaaaaaaaaaaaaaaaaaaaaaaaaaaaaaaaaaaaaaaaaaaaaaaaaaaaaaaaaaaaaaaaaaaaaaaaaa

SEQ ID NO: 14174 - RNA, 1748 nt, Artificial Sequence
  mRNA product Design a-1 (hSL-A100) comprising derived and/or modified sequence from LASV(G1180-SLE-2010;Clade IV)__AIT17168__GPC (opt1)
aggagagucccgcagucggcguccagcggcucugcuuguucgugugugugucguugcaggccuuauucaagcuuaccaugggccagaucgugaccuucuuccaggaggucccccacgugaucgaggaggugaugaacaucguccugaucgcccucagcauccuggccgugcugaaggggcucuacaacuucgcgaccugcggccugguggggcugcucaccuuccugcugcucugcggccgcuccugcaccgccagccgguacaagggggucuacgagcugcagacccuggagcucaacauggagacccugaacaugacgaugccgcuguccugcaccaagaacaacagccaccacuacaucauggugggcaacgagaccggccucgagcugacccugacgaacaccuccaucaucaaccacaaguucugcaaccucagcgacgcccacaagaagaaccuguacgaccacgcccugauguccaucaucagcaccuuccaccucuccauccccaacuucaaccaguacgaggccaugagcugcgacuucaacgggggcaagaucuccgugcaguacaaccugagccacuccuacgcgggggacgccgccaaccacugcggcaccgucgccaacggggugcugcagacguucaugcgcauggcguggggcggcagcuacaucgcccucgacuccgggcacggcagcugggacugcaucaugaccuccuaccaguaccugaucauccagaacaccaccugggaggaccacugccaguucagccggcccucccccaucggguaccugggccuccugagccagcgcacgcgggacaucuacaucagccgccggcugcucggcaccuucaccuggacccuguccgacagcgaggggaaggacacgccgggcggguacugccugacccgcuggaugcucaucgaggccgagcugaagugcuucggcaacaccgccguggccaagugcaacgagaagcacgacgaggaguucugcgacaugcugcggcuguucgacuucaacaagcaggcgauccagcgccugaaggccgaggcccagauguccauccagcugaucaacaaggccgucaacgcccucaucaacgaccagcugaucaugaagaaccaccuccgggacaucauggggauccccuacugcaacuacagcaaguacugguaccucaaccacaccacgaccggcaagaccucccugcccaagugcuggcuggugagcaacggcuccuaccucaacgagacccacuucagcgacgacaucgagcagcaggcggacaacaugaucacggagaugcugcagaaggaguacauggagcgccaggggaagacgccccugggccucguggaccuguucgucuucuccaccagcuucuaccugaucuccaucuuccugcaccucgugaagaucccgacccaccggcacaucgugggcaagagcugccccaagccccaccgccugaaccacauggggaucugcuccugcgggcuguacaagcagcccggcgucccggugaaguggaagcggugaggacuagucccuguucccagagcccacuuuuuuuucuuuuuuugaaauaaaauagccugucuuucagaucucaaaggcucuuuucagagccaccaaaaaaaaaaaaaaaaaaaaaaaaaaaaaaaaaaaaaaaaaaaaaaaaaaaaaaaaaaaaaaaaaaaaaaaaaaaaaaaaaaaaaaaaaaaaaaaaaaaaa

SEQ ID NO: 14175 - RNA, 1748 nt, Artificial Sequence
  mRNA product Design a-1 (hSL-A100) comprising derived and/or modified sequence from LASV(G1442-SLE-2011;Clade IV)__AIT17180__GPC (opt1)
aggagagucccgcagucggcguccagcggcucugcuuguucgugugugugucguugcaggccuuauucaagcuuaccaugggccagaucgugaccuucuuccaggaggucccccacgugaucgaggaggugaugaacaucguccugaucgcccucagcauccuggccgugcugaaggggcucuacaacguggcgaccugcggccugaucgggcuggucacguuccuccugcugugcggccgcuccugcaccaccacccucuacaaggggguguacgagcugcagacgcuggagcucaacauggagacccugaacaugaccaugccgcugagcugcaccaagaacaacucccaccacuacauccgggugggcaacgagacgggccucgagcugacccugaccaacaccagcaucaucaaccacaaguucugcaaccucuccgacgcccacaagaagaaccuguacgaccacgcccugaugagcaucaucuccacguuccaccucagcauccccaacuucaaccaguacgaggccauguccugcgacuucaacgggggcaagaucagcguccaguacaaccugucccacagcuacgccggggacgcggccaaccacugcggcaccguggccaacggggugcugcagaccuucaugcgcauggccuggggcggcuccuacaucgcgcucgacagcgggcggggcaacugggacugcaucaugaccuccuaccaguaccugaucauccagaacacgaccugggacgaccacugccaguucagccgccccucccccaucggguaccugggccuccugagccagcggacccgcgacgucuacaucucccggcgccugcucggcaccuucacguggacccugagcgacagcgaggggaaggacaccccgggcggguacugccugacccgguggaugcucaucgaggccgagcugaagugcuucggcaacacggccguggccaagugcaacgagaagcacgacgaggaguucugcgacaugcugcgccucuucgacuucaacaagcaggccauccagcggcugaaggcggaggcccagauguccauccagcugaucaacaaggccgugaacgcccucaucaacgaccagcugaucaugaagaaccaccuccgcgacaucauggggauccccuacugcaacuacagcaaguacugguaccugaacaacaccgccaccggcaagaccucccugcccaagugcuggcugaucagcaacggcuccuaccucaacgagacgcacuucagcgacgacaucgagcaggaggcggacaacaugaucaccgagaugcugcagaaggaguacauggagcggcaggggaagacgccccugggccucgucgaccuguucguguucuccaccagcuucuaccugaucuccaucuuccugcaccucgugaagaucccgacccaccgccacaucgucggcaagagcugccccaagccccaccggcugaaccacauggggaucugcuccugcgggcuguacaagcagcccggcgugccggugcgcuggaagcggugaggacuagucccuguucccagagcccacuuuuuuuucuuuuuuugaaauaaaauagccugucuuucagaucucaaaggcucuuuucagagccaccaaaaaaaaaaaaaaaaaaaaaaaaaaaaaaaaaaaaaaaaaaaaaaaaaaaaaaaaaaaaaaaaaaaaaaaaaaaaaaaaaaaaaaaaaaaaaaaaaaaaa

SEQ ID NO: 14176 - RNA, 1748 nt, Artificial Sequence
  mRNA product Design a-1 (hSL-A100) comprising derived and/or modified sequence from LASV(G3010-SLE-2013;Clade IV)__AIT17344__GPC (opt1)
aggagagucccgcagucggcguccagcggcucugcuuguucgugugugugucguugcaggccuuauucaagcuuaccaugggccagaucgugaccuucuuccaggaggucccccacgugaucgaggaggugaugaacaucguccugaucgcccucagcauccuggccgugcugaaggggcucuacaacuucgcgaccugcggccugguggggcuggucacguuccuccugcugugcggccgcuccugcaccaccagccucuacaaggggguguacgagcugcagacccuggagcucaacauggagacgcugaacaugaccaugccgcuguccugcaccaagaacaacagccaccacuacaucauggugggcaacgagaccggccucgagcugacgcugaccaacaccuccaucaucaaccacaaguucugcaaccucagcgacgcccacaagaagaaccuguacaaccacgcccugauguccaucaucagcaccuuccaccucuccauccccaacuucaaccaguacgaggccaugagcugcgacuucaacgggggcaagaucuccguccaguacaaccugagccacuccuacgccggggacgcggccagccacugcggcacgguggccaacggggugcugcagaccuucaugcggauggccuggggcggcuccuacaucgcgcucgacagcggguacggcaagugggacugcaucaugaccuccuaccaguaccugaucauccagaacaccacgugggaggaccacugccaguucagccgccccucccccaucggguaccugggccuccugagccagcggacccgcgacaucuacaucagccggcgccugcucggcaccuucaccuggacgcuguccgacagcgaggggaaggacaccccgggcggguacugccugacccgguggaugcucaucgaggccgagcugaagugcuucggcaacaccgccgucgccaagugcaacgagaagcacgacgaggaguucugcgacaugcugcgccucuucgacuucaacaagcaggccauccagcggcugaagacggaggcgcagauguccauccagcugaucaacaaggccgugaacgcccucaucaacgaccagcugaucaugaagaaccaccuccgcgacaucauggggauccccuacugcaacuacagcaaguacugguaccugaaccacaccaccaccggcaagacgucccugcccaagugcuggcuggugagcaacggcuccuaccucaacgagacccacuucagcgacgacaucgagcagcaggccgacaacaugaucaccgagaugcugcagaaggaguacauggagcggcaggggaagacgccccugggccucgucgaccuguucguguucuccaccagcuucuaccugaucuccaucuuccugcaccucgugaagaucccgacccaccgccacaucgucggcaagagcugccccaagccccaccggcugaaccacauggggaucugcuccugcgggcuguacaagcagcccggcgugccggugcgcuggaagcggugaggacuagucccuguucccagagcccacuuuuuuuucuuuuuuugaaauaaaauagccugucuuucagaucucaaaggcucuuuucagagccaccaaaaaaaaaaaaaaaaaaaaaaaaaaaaaaaaaaaaaaaaaaaaaaaaaaaaaaaaaaaaaaaaaaaaaaaaaaaaaaaaaaaaaaaaaaaaaaaaaaaaa

SEQ ID NO: 14177 - RNA, 1748 nt, Artificial Sequence
  mRNA product Design a-1 (hSL-A100) comprising derived and/or modified sequence from LASV(G502-SLE-2009;Clade IV)__AIT17126__GPC (opt1)
aggagagucccgcagucggcguccagcggcucugcuuguucgugugugugucguugcaggccuuauucaagcuuaccaugggccagaucgugaccuucuuccaggaggucccccacgugaucgaggaggugaugaacaucguccugaucgcccucagcauccuggccgugcugaaggggcucuacaacuucgcgaccugcggccugguggggcugcucacguuccugcugcucugcggccgcuccugcaccaccgggcuguacaagggcgucuacgagcugcagacccucgagcugaacauggagacgcugaacaugaccaugccgcucagcugcaccaagaacaacucccaccacuacaucauggugggcaacgagaccgggcuggagcugacgcucaccaacaccagcaucaucaaccacaaguucugcaaccuguccgacgcccacaagaagaaccuguacgaccacgcccucaugagcaucaucuccaccuuccaccugagcauccccaacuucaaccaguacgaggccauguccugcgacuucaacggcgggaagaucagcgugcaguacaaccugucccacagcuacgccggcgacgcggccgaccacugcgggacggucgccaacggcgugcuccagaccuucaugcggauggccuggggcggguccuacaucgcgcuggacagcggccgcgggcggugggacugcaucaugaccuccuaccaguaccugaucauccagaacaccacgugggaggaccacugccaguucagccgccccucccccaucggcuaccucggccugcugagccagcggacccgcgacaucuacaucucccggcgccuccuggggaccuucaccuggacgcugagcgacagcgagggcaaggacacccccgggggcuacugccucacccgguggaugcugaucgaggccgagcugaagugcuucgggaacaccgccguggccaagugcaacgagaagcacgacgaggaguucugcgacaugcuccgccuguucgacuucaacaagcaggccauccagcggcugaaggcggaggcccagauguccauccagcucaucaacaaggccgucaacgcccugaucaacgaccagcuggugaugaagaaccaccuccgcgacaucaugggcauccccuacugcaacuacagccgguacugguaccugaaccacacgaccaccggccgcaccucccugcccaagugcuggcucgugagcaacggguccuaccugaacgagacgcacuucagcgacgacaucgagcagcaggccgacaacaugaucaccgagaugcugcagaaggaguacauggagcggcagggcaagaccccgcucgggcuggucgaccuguucguguucuccaccagcuucuaccugaucuccaucuuccuccaccuggugaagaucccgacgcaccgccacaucgucggcaagagcugccccaagccccaccggcugaaccacauggggaucugcuccugcggccucuacaagcagcccggcgugccggugaaguggaagcgcugaggacuagucccuguucccagagcccacuuuuuuuucuuuuuuugaaauaaaauagccugucuuucagaucucaaaggcucuuuucagagccaccaaaaaaaaaaaaaaaaaaaaaaaaaaaaaaaaaaaaaaaaaaaaaaaaaaaaaaaaaaaaaaaaaaaaaaaaaaaaaaaaaaaaaaaaaaaaaaaaaaaaa

SEQ ID NO: 14178 - RNA, 1748 nt, Artificial Sequence
  mRNA product Design a-1 (hSL-A100) comprising derived and/or modified sequence from LASV(G733-SLE-2010;Clade IV)__AIT17154__GPC (opt1)
aggagagucccgcagucggcguccagcggcucugcuuguucgugugugugucguugcaggccuuauucaagcuuaccaugggccagaucgugaccuucuuccaggaggucccccacgugaucgaggaggugaugaacaucguccugaucgcccucagcauccuggccgugcugaaggggcucuacaacuucgcgaccugcggcaucguggggcuggucuccuuccugcuccugugcggccgcagcugcacgaccucccuguacaaggggguguacgagcuccagacccuggagcugaacauggagacccucaacaugacgaugccgcugagcugcaccaagaacaacucccaccacuacaucauggugggcaacgagaccggccuggagcucacccugacgaacaccagcaucaucaaccacaaguucugcaaccuguccgacgcccacaagaagaaccucuacgaccacgcccugaugagcaucaucuccaccuuccaccugagcauccccaacuucaaccaguacgaggccauguccugcgacuucaacgggggcaagaucagcguccaguacaaccucucccacagcuacgccggggacgcggccaaccacugcggcaccaucgccaacggggugcugcagacguucaugcggauggccuggggcggcuccuacaucgcgcuggacagcgggcgcgaccggugggacugcaucaugaccuccuaccaguaccucaucauccagaacaccaccugggaggaccacugccaguucagccgccccucccccaucggcuaccuggggcugcucagccagcggacgcgcgacaucuacaucagccggcgccugcugggcaccuucaccuggacccucuccgacagcgagggcaaggacacgcccgggggcuacugccugacccgguggaugcugaucgaggccgagcucaagugcuucgggaacaccgccguggccaagugcaacgagaagcacgacgaggaguucugcgacaugcugcgccuguucgacuucaacaagcaggccauccagcggcucaaggcggaggcccagauguccauccagcugaucaacaaggccgucaacgcccugaucaacgaccagcucaucaugaagaaccaccuccgcgacaucaugggcauccccuacugcaacuacagcaaguacugguaccugaaccacaccacgaccgggaagaccucccugcccaagugcuggcuggugagcaacggcuccuaccugaacgagacccacuucagcgacgacaucgagcagcaggccgacaacaugaucacggagaugcuccagaaggaguacauggagcggcagggcaagaccccgcuggggcugguggaccucuucgucuucuccaccagcuucuaccugaucuccaucuuccugcaccuggugaagaucccgacccaccgccacguggucggcaagagcugccccaagccccaccggcucaaccacauggggaucugcuccugcggccuguacgggcagcccggcgugccggugaaguggaagcgcugaggacuagucccuguucccagagcccacuuuuuuuucuuuuuuugaaauaaaauagccugucuuucagaucucaaaggcucuuuucagagccaccaaaaaaaaaaaaaaaaaaaaaaaaaaaaaaaaaaaaaaaaaaaaaaaaaaaaaaaaaaaaaaaaaaaaaaaaaaaaaaaaaaaaaaaaaaaaaaaaaaaaa

SEQ ID NO: 14179 - RNA, 1748 nt, Artificial Sequence
  mRNA product Design a-1 (hSL-A100) comprising derived and/or modified sequence from MOPV/LASV reassortant(IGS-1;Clade IV)__AFY05576__GPC (opt1)
aggagagucccgcagucggcguccagcggcucugcuuguucgugugugugucguugcaggccuuauucaagcuuaccaugggccagaucgugaccuucuuccaggaggucccccacgugaucgaggaggugaugaacaucguccugaucgcccucagcgugcuggccgugcugaaggggcucuacaacuucgcgaccugcggccuggucgggcuggugacguuccuccugcugugcggccgcuccugcaccaccagccucuacaaggggguguacgagcugcagacccuggagcucaacauggagacgcugaacaugaccaugccgcuguccugcaccaagaacaacagccaccacuacaucauggucggcaacgagaccggccucgagcugacgcugaccaacaccuccaucaucaaccacaaguucugcaaccucagcgacgcccacaagaagaaccuguacgaccacgcccugauguccaucaucagcaccuuccaccucuccauccccaacuucaaccaguacgaggccaugagcugcgacuucaacgggggcaagaucuccgugcaguacaaccugagccacuccuacgccggggacgcggccaaccacugcggcacgguggccaacgggguccugcagaccuucaugcggauggccuggggcggcagcuacaucgcgcucgacuccgggcgcggcaacugggacugcaucaugaccagcuaccaguaccugaucauccagaacaccacgugggaggaccacugccaguucucccggcccagccccaucggguaccugggccuccugucccagcgcacccgggacaucuacaucagccgccggcugcucggcaccuucaccuggacgcugagcgacuccgagggggaggacaccccgggcggguacugccugacccgcuggaugcucaucgaggccgagcugaagugcuucggcaacaccgccguggccaagugcaacgagaagcacgacgaggaguucugcgacaugcugcggcuguucgacuucaacaagcaggccauccagcgccugaaggcggaggcccagaugagcauccagcugaucaacaaggccgugaacgcccucaucaacgaccagcugaucaugaagaaccaccuccgggacaucauggggauccccuacugcaacuacuccaaguacugguaccucaaccacacgaccaccggccgcaccagccugcccaagugcuggcuggucuccaacggcagcuaccucaacgagacgcacuucuccgacgacaucgagcagcaggccgacaacaugaucaccgagaugcugcagaaggaguacauggagcggcaggggaagacgccccugggccucguggaccuguucguguucagcaccuccuucuaccugaucagcaucuuccugcaccucgucaagaucccgacccaccgccacaucguggggaaguccugccccaagccccaccggcugaaccacaugggcaucugcagcugcgggcuguacaagcagcccggcgugccggucaaguggaagcgcugaggacuagucccuguucccagagcccacuuuuuuuucuuuuuuugaaauaaaauagccugucuuucagaucucaaaggcucuuuucagagccaccaaaaaaaaaaaaaaaaaaaaaaaaaaaaaaaaaaaaaaaaaaaaaaaaaaaaaaaaaaaaaaaaaaaaaaaaaaaaaaaaaaaaaaaaaaaaaaaaaaaaa

SEQ ID NO: 14180 - RNA, 1748 nt, Artificial Sequence
  mRNA product Design a-1 (hSL-A100) comprising derived and/or modified sequence from LASV(LM765-SLE-2012;Clade IV)__AIT17814__GPC (opt1)
aggagagucccgcagucggcguccagcggcucugcuuguucgugugugugucguugcaggccuuauucaagcuuaccaugggccagaucgugaccuucuuccaggaggucccccacgugaucgaggaggugaugaacaucguccugaucgcccucagcauccuggccgugcugaaggggcucuacaacuucgcgaccugcggccugguggggcuggucacguuccuccugcugugcggccgcuccugcaccaccagccucuacaaggggguguacgagcugcagacccuggagcucaacauggagacgcugaacaugaccaugccgcuguccugcaccaagaacaacagccaccacuacaucauggugggcaacgagaccggccucgagcugacgcugaccaacaccuccaucaucgaccacaaguucugcaaccucagcgacgcccaccggaagaaccuguacgaccacgcccugauguccaucaucagcaccuuccaccucuccauccccaacuucaaccaguacgaggccaugagcugcgacuucaacgggggcaagaucuccguccaguacaaccugagccacuccuacgccaaggacgcggccgaccacugcgggacgguggccaacggcgugcugcagaccuucaugcgcauggccuggggcgggagcuacaucgcgcucgacuccggccgggggcgcugggacugcaucaugaccagcuaccaguaccugaucauccagaacaccacgugggaggaccacugccaguucucccggcccagccccaucggcuaccuggggcuccugucccagcgcacccgggacaucuacaucagccgccggcugcucggcaccuucaccuggacgcugagcgacuccgagggcaaggacacccccgggggcuacugccugacccgcuggaugcucaucgaggccgagcugaagugcuucgggaacaccgccgucgccaagugcaacgagaagcacgacgaggaguucugcgacaugcugcggcuguucgacuucaacaagcaggccauccagcgccugaaggcggaggcccagaugagcauccagcugaucaacaaggccgugaacgcccucaucaacgaccagcugaucaugaagaaccaccuccgggacaucaugggcauccccuacugcaacuacuccaaguacugguaccucaaccacacgaccaccgggaagaccagccugcccaagugcuggcugguguccaacggcagcuaccucaacgagacgcacuucuccgacgacaucgagcagcaggccgacaacaugaucaccgagaugcugcagaaggaguacauggagcgccagggcaagaccccgcuggggcucgucgaccuguucguguucagcaccuccuucuaccugaucagcaucuuccugcaccucgugaagaucccgacgcaccggcacaucgucggcaagcccugccccaagccccaccgccugaaccacauggggaucugcuccugcggccuguacaagcagccgggggugcccgugaaguggaagcggugaggacuagucccuguucccagagcccacuuuuuuuucuuuuuuugaaauaaaauagccugucuuucagaucucaaaggcucuuuucagagccaccaaaaaaaaaaaaaaaaaaaaaaaaaaaaaaaaaaaaaaaaaaaaaaaaaaaaaaaaaaaaaaaaaaaaaaaaaaaaaaaaaaaaaaaaaaaaaaaaaaaaa

SEQ ID NO: 14181 - RNA, 1748 nt, Artificial Sequence
  mRNA product Design a-1 (hSL-A100) comprising derived and/or modified sequence from LASV(LM776-SLE-2012;Clade IV)__AIT17824__GPC (opt1)
aggagagucccgcagucggcguccagcggcucugcuuguucgugugugugucguugcaggccuuauucaagcuuaccaugggccagaucgugaccuucuuccaggaggucccccacgugaucgaggaggugaugaacaucguccugaucgcccucagcauccuggccgugcugaaggggcucuacaacuucgcgaccugcggccugguggggcuggucacguuccuccugcugugcggccgcuccugcaccaccagcguguacaaggggguguacgagcuccagacccuggagcugaacauggagacgcucaacaugaccaugccgcuguccugcaccaagaacaacagccaccacuacaucauggucggcaacgagaccggccuggagcucacgcugaccaacaccuccaucaucaaccacaaguucugcaaccugagcgacgcccacaagaagaaccucuacgaccacgcccugauguccaucaucagcaccuuccaccuguccauccccaacuucaaccaguacgaggccaugagcugcgacuucaacgggggcaagaucuccgugcaguacaaccucagccacuccuacgccggggacgcggccaaccacugcggcacgguggccaacgggguccugcagaccuucaugcggauggccuggggcggcagcuacaucgcgcuggacuccgggcacggcaagugggacugcaucaugaccagcuaccaguaccucaucauccagaacaccacgugggaggaccacugccaguucucccgccccagccccaucggguaccugggccugcucucccagcggacccgcgacaucuacaucagccggcgccugcugggcaccuucaccuggacgcucagcgacuccgaggggaaggacaccccgggcggguacugccugacccgguggaugcugaucgaggccgagcucaagugcuucggcaacaccgccguggccaagugcaacgagaagcacgacgaggaguucugcgacaugcugcgccuguucgacuucaacaagcaggccauccagcggcucaaggcggaggcccagaugagcauccagcugaucaacaaggccgugaacgcccugaucaacgaccagcucaucaugaagaaccaccuccgcgacaucauggggauccccuacugcaacuacuccaaguacugguaccugaaccacacgaccaccggcaagaccagccugcccaagugcuggcuggucuccaacggcagcuaccugaacgagacgcacuucuccgacgacaucgagcagcaggccgacaacaugaucaccgagaugcuccagaaggaguacauggagcggcaggggaagacgccccugggccugguggaccucuucguguucagcaccuccuucuaccugaucagcaucuuccugcaccuggucaagaucccgacccaccgccacaucguggggaaguccugccccaagccccaccggcucaaccacaugggcaucugcagcugcgggcuguacaagcagcccggcgugccgguccgcuggaagcggugaggacuagucccuguucccagagcccacuuuuuuuucuuuuuuugaaauaaaauagccugucuuucagaucucaaaggcucuuuucagagccaccaaaaaaaaaaaaaaaaaaaaaaaaaaaaaaaaaaaaaaaaaaaaaaaaaaaaaaaaaaaaaaaaaaaaaaaaaaaaaaaaaaaaaaaaaaaaaaaaaaaaa

SEQ ID NO: 14182 - RNA, 1748 nt, Artificial Sequence
  mRNA product Design a-1 (hSL-A100) comprising derived and/or modified sequence from LASV(Mad39;Clade IV)__ANH09722__GPC (opt1)
aggagagucccgcagucggcguccagcggcucugcuuguucgugugugugucguugcaggccuuauucaagcuuaccaugggccagaucgugaccuucuuccaggaggucccccacgugaucgaggaggugaugaacaucguccugaucgcccucagcauccuggccgugcugaaggggcucuacaacguggcgaccugcggccugaucgggcuggucacguuccuccugcugugcggccgcuccugcaccaccacccucuacaaggggguguacgagcugcaggcccuggagcucaacauggagacgcugaacaugaccaugccgcugagcugcaccaagaacaacucccaccacuacauccgggugggcaacgagaccggccucgagcugacgcugaccaacaccagccucaucaaccacaaguucugcaaccuguccgacgcccacaagaagaaccuguacgaccacgcccucaugagcaucaucuccaccuuccaccugagcauccccaacuucaaccaguacgaggccauguccugcgacuucaacgacgggaagaucagcguccaguacaaccugucccacacguacgcgggcgacaccgccaaccacugcgggaccguggccaacggcgugcuccagaccuucaugcgcauggccuggggcgggagcuacaucgcgcuggacuccggccgcgggggcugggacugcaucaugacgagcuaccaguaccugaucauccagaacaccaccugggaggaccacugccaguucucccggcccagccccaucggguaccucggccugcugucccagcggacccgcgacaucuacaucagccggcgccuccugggcacguucaccuggacccuguccgacagcgaggggaaggacaccccgggcggguacugccucacgcgguggaugcugaucgaggccgagcugaagugcuucggcaacaccgccgucgccaagugcaacgagaagcacgacgaggaguucugcgacaugcuccgccuguucgacuucaacaagcaggccauccagcggcugaaggcggaggcccagaugagcauccagcucaucaacaaggccgugaacgcccugaucaacgaccagcugaucaugaagaaccaccuccgcgacaucauggggauccccuacugcaacuacuccaaguacugguaccugaaccacaccgugaccggcaagacgagccugcccaagugcuggcucgucuccaacggcagcuaccugaacgagacccacuucuccgacgacaucgagcagcaggccgacaacaugaucaccgagaugcugcagaaggaguacauggagcggcaggggaagacgccccucggccugguggaccuguucguguucagcaccuccuucuaccugaucagcaucuuccuccaccuggucaagaucccgacccaccgccacgugguggggaagcccugccccaagccccaccggcugaaccacaugggcaucugcuccugcggguucuacaagcagccgggcguccccgugcgcuggaagcggugaggacuagucccuguucccagagcccacuuuuuuuucuuuuuuugaaauaaaauagccugucuuucagaucucaaaggcucuuuucagagccaccaaaaaaaaaaaaaaaaaaaaaaaaaaaaaaaaaaaaaaaaaaaaaaaaaaaaaaaaaaaaaaaaaaaaaaaaaaaaaaaaaaaaaaaaaaaaaaaaaaaaa

SEQ ID NO: 14183 - RNA, 1748 nt, Artificial Sequence
  mRNA product Design a-1 (hSL-A100) comprising derived and/or modified sequence from LASV(Z0947-SLE-2011;Clade IV)__AIT17840__GPC (opt1)
aggagagucccgcagucggcguccagcggcucugcuuguucgugugugugucguugcaggccuuauucaagcuuaccaugggccagaucgugaccuucuuccaggaggucccccacgugaucgaggaggugaugaacaucguccugaucgcccucagcauccuggccgugcugaaggggcucuacaacuucgcgaccugcggccugguggggcuggucacguuccuccugcugugcggccgcuccugcaccaucagccucuacaaggggguguacgagcugcagacccuggagcucaacauggagacccugaacaugacgaugccgcuguccugcaccaagaacaacagccaccacuacaucauggugggcaacgagaccggccucgagcugacccugacgaacaccuccaucaucaaccacaaguucugcaaccucagcgacgcccacaagaagaaccuguacgaccacgcccugauguccaucaucagcaccuuccaccucuccauccccaacuucaaccaguacgaggccaugagcugcgacuucaacgggggcaagaucuccguccaguacaaccugagccacuccuacgccggggacgcggccaaccacugcggcaccguggccaacggggugcugcagacguucaugcggauggccuggggcggcagcuacaucgcgcucgacuccgggcgcgaccggugggacugcaucaugaccagcuaccaguaccugaucauccagaacaccaccugggaggaccacugccaguucucccgccccagccccaucggcuaccuggggcuccugucccagcggacgcgcgacaucuacaucagccggcgccugcucggcaccuucaccuggacccugagcgacuccgagggcaaggacacgcccgggggcuacugccugacccgguggaugcucaucgaggccgagcugaagugcuucgggaacaccgccgucgccaagugcaacgagaagcacgacgaggaguucugcgacaugcugcgccucuucgacuucaacaagcaggccauccagcggcugaaggcggaggcccagaugagcauccagcugaucaacaaggccgugaacgcccucaucaacgaccagcugaucaugaagaaccaccuccgcgacaucaugggcauccccuacugcaacuacuccaaguacugguaccugaaccacaccacgaccgggaagaccagccugcccaagugcuggcugguguccaacggcagcuaccucaacgagacccacuucuccgacgacaucgagcagcaggccgacaacaugaucacggagaugcugcagaaggaguacauggagcggcagggcaagaccccgcuggggcucgucgaccuguucguguucagcaccuccuucuaccugaucagcaucuuccugcaccucgugaagaucccgacccaccgccacaucgucggcaagcccugccccaagccccaccggcugaaccacauggggaucugcuccugcggccuguacaagcagccgggggugcccgugaaguggaagcgcugaggacuagucccuguucccagagcccacuuuuuuuucuuuuuuugaaauaaaauagccugucuuucagaucucaaaggcucuuuucagagccaccaaaaaaaaaaaaaaaaaaaaaaaaaaaaaaaaaaaaaaaaaaaaaaaaaaaaaaaaaaaaaaaaaaaaaaaaaaaaaaaaaaaaaaaaaaaaaaaaaaaaa

SEQ ID NO: 14184 - RNA, 1748 nt, Artificial Sequence
  mRNA product Design a-1 (hSL-A100) comprising derived and/or modified sequence from LASV(Josiah;Clade IV)__NP_694870__GPC (opt4)
aggagagucccgcagucggcguccagcggcucugcuuguucgugugugugucguugcaggccuuauucaagcuuaccaugggccagaucgugaccuucuuccaggaggugccccacgugaucgaggaggugaugaacaucgugcugaucgcccugagcgugcuggccgugcugaagggccuguacaacuucgccaccugcggccuggugggccuggugaccuuccugcugcugugcggcagaagcugcaccaccagccuguacaagggcguguacgagcugcagacccuggagcugaacauggagacccugaacaugaccaugccccugagcugcaccaagaacaacagccaccacuacaucauggugggcaacgagaccggccuggagcugacccugaccaacaccagcaucaucaaccacaaguucugcaaccugagcgacgcccacaagaagaaccuguacgaccacgcccugaugagcaucaucagcaccuuccaccugagcauccccaacuucaaccaguacgaggccaugagcugcgacuucaacggcggcaagaucagcgugcaguacaaccugagccacagcuacgccggcgacgccgccaaccacugcggcaccguggccaacggcgugcugcagaccuucaugagaauggccuggggcggcagcuacaucgcccuggacagcggcagaggcaacugggacugcaucaugaccagcuaccaguaccugaucauccagaacaccaccugggaggaccacugccaguucagcagacccagccccaucggcuaccugggccugcugagccagagaaccagagacaucuacaucagcagaagacugcugggcaccuucaccuggacccugagcgacagcgagggcaaggacacccccggcggcuacugccugaccagauggaugcugaucgaggccgagcugaagugcuucggcaacaccgccguggccaagugcaacgagaagcacgacgaggaguucugcgacaugcugagacuguucgacuucaacaagcaggccauccagagacugaaggccgaggcccagaugagcauccagcugaucaacaaggccgugaacgcccugaucaacgaccagcugaucaugaagaaccaccugagagacaucaugggcauccccuacugcaacuacagcaaguacugguaccugaaccacaccaccaccggcagaaccagccugcccaagugcuggcuggugagcaacggcagcuaccugaacgagacccacuucagcgacgacaucgagcagcaggccgacaacaugaucaccgagaugcugcagaaggaguacauggagagacagggcaagaccccccugggccugguggaccuguucguguucagcaccagcuucuaccugaucagcaucuuccugcaccuggugaagauccccacccacagacacaucgugggcaagagcugccccaagccccacagacugaaccacaugggcaucugcagcugcggccuguacaagcagcccggcgugcccgugaaguggaagagaugaggacuagucccuguucccagagcccacuuuuuuuucuuuuuuugaaauaaaauagccugucuuucagaucucaaaggcucuuuucagagccaccaaaaaaaaaaaaaaaaaaaaaaaaaaaaaaaaaaaaaaaaaaaaaaaaaaaaaaaaaaaaaaaaaaaaaaaaaaaaaaaaaaaaaaaaaaaaaaaaaaaaa

SEQ ID NO: 14185 - RNA, 1745 nt, Artificial Sequence
  mRNA product Design a-1 (hSL-A100) comprising derived and/or modified sequence from LASV(LP;Clade I)__AAF86701__GPC (opt4)
aggagagucccgcagucggcguccagcggcucugcuuguucgugugugugucguugcaggccuuauucaagcuuaccaugggccagaucaucaccuucuuccaggaggugccccacgugaucgaggaggugaugaacaucgugcugaucgcccugagccugcuggccauccugaagggccuguacaacaucgccaccugcggcaucaucggccugguggccuuccuguuccugugcggcaagagcugcagccugacccugaagggcggcuacgagcugcagacccuggagcugaacauggagacccugaacaugaccaugccccugagcugcaccaagaacagcagccaccacuacaucagagugggcaacgagaccggccuggagcugacccugaccaacaccagcaucaucaaccacaaguucugcaaccugagcgacgcccacaagaagaaccuguacgaccacgcccugaugagcaucaucagcaccuuccaccugagcauccccaacuucaaccaguacgaggccaugagcugcgacuucaacggcggcaagaucagcgugcaguacaaccugagccacagcuacgccggcgacgccgccgagcacugcggcaccguggccaacggcgugcugcagaccuucaugagaauggccuggggcggcagauacaucgcccuggacagcggcaagggcaacugggacugcaucaugaccagcuaccaguaccugaucauccagaacaccaccugggaggaccacugccaguucagcagacccagccccaucggcuaccugggccugcugagccagagaaccagagacaucuacaucagcagaagacugcugggcaccuucaccuggacccugagcgacagcgagggcaacgagacccccggcggcuacugccugaccagauggaugcugaucgaggccgagcugaagugcuucggcaacaccgccguggccaagugcaacgagaagcacgacgaggaguucugcgacaugcugagacuguucgacuucaacaagcaggccaucagaagacugaaggccgaggcccagaugagcauccagcugaucaacaaggccgugaacgcccugaucaacgaccagcugaucaugaagaaccaccugagagacaucaugggcauccccuacugcaacuacagcaaguacugguaccugaaccacaccagcagcggcagaaccagccugcccaagugcuggcugaucagcaacggcagcuaccugaacgagacccaguucagcgacgacaucgagcagcaggccgacaacaugaucaccgagaugcugcagaaggaguacaucgagagacagggcaagaccccccugggccugguggacaucuucaucuucagcaccagcuucuaccugaucagcaucuuccugcaccugaucaagauccccacccacagacacaucgugggcaagcccugccccaagccccacagacugaaccacaugggcgugugcagcugcggccuguacaagcaccccggcgugcccaccaaguggaagagaugaggacuagucccuguucccagagcccacuuuuuuuucuuuuuuugaaauaaaauagccugucuuucagaucucaaaggcucuuuucagagccaccaaaaaaaaaaaaaaaaaaaaaaaaaaaaaaaaaaaaaaaaaaaaaaaaaaaaaaaaaaaaaaaaaaaaaaaaaaaaaaaaaaaaaaaaaaaaaaaaaaaaa

SEQ ID NO: 14186 - RNA, 1745 nt, Artificial Sequence
  mRNA product Design a-1 (hSL-A100) comprising derived and/or modified sequence from LASV(803213;Clade II)__AAF86703__GPC (opt4)
aggagagucccgcagucggcguccagcggcucugcuuguucgugugugugucguugcaggccuuauucaagcuuaccaugggccagaucaucaccuucuuccaggaggugccccacgugaucgaggaggugaugaacaucgugcugaucgcccugagccugcuggccauccugaagggcaucuacaacguggccaccugcggccuguucggccugaucagcuuccugcugcugugcggcagaagcugcagcgugaccuacaagggcguguacgagcugcagacccuggagcugaacauggccaaccugaacaugaccaugccccugagcugcaccaagaacaacagccaccacuacaucauggugggcaacgagaccggccuggagcugacccugaccaacaccagcaucaucaaccacaaguucugcaaccugagcgacgcccacaagaagaaccuguacgaccacgcccugaugagcaucaucagcaccuuccaccugagcauccccaacuucaaccaguacgaggccaugagcugcgacuucaacggcggcaagaucagcgugcaguacaaccugagccacagcuucgccguggacgccgccaaccacugcggcaccaucgccaacggcgugcugcagaccuucaugagaauggccuggggcggcagcuacaucgcccuggacagcggcaagggcaacugggacugcaucaugaccagcuaccaguaccugaucauccagaacaccaccugggaggaccacugccaguucagcagacccagccccaucggcuaccugggccugcugagccagagaaccagagacaucuacaucagcagaagacugcugggcaccuucaccuggacccugagcgacagcgagggcaacgaggcccccggcggcuacugccugaccagauggaugcugaucgaggccgagcugaagugcuucggcaacaccgccguggccaagugcaacgagaagcacgacgaggaguucugcgacaugcugagacuguucgacuucaacaagcaggccaucaagagacugaagaccgaggcccagaugagcauccagcugaucaacaaggccgugaacgcccugaucaacgaccagcugaucaugaagaaccaccugagagacaucaugggcauccccuacugcaacuacagcagauacugguaccugaaccacaccgugaccggcaagaccagccugcccagaugcuggcuggugagcaacggcagcuaccugaacgagacccacuucagcgacgacaucgagcagcaggccgacaacaugaucaccgagaugcugcagaaggaguacauggacagacagggcaagaccccccugggccugguggaccuguucguguucagcaccagcuucuaccugaucagcaucuuccugcaccuggugaagauccccacccacagacacaucgugggcaagcccugccccaagccccacagacugaaccacaugggcaucugcagcugcggccuguacaagcaccccggcgugcccgugaaguggaagagaugaggacuagucccuguucccagagcccacuuuuuuuucuuuuuuugaaauaaaauagccugucuuucagaucucaaaggcucuuuucagagccaccaaaaaaaaaaaaaaaaaaaaaaaaaaaaaaaaaaaaaaaaaaaaaaaaaaaaaaaaaaaaaaaaaaaaaaaaaaaaaaaaaaaaaaaaaaaaaaaaaaaaa

SEQ ID NO: 14187 - RNA, 1745 nt, Artificial Sequence
  mRNA product Design a-1 (hSL-A100) comprising derived and/or modified sequence from LASV(GA391;Clade III)__CAA36645__GPC (opt4)
aggagagucccgcagucggcguccagcggcucugcuuguucgugugugugucguugcaggccuuauucaagcuuaccaugggccagaucgugaccuucuuccaggaggugccccacgugaucgaggaggugaugaacaucgugcugaucgcccugagcauccuggccauccugaagggccuguacaacguggccaccugcggccugaucggccuggugaccuuccugcugcugagcggcagaagcugcagccugaucuacaagggcaccuacgagcugcagacccuggagcugaacauggagacccugaacaugaccaugccccugagcugcaccaagaacaacagccaccacuacaucagagugggcaacgagaccggccuggagcugacccugaccaacaccagcauccugaaccacaaguucugcaaccugagcgacgcccacaagagaaaccuguacgaccacagccugaugagcaucaucagcaccuuccaccugagcauccccaacuucaaccaguacgaggccaugagcugcgacuucaacggcggcaagaucaccgugcaguacaaccugagccacagcuucgccguggacgccgccggccacugcggcacccuggccaacggcgugcugcagaccuucaugagaauggccuggggcggcagcuacaucgcccuggacagcggcagaggcaacugggacugcaucaugaccagcuaccaguaccugaucauccagaacaccaccugggacgaccacugccaguucagcagacccagccccaucggcuaccugggccugcugagccagagaaccagagacaucuacaucagcagaagacugcugggcaccuucaccuggacccugagcgacagcgagggcaacgagacccccggcggcuacugccugaccagauggaugcugaucgaggccgagcugaagugcuucggcaacaccgccguggccaagugcaacgagaagcacgacgaggaguucugcgacaugcugagacuguucgacuucaacaagcaggccaucagaagacugaagaccgaggcccagaugagcauccagcugaucaacaaggccgugaacgcccugaucaacgaccagcugaucaugaagaaccaccugagagacaucaugggcauccccuacugcaacuacagcagauacugguaccugaaccacaccagcaccggcaagaccagccugcccagaugcuggcugaucagcaacggcagcuaccugaacgagaccaaguucagcgacgacaucgagcagcaggccgacaacaugaucaccgagaugcugcagaaggaguacaucgacagacagggcaagaccccccugggccugguggaccuguucguguucagcaccagcuucuaccugaucagcaucuuccugcaccuggugaagauccccacccacagacacaucgugggcaagcccugccccaagccccacagacugaaccacaugggcaucugcagcugcggccuguacaagcagcccggcgugcccgugagauggaagagaugaggacuagucccuguucccagagcccacuuuuuuuucuuuuuuugaaauaaaauagccugucuuucagaucucaaaggcucuuuucagagccaccaaaaaaaaaaaaaaaaaaaaaaaaaaaaaaaaaaaaaaaaaaaaaaaaaaaaaaaaaaaaaaaaaaaaaaaaaaaaaaaaaaaaaaaaaaaaaaaaaaaaa

SEQ ID NO: 14188 - RNA, 1748 nt, Artificial Sequence
  mRNA product Design a-1 (hSL-A100) comprising derived and/or modified sequence from LASV(AV;Clade V)__CCA30314__GPC (opt4)
aggagagucccgcagucggcguccagcggcucugcuuguucgugugugugucguugcaggccuuauucaagcuuaccaugggccagaucgugaccuucuuccaggaggugccccacgugaucgaggaggugaugaacaucgugcugaucgcccugagcauccuggccgugcugaagggccuguacaacaucgccaccugcggccugaucggccugaucaccuuccugcugcugugcggcagaagcugcagcagcaaccuguacaagggcguguacgagcugcagagccuggaccugaacauggagacccugaacaugaccaugccccugagcugcaccaagaacaacagccaccacuacaucagagugggcaacgacaccggccuggagcugacccugaccaacaccagcauccugaaccacaaguucugcaaccugagcgacgcccacaagaaggaccuguacgaccacgcccugaugagcaucaucagcaccuuccaccugagcauccccaacuucaaccaguacgaggccaugagcugcgacuucaacggcggcaagaucagcgugcaguacaaccugagccacagcuacgccaucgacgccgccaaccacugcggcaccguggccaacggcauccugcagaccuucaugagaauggccuggggcggcagcuacaucgcccuggacagcggcagaggcaacugggacugcaucaugaccagcuaccaguaccugaucauccagaacaccaccugggagaaccacugccaguucagcagacccagccccaucggcuaccugggccugcugagccagagaaccagagacaucuacaucagcagaagacugcugggcaccuucaccuggacccugagcgacagcgagggcaacgccacccccggcggcuacugccugaccagauggaugcugaucgaggccgagcugaagugcuucggcaacaccgccguggccaagugcaacgagaagcacgacgaggaguucugcgacaugcugagacuguucgacuucaacaagcaggccaucagcagacugaagagcgaggcccagaugagcauccagcugaucaacaaggccgugaacgcccugaucaacgaccagcugaucaugaagaaccaccugagagacaucaugggcauccccuacugcaacuacagcaaguacugguaccugaaccacaccaucaccggcaagaccagccugcccaagugcuggcuggugagcaacggcagcuaccugaacgagacccacuucagcgacgacaucgagcagcaggccgacaacaugaucaccgagaugcugcagaaggaguacauggagagacagggcaagaccccccugggccugguggaccuguucguguucagcaccagcuucuaccugaucagcaucuuccugagacuggugaagauccccacccacagacacaucgugggcaagcccugccccaagccccacagacugaaccacaugggcaucugcagcugcggccuguacaagcagcccggcgugcccgugagauggaagagaugaggacuagucccuguucccagagcccacuuuuuuuucuuuuuuugaaauaaaauagccugucuuucagaucucaaaggcucuuuucagagccaccaaaaaaaaaaaaaaaaaaaaaaaaaaaaaaaaaaaaaaaaaaaaaaaaaaaaaaaaaaaaaaaaaaaaaaaaaaaaaaaaaaaaaaaaaaaaaaaaaaaaa

SEQ ID NO: 14189 - RNA, 1745 nt, Artificial Sequence
  mRNA product Design a-1 (hSL-A100) comprising derived and/or modified sequence from LASV(Togo/2016/7082;Clade VI)__AMR44577__GPC (opt4)
aggagagucccgcagucggcguccagcggcucugcuuguucgugugugugucguugcaggccuuauucaagcuuaccaugggccagaucaucaccuucuuccaggaggugccccacgugaucgaggaggugaugaacaucgugcugaucgcccugagccugcuggccauccugaagggcguguacaacguggccaccugcggcaucaucggccuggugaccuuccuguuccugugcggcagaagcugcagccugaucuacaagggcagcuacgagcugcagacccuggagcugaacauggagacccugaacaugaccaugccccugagcugcaccaagaacagcagccaccacuacaucagagugggcaacgagaccggccuggagcugacccugaccaacaccagcaucaucaaccacaaguucugcaaccugagcgacgcccacaagagaaaccuguacgaccacgcccugaugagcauccugagcaccuuccaccugagcauccccaacuucaaccaguacgaggccaugagcugcgacuucaacggcggcaagaucagcgugcaguacaaccugagccacgccuacgccguggacgccgccgagcacugcggcaccguggccaacggcgugcugcagaccuucaugagaauggccuggggcggcagcuacaucgcccuggacagcggcagaggcaacugggacugcaucaugaccagcuaccaguaccugaucauccagaacaccaccugggaggaccacugccaguucagcagacccagccccaucggcuaccugggccugcugagccagagaaccagagacaucuacaucagcagaagacugcugggcaccuucaccuggacccugagcgacagcgagggcaacgagacccccggcggcuacugccugaccagauggaugcugaucgaggccgagcugaagugcuucggcaacaccgccguggccaagugcaacgagaagcacgacgaggaguucugcgacaugcugagacuguucgacuucaacaagcaggccauccagagacugaagagcgaggcccagaugagcauccagcugaucaacaaggccgugaacgcccugaucaacgaccagcugaucaugaagaaccaccugagagacaugaugggcauccccuacugcaacuacagcaaguacugguaccugaaccacaccagcagcggcagaaccagccugcccaagugcuggcuggugagcaacggcagcuaccugaacgagacccacuucagcgacgacaucgagcagcaggccgacaacaugaucaccgagaugcugcagaaggaguacaucgacagacagggcaagaccccccugggccugguggaccuguucguguucagcaccagcuucuaccugaucagcaucuuccugcaccugaucaagauccccacccacagacacaucgugggcaagcccugccccaagccccacagacugaaccacaugggcaucugcagcugcggccuguacaagcagcccggcgugcccaccagauggaagagaugaggacuagucccuguucccagagcccacuuuuuuuucuuuuuuugaaauaaaauagccugucuuucagaucucaaaggcucuuuucagagccaccaaaaaaaaaaaaaaaaaaaaaaaaaaaaaaaaaaaaaaaaaaaaaaaaaaaaaaaaaaaaaaaaaaaaaaaaaaaaaaaaaaaaaaaaaaaaaaaaaaaaa

SEQ ID NO: 14190 - RNA, 1745 nt, Artificial Sequence
  mRNA product Design a-1 (hSL-A100) comprising derived and/or modified sequence from LASV(KAK-428;Clade n.d. (VII))__ANH09740__GPC (opt4)
aggagagucccgcagucggcguccagcggcucugcuuguucgugugugugucguugcaggccuuauucaagcuuaccaugggccagaucgugaccuucuuccaggaggugccccacgugaucgaggaggugaugaacaucgugcugaucgcccugagccugcuggccauccugaagggccuguacaacuucgccaccugcggcgugaucggccugaucaccuuccugcugcugugcggcagaagcugcagcgccaccuacaagggccaguacgagcugcagacccuggagcugaacauggagagccugaacaugaccaugccccugagcugcaccaagaacaacagccaccacuacaucagagccggcaacaacaccggccuggagcugacccugaccaacaccagcaucaucagccacaaguucugcaaccugagcgacgcccacaagaagaaccuguacgaccacacccugaugagcaucaucaccaccuuccaccugagcauccccaacuucaaccaguacgaggccaugagcugcgacuucaacggcggcaagaucagcauccaguacaaccugagccacagcuacgccggcgacgccgcccagcacugcggcaccguggccaacggcgugcugcagaccuucaugagaauggccuggggcggcagcuaccuggcccuggacagcggcagaagaggcugggacugcaucaucagcagcuaccaguaccugaucauccagaacaccaccugggacgaccacugccaguucagcagacccagccccaucggcuaccugggcuucgugagccagaagaccagagacaucuacaucagcagaagacugcugggcaccuucaccuggacccugagcgacagcgagggccacgacaugcccggcggcuacugccugaccagauggaugcugaucgaggccgaccugaagugcuucggcaacaccgccguggccaagugcaacgagaagcacgacgaggaguucugcgacauguggagacuguucgacuucaacaagcaggccauccagagacugaaggccgaggcccagaugaacauccagcugaucaacaaggccgugaacgcccugaucaacgaccagcugaugaugaagaaccaccugagagacaucaugggcauccccuacugcaacuacagcaaguucugguaccugaacaacaccaccaccggcagaaccagccugcccagaugcuggcugaucagcaacggcagcuaccugaacgagacccacuucagcgacgacaucgagcagcaggccgacaacaugaucaccgagaugcugcagaaggaguacauggacagacagggcaagaccccccugggccugguggaccuguucguguucagcaccagcuucuaccugaucaccaucuuccugcaccuggugaagauccccacccacagacacaucgugggcaagcccugccccaagccccacagacugaaccacaugggcaucugcagcugcggccuguacaagcagcccggcgugcccgugagauggaagagaugaggacuagucccuguucccagagcccacuuuuuuuucuuuuuuugaaauaaaauagccugucuuucagaucucaaaggcucuuuucagagccaccaaaaaaaaaaaaaaaaaaaaaaaaaaaaaaaaaaaaaaaaaaaaaaaaaaaaaaaaaaaaaaaaaaaaaaaaaaaaaaaaaaaaaaaaaaaaaaaaaaaaa

SEQ ID NO: 14191 - RNA, 1745 nt, Artificial Sequence; identical to SEQ ID NO: 14185
  mRNA product Design a-1 (hSL-A100) comprising derived and/or modified sequence from LASV(Pinneo-NIG-1969;Clade I)__AIT17836__GPC (opt4)

SEQ ID NO: 14192 - RNA, 1745 nt, Artificial Sequence
  mRNA product Design a-1 (hSL-A100) comprising derived and/or modified sequence from LASV(ISTH0009-NIG-2011;Clade II)__AIT17404__GPC (opt4)
aggagagucccgcagucggcguccagcggcucugcuuguucgugugugugucguugcaggccuuauucaagcuuaccaugggccagaucaucaccuucuuccaggaggugccccacgugaucgaggaggugaugaacaucgugcugaucgcccugagccugcuggccauccugaagggcaucuacaacguggccaccugcggccuguucggccuggugagcuuccugcugcugugcggcagaagcugcagcaccaccuacaagggcguguacgagcugcagacccuggagcuggacauggccagccugaacaugaccaugccccugagcugcaccaagaacaacagccaccacuacaucauggugggcaacgagaccggccuggagcugacccugaccaacaccagcaucaucaaccacaaguucugcaaccugagcgacgcccacaagaagaaccuguacgaccacgcccugaugagcaucaucagcaccuuccaccugagcauccccaacuucaaccaguacgaggccaugagcugcgacuucaacggcggcaagaucagcgugcaguacaaccugagccacgccuacgccguggacgccgccaaccacugcggcaccaucgccaacggcgugcugcagaccuucaugagaauggccuggggcggcagcuacaucgcccuggacagcggcaagggcagcugggacugcaucaugaccagcuaccaguaccugaucauccagaacaccaccugggaggaccacugccaguucagcagacccagccccaucggcuaccugggccugcugagccagagaaccagagacaucuacaucagcagaagacugcugggcaccuucaccuggacccugagcgacagcgagggcaacgagacccccggcggcuacugccugaccagauggaugcugaucgaggccgagcugaagugcuucggcaacaccgccguggccaagugcaacgagaagcacgacgaggaguucugcgacaugcugagacuguucgacuucaacaagcaggccaucagaagacugaagaccgaggcccagaugagcauccagcugaucaacaaggccgugaacgcccugaucaacgaccagcugaucaugaagaaccaccugagagacaucaugggcauccccuacugcaacuacagcaaguacugguaccugaaccacaccgugaccggcaagaccagccugcccagaugcuggcuggugagcaacggcagcuaccugaacgagacccacuucagcgacgacaucgagcagcaggccgacaacaugaucaccgagcugcugcagaaggaguacauggacagacagggcaagaccccccugggccugguggaccuguucguguucagcaccagcuucuaccugaucagcaucuuccugcaccugaucaagauccccacccacagacacaucaccggcaagcccugccccaagccccacagacugaaccacaugggcaucugcagcugcggccuguacaagcaccccggcgugcccgugaaguggaagagaugaggacuagucccuguucccagagcccacuuuuuuuucuuuuuuugaaauaaaauagccugucuuucagaucucaaaggcucuuuucagagccaccaaaaaaaaaaaaaaaaaaaaaaaaaaaaaaaaaaaaaaaaaaaaaaaaaaaaaaaaaaaaaaaaaaaaaaaaaaaaaaaaaaaaaaaaaaaaaaaaaaaaa

SEQ ID NO: 14193 - RNA, 1745 nt, Artificial Sequence
  mRNA product Design a-1 (hSL-A100) comprising derived and/or modified sequence from LASV(ISTH2010-NIG-2012;Clade II)__AIT17482__GPC (opt4)
aggagagucccgcagucggcguccagcggcucugcuuguucgugugugugucguugcaggccuuauucaagcuuaccaugggccagaucaucaccuucuuccaggaggugccccacgugaucgaggaggugaugaacaucgugcugaucgcccugagccugcuggccauccugaagggcaucuacaacguggccaccugcggccuguucggccuggugagcuuccugcugcugugcggcagaagcugcagcaccaccuacaagggcguguacgagcugcagacccuggagcuggacauggccagccugaacaugaccaugccccugagcugcaccaagaacaacagccaccacuacaucauggugggcaacgagaccggccuggagcugacccugaccaacaccagcaucaucaaccacaaguucugcaaccugagcgacgcccacaagaagaaccuguacgaccacgcccugaugagcaucaucagcaccuuccaccugagcauccccaacuucaaccaguacgaggccaugagcugcgacuucaacggcggcaagaucagcgugcaguacaaccugagccacgccuacgccguggacgccgccaaccacugcggcaccaucgccaacggcgugcugcagaccuucaugagaauggccuggggcggcagcuacaucgcccuggacagcggcaagggcagcugggacugcaucaugaccagcuaccaguaccugaucauccagaacaucaccugggaggaccacugccaguucagcagacccagccccaucggcuaccugggccugcugagccagagaaccagagacaucuacaucagcagaagacugcugggcaccuucaccuggacccugagcgacagcgagggcaacgagacccccggcggcuacugccugaccagauggaugcugaucgaggccgagcugaagugcuucggcaacaccgccguggccaagugcaacgagaagcacgacgaggaguucugcgacaugcugagacuguucgacuucaacaagcaggccaucagaagacugaagaccgaggcccagaugagcauccagcugaucaacaaggccgugaacgcccugaucaacgaccagcugaucaugaagaaccaccugagagacaucaugggcauccccuacugcaacuacagcaaguacugguaccugaaccacaccgugaccggcaagaccagccugcccagaugcuggcuggugagcaacggcagcuaccugaacgagacccacuucagcgacgacaucgagcagcaggccgacaacaugaucaccgagcugcugcagaaggaguacaucgacagacagggcaagaccccccugggccugguggaccuguucguguucagcaccagcuucuaccugaucagcaucuuccugcaccuggugaagauccccacccacagacacguggugggcaagcccugccccaagccccacagacugaaccacaugggcaucugcagcugcggccuguacaagcaccccggcgugcccgugaaguggaagagaugaggacuagucccuguucccagagcccacuuuuuuuucuuuuuuugaaauaaaauagccugucuuucagaucucaaaggcucuuuucagagccaccaaaaaaaaaaaaaaaaaaaaaaaaaaaaaaaaaaaaaaaaaaaaaaaaaaaaaaaaaaaaaaaaaaaaaaaaaaaaaaaaaaaaaaaaaaaaaaaaaaaaa

SEQ ID NO: 14194 - RNA, 1745 nt, Artificial Sequence
  mRNA product Design a-1 (hSL-A100) comprising derived and/or modified sequence from LASV(Lassa virus/H.sapiens-wt/NGA/2015/ISTH_0543;Clade II)__AVO03639__GPC (opt4)
aggagagucccgcagucggcguccagcggcucugcuuguucgugugugugucguugcaggccuuauucaagcuuaccaugggccagaucaucaccuucuuccaggaggugccccacgugaucgaggaggugaugaacaucgugcugaucgcccugagccugcuggccauccugaagggcaucuacaacguggccaccugcggccuguucggccuggugagcuuccugcugcugugcggcagaagcugcagcaccaccuacaagggcguguacgagcugcagacccuggagcuggacauggccaaccugaacaugaccaugccccugagcugcaccaagaacaacagccaccacuacaucauggugggcaacgagaccggccuggagcugacccugaccaacaccagcaucaucaaccacaaguucugcaaccugagcgacgcccacaagaagaaccuguacgaccacgcccugaugagcaucaucagcaccuuccaccugagcauccccaacuucaaccaguacgaggccaugagcugcgacuucaacggcggcaagaucagcgugcaguacaaccugagccacaccuacgccguggacgccgccaaccacugcggcaccaucgccaacggcgugcugcagaccuucaugagaauggccuggggcggcagcuacaucgcccuggacagcggcaagggcagcugggacugcaucaugaccagcuaccaguaccuggugauccagaacaccaccugggaggaccacugccaguucagcagacccagccccaucggcuaccugggccugcugagccagagaaccagagacaucuacaucagcagaagacugcugggcaccuucaccuggacccugagcgacagcgagggcaacgagacccccggcggcuacugccugaccagauggaugcugaucgaggccgagcugaagugcuucggcaacaccgccguggccaagugcaacgagaagcacgacgaggaguucugcgacaugcugagacuguucgacuucaacaagcaggccaucagaagacugaagaccgaggcccagaugagcauccagcugaucaacaaggccgugaacgcccugaucaacgaccagcugaucaugaagaaccaccugagagacaucaugggcauccccuacugcaacuacagcaaguacugguaccugaaccacaccgugaccggcaagaccagccugcccagaugcuggcuggugagcaacggcagcuaccugaacgagacccacuucagcgacgacaucgagcagcaggccgacaacaugaucaccgagcugcugcagaaggaguacaucgacagacagggcaagaccccccugggccugguggaccuguucguguucagcaccagcuucuaccugaucagcaucuuccugcaccuggugaagauccccacccacagacacaucaccggcaagcccugccccaagccccacagacugaaccacaugggcaucugcagcugcggccuguacaagcaccccggcgugcccgugaaguggaagagaugaggacuagucccuguucccagagcccacuuuuuuuucuuuuuuugaaauaaaauagccugucuuucagaucucaaaggcucuuuucagagccaccaaaaaaaaaaaaaaaaaaaaaaaaaaaaaaaaaaaaaaaaaaaaaaaaaaaaaaaaaaaaaaaaaaaaaaaaaaaaaaaaaaaaaaaaaaaaaaaaaaaaa

SEQ ID NO: 14195 - RNA, 1745 nt, Artificial Sequence
  mRNA product Design a-1 (hSL-A100) comprising derived and/or modified sequence from LASV(Lassa virus/H.sapiens-wt/NGA/2016/ISTH_0009;Clade II)__AVO03571__GPC (opt4)
aggagagucccgcagucggcguccagcggcucugcuuguucgugugugugucguugcaggccuuauucaagcuuaccaugggccagaucaucaccuucuuccaggaggugccccacgugaucgaggaggugaugaacaucgugcugaucgcccugagccugcuggccauccugaagggcaucuacaacguggccaccugcggccugcugggccuggugagcuuccugcugcugugcggcagaagcugcagcaccaccuacaagggcguguacgagcugcagacccuggagcuggacauggccagccugaacaugaccaugccccugagcugcaccaagaacaacagccaccacuacaucauggugggcaacgagaccggccuggagcugacccugaccaacaccagcaucaucaaccacaaguucugcaaccugagcgacgcccacaagaagaaccuguacgaccacgcccugaugagcaucaucagcaccuuccaccugagcauccccaacuucaaccaguacgaggccaugagcugcgacuucaacggcggcagaaucagcgugcaguacaaccugagccacagcuacgccguggacgccgccaaccacugcggcaccaucgccaacggcgugcugcagaccuucaugagaauggccuggggcggcagcuacaucgcccuggacagcggcaagggcagcugggacugcaucaugaccagcuaccaguaccugaucauccagaacaccaccugggaggaccacugccaguucagcagacccagccccaucggcuaccugggccugcugagccagagaaccagagacaucuacaucagcagaagacugcugggcaccuucaccuggacccugagcgacagcgagggcaacgagacccccggcggcuacugccugaccagauggaugcugaucgaggccgagcugaagugcuucggcaacaccgccguggccaagugcaacgagaagcacgacgaggaguucugcgacaugcugagacuguucgacuucaacaagcaggccaucagaagacugaagaccgaggcccagaugagcauccagcugaucaacaaggccgugaacgcccugaucaacgaccagcugaucaugaagaaccaccugagagacaucaugggcauccccuacugcaacuacagcaaguacugguaccugaaccacaccgugaccggcaagaccagccugcccagaugcuggcuggugagcaacggcagcuaccugaacgagacccacuucagcgacgacaucgagcagcaggccgacaacaugaucaccgagcugcugcagaaggaguacaucgacagacagggcaagaccccccugggccugguggaccuguucguguucagcaccagcuucuaccugaucagcaucuuccugcaccuggugaagauccccacccacagacacaucaccggcaagcccugccccaagccccacagacugaaccacaugggcaucugcagcugcggccuguacaaccaccccggcgugcccgugaaguggaagagaugaggacuagucccuguucccagagcccacuuuuuuuucuuuuuuugaaauaaaauagccugucuuucagaucucaaaggcucuuuucagagccaccaaaaaaaaaaaaaaaaaaaaaaaaaaaaaaaaaaaaaaaaaaaaaaaaaaaaaaaaaaaaaaaaaaaaaaaaaaaaaaaaaaaaaaaaaaaaaaaaaaaaa

SEQ ID NO: 14196 - RNA, 1745 nt, Artificial Sequence
  mRNA product Design a-1 (hSL-A100) comprising derived and/or modified sequence from LASV(Lassa virus/H.sapiens-wt/NGA/2016/ISTH_0017;Clade II)__AVO03567__GPC (opt4)
aggagagucccgcagucggcguccagcggcucugcuuguucgugugugugucguugcaggccuuauucaagcuuaccaugggccagaucaucaccuucuuccaggaggugccccacgugaucgaggaggugaugaacaucgugcugaucgcccugagccugcuggccauccugaagggcaucuacaacguggccaccugcggccuguucggccuggugagcuuccugcugcugugcggcagaagcugcagcaccaccuacaagggcguguacgagcugcagacccuggagcuggacauggccagccugaacaugaccaugccccugagcugcaccaagaacaacagccaccacuacaucauggugggcaacgagaccggccuggagcugacccugaccaacaccagcaucaucaaccacaaguucugcaaccugagcgacgcccacaagaagaaccuguacgaccacgcccugaugagcaucaucagcaccuuccaccugagcauccccaacuucaaccaguacgaggccaugagcugcgacuucaacggcggcaagaucagcgugcaguacaaccugagccacaccuacgccaucgacgccgccaaccacugcggcaccaucgccaacggcgugcugcagaccuucaugagaauggccuggggcggcagcuacaucgcccuggacagcggcaagggcagcugggacugcaucaugaccagcuaccaguaccugaucauccagaacaccaccugggaggaccacugccaguucagcagacccagccccaucggcuaccugggccugcugagccagagaaccagagacaucuacaucagcagaagacugcugggcaccuucaccuggacccugagcgacagcgagggcaacgagacccccggcggcuacugccugaccagauggaugcugaucgaggccgagcugaagugcuucggcaacaccgccguggccaagugcaacgagaagcacgacgaggaguucugcgacaugcugagacuguucgacuucaacaagcaggccaucagaagacugaagaccgaggcccagaugagcauccagcugaucaacaaggccgugaacgcccugaucaacgaccagcugaucaugaagaaccaccugagagacaucaugggcauccccuacugcaacuacagcaaguacugguaccugaaccacaccgugaccggcaagaccagccugcccagaugcuggcuggugagcaacggcagcuaccugaacgagacccacuucagcgacgacaucgagcagcaggccgacaacaugaucaccgagcugcugcagaaggaguacauggacagacagggcaagaccccccugggccugguggaccuguucguguucagcaccagcuucuaccugaucagcaucuuccugcaccuggugagaauccccacccacagacacgugaucggcaagcccugccccaagccccacagacugaaccacaugggcaucugcagcugcggccuguacaagcaccccggcgugcccgugaaguggaagagaugaggacuagucccuguucccagagcccacuuuuuuuucuuuuuuugaaauaaaauagccugucuuucagaucucaaaggcucuuuucagagccaccaaaaaaaaaaaaaaaaaaaaaaaaaaaaaaaaaaaaaaaaaaaaaaaaaaaaaaaaaaaaaaaaaaaaaaaaaaaaaaaaaaaaaaaaaaaaaaaaaaaaa

SEQ ID NO: 14197 - RNA, 1745 nt, Artificial Sequence
  mRNA product Design a-1 (hSL-A100) comprising derived and/or modified sequence from LASV(Lassa virus/H.sapiens-wt/NGA/2018/ISTH_0959;Clade II)__AVV65099__GPC (opt4)
aggagagucccgcagucggcguccagcggcucugcuuguucgugugugugucguugcaggccuuauucaagcuuaccaugggccagaucaucaccuucuuccaggaggugccccacgugaucgaggaggugaugaacaucgugcugaucgcccugagccugcuggccauccugaagggcaucuacaacguggugaccugcggccuguucggccuggugagcuuccugcugcugugcggcagaagcugcagcaccaccuacaagggcguguacgagcugcagacccuggagcuggacauggccagccugaacaugaccaugccccugagcugcaccaagaacaacagccaccacuacaucauggugggcaacgagaccggccuggagcugacccugaccaacaccagcaucaucaaccacaaguucugcaaccugagcgacgcccacaagaagaaccuguacgaccacgcccugaugagcaucaucagcaccuuccaccugagcauccccaacuucaaccaguacgaggccaugagcugcgacuucaacggcggcaagaucagcgugcaguacaaccugagccacgccuacgccaucgacgccgccaaccacugcggcaccaucgccaacggcgugcugcagaccuucaugagaauggccuggggcggcagcuacaucgcccuggacagcggcaagggcagcugggacugcaucaugaccagcuaccaguaccugaucauccagaacaccaccugggaggaccacugccaguucagcagacccagccccaucggcuaccugggccugcugagccagagaaccagagacaucuacaucagcagaagacugcugggcaccuucaccuggacccugagcgacagcgagggcaacgagacccccggcggcuacugccugaccagauggaugcugaucgaggccgagcugaagugcuucggcaacaccgccguggccaagugcaacgagaagcacgacgaggaguucugcgacaugcugagacuguucgacuucaacaagcaggccaucagaagacugaagaccgaggcccagaugagcauccagcugaucaacaaggccgugaacgcccugaucaacgaccagcugaucaugaagaaccaccugagagacaucaugggcauccccuacugcaacuacagcaaguacugguaccugaaccacaccgugaccggcaagaccagccugcccagaugcuggcuggugagcaacggcagcuaccugaacgagacccacuucagcgacgacaucgagcagcaggccgacaacaugaucaccgagcugcugcagaaggaguacaucgacagacagggcaagaccccccugggccugguggaccuguucguguucagcaccagcuucuaccugaucagcaucuuccugcaccuggugaagauccccacccacagacacgugaucggcaagcccugccccaagccccacagacugaaccacaugggcaucugcagcugcggccuguacaagcaccccggcgugcccgugaaguggaagagaugaggacuagucccuguucccagagcccacuuuuuuuucuuuuuuugaaauaaaauagccugucuuucagaucucaaaggcucuuuucagagccaccaaaaaaaaaaaaaaaaaaaaaaaaaaaaaaaaaaaaaaaaaaaaaaaaaaaaaaaaaaaaaaaaaaaaaaaaaaaaaaaaaaaaaaaaaaaaaaaaaaaaa

SEQ ID NO: 14198 - RNA, 1745 nt, Artificial Sequence
  mRNA product Design a-1 (hSL-A100) comprising derived and/or modified sequence from LASV(LASV003-NIG-2008;Clade II)__AIT17580__GPC (opt4)
aggagagucccgcagucggcguccagcggcucugcuuguucgugugugugucguugcaggccuuauucaagcuuaccaugggccagaucaucaccuucuuccaggaggugccccacgugaucgaggaggugaugaacaucgugcugaucgcccugagccugcuggccauccugaagggcaucuacaacguggccaccugcggccuguucggccuggugagcuuccugcugcugugcggcagaagcugcagcaccaccuacaagggcguguacgagcugcagacccuggagcuggacauggccagccugaacaugaccaugccccugagcugcaccaagaacaacagccaccacuacaucauggugggcaacgagaccggccuggagcugacccugaccaacaccagcaucaucaaccacaaguucugcaaccugagcgacgcccacaagaagaaccuguacgaccacgcccugaugagcaucaucagcaccuuccaccugagcauccccaacuucaaccaguacgaggccaugagcugcgacuucaacggcggcaagaucagcgugcaguacaaccugagccacaccuacgccguggacgccgccaaccacugcggcaccaucgccaacggcgugcugcagaccuucaugagaauggccuggggcggcagcuacaucgcccuggacagcggcaagggcagcugggacugcaucaugaccagcuaccaguaccugaucauccagaacaccaccugggaggaccacugccaguucagcagacccagccccaucggcuaccugggccugcugagccagagaaccagagacaucuacaucagcagaagacugcugggcaccuucaccuggacccugagcgacagcgagagcaacgagacccccggcggcuacugccugaccagauggaugcugaucgaggccgagcugaagugcuucggcaacaccgccguggccaagugcaacgagaagcacgacgaggaguucugcgacaugcugagacuguucgacuucaacaagcaggccaucagaagacugaaggccgaggcccagaugagcauccagcugaucaacaaggccgugaacgcccugaucaacgaccagcugaucaugaagaaccaccugagagacaucaugggcauccccuacugcaacuacagcaaguacugguaccugaaccacaccgugaccggcagaaccagccugcccagaugcuggcuggugagcaacggcagcuaccugaacgagacccacuucagcgacgacaucgagcagcaggccgacaacaugaucaccgagcugcugcagaaggaguacauggacagacagggcaagaccccccugggccugguggaccuguucguguucagcaccagcuucuaccugaucagcaucuuccugcaccuggugaagauccccacccacagacacgugaucggcaagcccugccccaagccccacagacugaaccacaugggcaucugcagcugcggccuguacaagcaccccggcgugcccgugaaguggaagagaugaggacuagucccuguucccagagcccacuuuuuuuucuuuuuuugaaauaaaauagccugucuuucagaucucaaaggcucuuuucagagccaccaaaaaaaaaaaaaaaaaaaaaaaaaaaaaaaaaaaaaaaaaaaaaaaaaaaaaaaaaaaaaaaaaaaaaaaaaaaaaaaaaaaaaaaaaaaaaaaaaaaaa

SEQ ID NO: 14199 - RNA, 1745 nt, Artificial Sequence
  mRNA product Design a-1 (hSL-A100) comprising derived and/or modified sequence from LASV(LASV035-NIG-2009;Clade II)__AIT17588__GPC (opt4)
aggagagucccgcagucggcguccagcggcucugcuuguucgugugugugucguugcaggccuuauucaagcuuaccaugggccagaucaucaccuucuuccaggaggugccccacgugaucgaggaggugaugaacaucgugcugaucgcccugagccugcuggccauccugaagggcaucuacaacguggccaccugcggccuguucggccuggugagcuuccugcugcugugcggcagaagcugcagcaccaccuacaagggcguguacgagcugcagacccuggagcuggacauggccagccugaacaugaccaugccccugagcugcaccaagaacaacagccaccacuacaucauggugggcaacgagaccggccuggagcugacccugaccaacaccagcaucaucaaccacaaguucugcaaccugagcgacgcccacaagaagaaccuguacgaccacgcccugaugagcaucaucagcaccuuccaccugagcauccccaacuucaaccaguacgaggccaugagcugcgacuucaacggcggcaagaucagcgugcaguacaaccugagccacgccuacgccguggacgccgccaaccacugcggcaccaucgccaacggcgugcugcagaccuucaugagaauggccuggggcggcagcuacaucgcccuggacagcggcaagggcagcugggacugcaucaugaccagcuaccaguaccugaucauccagaacaccaccugggaggaccacugccaguucagcagacccagccccaucggcuaccugggccugcugagccagagaaccagagacaucuacaucagcagaagacugcugggcaccuucaccuggacccugagcgacagcgagggcaacgagacccccggcggcuacugccugaccagauggaugcugaucgaggccgagcugaagugcuucggcaacaccgccguggccaagugcaacgagaagcacgacgaggaguucugcgacaugcugagacuguucgacuucaacaagcaggccaucagaagacugaaggccgaggcccagaugagcauccagcugaucaacaaggccgugaacgcccugaucaacgaccagcugaucaugaagaaccaccugagagacaucaugggcauccccuacugcaacuacagcaaguacugguaccugaaccacaccgugaccggcaagaccagccugcccagaugcuggcuggugagcaacggcagcuaccugaacgagacccacuucagcgacgacaucgagcagcaggccgacaacaugaucaccgagcugcugcagaaggaguacaucgacagacagggcaagaccccccugggccugguggaccuguucguguucagcaccagcuucuaccugaucagcaucuuccugcaccuggugaagauccccacccacagacacgugaucggcaagcccugccccaagccccacagacugaaccacaugggcaucugcagcugcggccuguacaagcaccccggcgugcccgugaaguggaagagaugaggacuagucccuguucccagagcccacuuuuuuuucuuuuuuugaaauaaaauagccugucuuucagaucucaaaggcucuuuucagagccaccaaaaaaaaaaaaaaaaaaaaaaaaaaaaaaaaaaaaaaaaaaaaaaaaaaaaaaaaaaaaaaaaaaaaaaaaaaaaaaaaaaaaaaaaaaaaaaaaaaaaa

SEQ ID NO: 14200 - RNA, 1745 nt, Artificial Sequence
  mRNA product Design a-1 (hSL-A100) comprising derived and/or modified sequence from LASV(LASV1000-NIG-2009;Clade II)__AIT17782__GPC (opt4)
aggagagucccgcagucggcguccagcggcucugcuuguucgugugugugucguugcaggccuuauucaagcuuaccaugggccagaucaucaccuucuuccaggaggugccccacgugaucgaggaggugaugaacaucgugcugaucgcccugagccugcuggccauccugaagggcaucuacaacguggccaccugcggccuguucggccuggugagcuuccugcugcugugcggcagaagcugcagcaccaccuacaagggcguguacgagcugcagacccuggagcuggacauggccagccugaacaugaccaugccccugagcugcaccaagaacaacagccaccacuacaucauggugggcaacgagaccggccuggagcugacccugaccaacaccagcaucaucaaccacaaguucugcaaccugagcgacgcccacaagaagaaccuguacgaccacgcccugaugagcaucaucagcaccuuccaccugagcauccccaacuucaaccaguacgaggccaugagcugcgacuucaacggcggcaagaucagcgugcaguacaaccugagccacaccuacgccguggacgccgccaaccacugcggcaccaucgccaacggcgugcugcagaccuucaugagaauggccuggggcggcagcuacaucgcccuggacagcggcaagggcagcugggacugcaucaugaccagcuaccaguaccugaucauccagaacaccaccugggaggaccacugccaguucagcagacccagccccaucggcuaccugggccugcugagccagagaaccagagacaucuacaucagcagaagacugcugggcaccuucaccuggacccugagcgacagcgagggcaacgagacccccggcggcuacugccugaccagauggaugcugaucgaggccgagcugaagugcuucggcaacaccgccguggccaagugcaacgagaagcacgacgaggaguucugcgacaugcugagacuguucgacuucaacaagcaggccaucaagagacugaagaccgaggcccagaugagcauccagcugaucaacaaggccgugaacgcccugaucaacgaccagcugaucaugaagaaccaccugagagacaucaugggcauccccuacugcaacuacagcaaguacugguaccugaaccacaccgugaccggcaagaccagccugcccagaugcuggcuggugagcaacggcagcuaccugaacgagacccacuucagcgacgacaucgagcagcaggccgacaacaugaucaccgagcugcugcagaaggaguacaucgacagacagggcaagaccccccugggccugguggaccuguucguguucagcaccagcuucuaccugaucagcaucuuccugcaccuggugaagauccccacccacagacacguggugggcaagcccugccccaagccccacagacugaaccacaugggcaucugcagcugcggccuguacaagcaccccggcgugcccgugaaguggaagagaugaggacuagucccuguucccagagcccacuuuuuuuucuuuuuuugaaauaaaauagccugucuuucagaucucaaaggcucuuuucagagccaccaaaaaaaaaaaaaaaaaaaaaaaaaaaaaaaaaaaaaaaaaaaaaaaaaaaaaaaaaaaaaaaaaaaaaaaaaaaaaaaaaaaaaaaaaaaaaaaaaaaaa

SEQ ID NO: 14201 - RNA, 1745 nt, Artificial Sequence
  mRNA product Design a-1 (hSL-A100) comprising derived and/or modified sequence from LASV(LASV221-NIG-2010;Clade II)__AIT17624__GPC (opt4)
aggagagucccgcagucggcguccagcggcucugcuuguucgugugugugucguugcaggccuuauucaagcuuaccaugggccagaucaucaccuucuuccaggaggugccccacgugaucgaggaggugaugaacaucgugcugaucgcccugagccugcuggccauccugaagggcaucuacaacguggccaccugcggccuguucggccuggugagcuuccugcugcugugcggcagaagcugcagcaccaccuacaagggcguguacgagcugcagacccuggagcuggacauggccagccugaacaugaccaugccccugagcugcaccaagaacaacagccaccacuacaucauggugggcaacgagaccggccuggagcugacccugaccaacaccagcaucaucaaccacaaguucugcaaccugagcgacgcccacaagaagaaccuguacgaccacgcccugaugagcaucaucagcaccuuccaccugagcauccccaacuucaaccaguacgaggccaugagcugcgacuucaacggcggcaagaucagcgugcaguacaaccugagccacaccuacgccaucgacgccgccaaccacugcggcaccaucgccaacggcgugcugcagaccuucaugagaauggccuggggcggcagcuacaucgcccuggacagcggcaagggcagcugggacugcaucaugaccagcuaccaguaccugaucauccagaacaccaccugggaggaccacugccaguucagcagacccagccccaucggcuaccugggccugcugagccagagaaccagagacaucuacaucagcagaagacugcugggcaccuucaccuggacccugagcgacagcgagggcaacgagacccccggcggcuacugccugaccagauggaugcugaucgaggccgagcugaagugcuucggcaacaccgccguggccaagugcaacgagaagcacgacgaggaguucugcgacaugcugagacuguucgacuucaacaagcaggccaucagaagacugaagaccgaggcccagaugagcauccagcugaucaacaaggccgugaacgcccugaucaacgaccagcugaucaugaagaaccaccugagagacaucaugggcauccccuacugcaacuacagcaaguacugguaccugaaccacaccgugaccggcaagaccagccugcccagaugcuggcuggugagcaacggcagcuaccugaacgagacccacuucagcgacgacaucgagcagcaggccgacaacaugaucaccgagaugcugcagaaggaguacauggacagacagggcaagaccccccugggccugguggaccuguucguguucagcaccagcuucuaccugaucagcaucuuccugcaccuggugaagauccccacccacagacacgugaucggcaagcccugccccaagccccacagacugaaccacaugggcaucugcagcugcggccuguacaagcaccccggcgugcccgugaaguggaagagaugaggacuagucccuguucccagagcccacuuuuuuuucuuuuuuugaaauaaaauagccugucuuucagaucucaaaggcucuuuucagagccaccaaaaaaaaaaaaaaaaaaaaaaaaaaaaaaaaaaaaaaaaaaaaaaaaaaaaaaaaaaaaaaaaaaaaaaaaaaaaaaaaaaaaaaaaaaaaaaaaaaaaa

SEQ ID NO: 14202 - RNA, 1745 nt, Artificial Sequence
  mRNA product Design a-1 (hSL-A100) comprising derived and/or modified sequence from LASV(LASV237-NIG-2010;Clade II)__AIT17638__GPC (opt4)
aggagagucccgcagucggcguccagcggcucugcuuguucgugugugugucguugcaggccuuauucaagcuuaccaugggccagaucaucaccuucuuccaggaggugccccacgugaucgaggaggugaugaacaucgugcugaucgcccugagccugcuggccauccugaagggcaucuacaacguggccaccugcggccuguucggccuggugagcuuccugcugcugugcggcagaagcugcagcaccaccuacaagggcguguacgagcugcagacccuggagcuggacauggccagccugaacaugaccaugccccugagcugcaccaagaacaacagccaccacuacaucauggugggcaacgagaccggccuggagcugacccugaccaacaccagcaucaucaaccacaaguucugcaaccugagcgacgcccacaagaaggaccuguacgaccacgcccugaugagcaucaucagcaccuuccaccugagcauccccaacuucaaccaguacgaggccaugagcugcgacuucaacggcggcaagaucagcgugcaguacaaccugagccacaccuacgccguggacgccgccaaccacugcggcaccaucgccaacggcgugcugcagaccuucaugagaauggccuggggcggcagcuacaucgcccuggacagcggcaagggcagcugggacugcaucaugaccagcuaccaguaccugaucauccagaacaccaccugggaggaccacugccaguucagcagacccagccccaucggcuaccugggccugcugagccagagaaccagagacaucuacaucagcagaagacugcugggcaccuucaccuggacccugagcgacagcgagggcaacgagacccccggcggcuacugccugaccagauggaugcugaucgaggccgagcugaagugcuucggcaacaccgccguggccaagugcaacgagaagcacgacgaggaguucugcgacaugcugagacuguucgacuucaacaagcaggccaucagaagacugaagaccgaggcccagaugagcauccagcugaucaacaaggccgugaacgcccugaucaacgaccagcugaucaugaagaaccaccugagagacaucaugggcauccccuacugcaacuacagcaaguacugguaccugaaccacaccgugaccggcaagaccagccugcccagaugcuggcuggugagcaacggcagcuaccugaacgagacccacuucagcgacgacaucgagcagcaggccgacaacaugaucaccgagcugcugcagaaggaguacauggacagacagggcaagaccccccugggccugguggaccuguucguguucagcaccagcuucuaccugaucagcaucuuccugcaccugaucaagauccccacccacagacacaucaccggcaagcccugccccaagccccacagacugaaccacaugggcaucugcagcugcggccuguacaagcaccccggcgugcccgugaaguggaagagaugaggacuagucccuguucccagagcccacuuuuuuuucuuuuuuugaaauaaaauagccugucuuucagaucucaaaggcucuuuucagagccaccaaaaaaaaaaaaaaaaaaaaaaaaaaaaaaaaaaaaaaaaaaaaaaaaaaaaaaaaaaaaaaaaaaaaaaaaaaaaaaaaaaaaaaaaaaaaaaaaaaaaa

SEQ ID NO: 14203 - RNA, 1745 nt, Artificial Sequence
  mRNA product Design a-1 (hSL-A100) comprising derived and/or modified sequence from LASV(LASV253-NIG-2011;Clade II)__AIT17670__GPC (opt4)
aggagagucccgcagucggcguccagcggcucugcuuguucgugugugugucguugcaggccuuauucaagcuuaccaugggccagaucaucaccuucuuccaggaggugccccacgugaucgaggaggugaugaacaucgugcugaucgcccugagccugcuggccauccugaagggcaucuacaacguggccaccugcggccuguucggccuggugagcuuccugcugcugugcggcagaagcugcagcaccaccuacaagggcguguacgagcugcagacccuggagcuggacauggccagccugaacaugaccaugccccugagcugcaccaagaacaacagccaccacuacaucauggugggcaacgagaccggccuggagcugacccugaccaacaccagcaucaucaaccacaaguucugcaaccugagcgacgcccacaagaagaaccuguacgaccacgcccugaugagcaucaucagcaccuuccaccugagcauccccaacuucaaccaguacgaggccaugagcugcgacuucaacggcggcaagaucagcgugcaguacaaccugagccacaccuacgccguggacgccgccaaccacugcggcaccaucgccaacggcgugcugcagaccuucaugagaauggccuggggcggcagcuacaucgcccuggacagcggcaagggcagcugggacugcaucaugaccagcuaccaguaccugaucauccagaacaccaccugggaggaccacugccaguucagcagacccagccccaucggcuaccugggccugcugagccagagaaccagagacaucuacaucagcagaagacugcugggcaccuucaccuggacccugagcgacagcgagggcaacgagacccccggcggcuacugccugaccagauggaugcugaucgaggccgagcugaagugcuucggcaacaccgccguggccaagugcaacgagaagcacgacgaggaguucugcgacaugcugagacuguucgacuucaacaagcaggccaucagaagacugaaggccgaggcccagaugagcauccagcugaucaacaaggccgugaacgcccugaucaacgaccagcugaucaugaagaaccaccugagagacaucaugggcauccccuacugcaacuacagcaaguacugguaccugaaccacaccgugaccggcagaaccagccugcccagaugcuggcuggugagcaacggcagcuaccugaacgagacccacuucagcgacgacaucgagcagcaggccgacaacaugaucaccgagcugcugcagaaggaguacaucgacagacagggcaagaccccccugggccugguggaccuguucguguucagcaccagcuucuaccugaucagcaucuuccugcaccuggugaagauccccacccacagacacaucaucggcaagcccugccccaagccccacagacugaaccacaugggcaucugcagcugcggccuguacaagcaccccggcgugcccgugaaguggaagagaugaggacuagucccuguucccagagcccacuuuuuuuucuuuuuuugaaauaaaauagccugucuuucagaucucaaaggcucuuuucagagccaccaaaaaaaaaaaaaaaaaaaaaaaaaaaaaaaaaaaaaaaaaaaaaaaaaaaaaaaaaaaaaaaaaaaaaaaaaaaaaaaaaaaaaaaaaaaaaaaaaaaaa

SEQ ID NO: 14204 - RNA, 1745 nt, Artificial Sequence
  mRNA product Design a-1 (hSL-A100) comprising derived and/or modified sequence from LASV(LASV254-NIG-2011;Clade II)__AIT17674__GPC (opt4)
aggagagucccgcagucggcguccagcggcucugcuuguucgugugugugucguugcaggccuuauucaagcuuaccaugggccagaucaucaccuucuuccaggaggugccccacgugaucgaggaggugaugaacaucgugcugaucgcccugagccugcuggccauccugaagggcaucuacaacguggccaccugcggccuguucggccuggugagcuuccugcugcugugcggcagaagcugcagcaccaccuacaagggcguguacgagcugcagacccuggagcuggacaugaccaaccugaacaugaccaugccccugagcugcaccaagaacaacagccaccacuacaucauggugggcaacgagaccggccuggagcugacccugaccaacaccagcaucaucaaccacaaguucugcaaccugagcgacgcccacaagaagaaccuguacaaccacgcccugaugagcaucaucagcaccuuccaccugagcauccccaacuucaaccaguacgaggccaugagcugcgacuucaacggcggcaagaucagcgugcaguacaaccugagccacagcuacgccguggacgccgccaaccacugcggcaccaucgccaacggcgugcugcagaccuucaugagaauggccuggggcggcagcuacaucgcccuggacagcggcaagggcaacugggacugcaucaugaccagcuaccaguaccugaucauccagaacaccaccugggaggaccacugccaguucagcagacccagccccaucggcuaccugggccugcugagccagagaaccagagacaucuacaucagcagaagacugcugggcaccuucaccuggacccugagcgacagcgagggcaacgagacccccggcggcuacugccugaccagauggaugcugaucgaggccgagcugaagugcuucggcaacaccgccguggccaagugcaacgagaagcacgacgaggaguucugcgacaugcugagacuguucgacuucaacaagcaggccaucagaagacugaagaccgaggcccaggccaacauccagcugaucaacaaggccgugaacgcccugaucaacgaccagcugaucaugaagaaccaccugagagacaucaugggcauccccuacugcaacuacagcaaguacugguaccugaaccacaccgugaccggcaagaccagccugcccagaugcuggcuggugagcaacggcagcuaccugaacgagacccacuucagcgacgacaucgagcagcaggccgacaacaugaucaccgagcugcugcagaaggaguacauggacagacagggcaagaccccccugggccugguggaccuguucguguucagcaccagcuucuaccugaucagcaucuuccugcaccuggugaagauccccacccacagacacgugaucggcaagcccugccccaagccccacagacugaaccacaugggcaucugcagcugcggccuguacaagcaccccggcgugcccgugaaguggaagagaugaggacuagucccuguucccagagcccacuuuuuuuucuuuuuuugaaauaaaauagccugucuuucagaucucaaaggcucuuuucagagccaccaaaaaaaaaaaaaaaaaaaaaaaaaaaaaaaaaaaaaaaaaaaaaaaaaaaaaaaaaaaaaaaaaaaaaaaaaaaaaaaaaaaaaaaaaaaaaaaaaaaaa

SEQ ID NO: 14205 - RNA, 1745 nt, Artificial Sequence
  mRNA product Design a-1 (hSL-A100) comprising derived and/or modified sequence from LASV(Nig08-A19;Clade III)__ADU56618__GPC (opt4)
aggagagucccgcagucggcguccagcggcucugcuuguucgugugugugucguugcaggccuuauucaagcuuaccaugggccagaucgugaccuucuuccaggaggugccccacgugaucgaggaggugaugaacaucgugcugaucgcccugagcauccuggccauccugaagggccuguacaacaucgccaccugcggccugaucggccuggugaccuuccugcugcugagcggcagaagcugcagcaugaccuacaagggcguguacgagcugcagacccuggagcugaacaugaacacccugaacaugaccaugccccugagcugcaccaagaacaacagccaccacuacaucauggugggcaacgagaccggccuggagcugacccugaccaacaccagccugcugcaccacaaguucugcaaccugagcgacgcccacaagaagaaccuguacgaccacacccugaugagcaucaucagcaccuuccaccugagcauccccaacuucaaccaguacgaggccaugagcugcgacuucaacggcggcaagaucaccgugcaguacaaccugagccacagcuacgccaucgacgccgccaaccacugcggcaccguggccaacggcgugcugcagaccuucaugagaauggccuggggcggcagcuacaucgcccuggacagcggcagaggcaagugggacugcaucaugaccagcuaccaguaccugaucauccagaacaccaccugggaggaccacugccaguucagcagacccagccccaucggcuaccugggccugcugagccagagaaccagagacaucuacaucagcagaagacugcugggcaccuucaccuggacccugagcgacagcgagggcaacgagacccccggcggcuacugccugaccagauggaugcugaucgaggccgagcugaagugcuucggcaacaccgccguggccaagugcaacgagaagcacgacgaggaguucugcgacaugcugagacuguucgacuucaacaagcaggccaucagaagacugaaggccgaggcccagaugagcauccagcugaucaacaaggccgugaacgcccugaucaacgaccagcugaucaugaagaaccaccugagagacaucaugggcauccccuacugcaacuacagcaaguacugguaccugaaccacaccagcaccggcagaaccagccugcccagaugcuggcuggugagcaacggcagcuaccugaacgagacccacuucagcgacgacaucgagcagcaggccgacaacaugaucaccgagaugcugcagaaggaguaccuggacagacagggcaagaccccccugggccugguggaccuguucguguucagcaccagcuucuaccugaucagcaucuuccugcaccuggugaagauccccacccacagacacaucgugggcaagcccugccccaagccccacagacugaaccacaugggcaucugcagcugcggccuguacaagcagcccggcgugcccgugagauggaagagaugaggacuagucccuguucccagagcccacuuuuuuuucuuuuuuugaaauaaaauagccugucuuucagaucucaaaggcucuuuucagagccaccaaaaaaaaaaaaaaaaaaaaaaaaaaaaaaaaaaaaaaaaaaaaaaaaaaaaaaaaaaaaaaaaaaaaaaaaaaaaaaaaaaaaaaaaaaaaaaaaaaaaa

SEQ ID NO: 14206 - RNA, 1748 nt, Artificial Sequence
  mRNA product Design a-1 (hSL-A100) comprising derived and/or modified sequence from LASV(G1180-SLE-2010;Clade IV)__AIT17168__GPC (opt4)
aggagagucccgcagucggcguccagcggcucugcuuguucgugugugugucguugcaggccuuauucaagcuuaccaugggccagaucgugaccuucuuccaggaggugccccacgugaucgaggaggugaugaacaucgugcugaucgcccugagcauccuggccgugcugaagggccuguacaacuucgccaccugcggccuggugggccugcugaccuuccugcugcugugcggcagaagcugcaccgccagcagauacaagggcguguacgagcugcagacccuggagcugaacauggagacccugaacaugaccaugccccugagcugcaccaagaacaacagccaccacuacaucauggugggcaacgagaccggccuggagcugacccugaccaacaccagcaucaucaaccacaaguucugcaaccugagcgacgcccacaagaagaaccuguacgaccacgcccugaugagcaucaucagcaccuuccaccugagcauccccaacuucaaccaguacgaggccaugagcugcgacuucaacggcggcaagaucagcgugcaguacaaccugagccacagcuacgccggcgacgccgccaaccacugcggcaccguggccaacggcgugcugcagaccuucaugagaauggccuggggcggcagcuacaucgcccuggacagcggccacggcagcugggacugcaucaugaccagcuaccaguaccugaucauccagaacaccaccugggaggaccacugccaguucagcagacccagccccaucggcuaccugggccugcugagccagagaaccagagacaucuacaucagcagaagacugcugggcaccuucaccuggacccugagcgacagcgagggcaaggacacccccggcggcuacugccugaccagauggaugcugaucgaggccgagcugaagugcuucggcaacaccgccguggccaagugcaacgagaagcacgacgaggaguucugcgacaugcugagacuguucgacuucaacaagcaggccauccagagacugaaggccgaggcccagaugagcauccagcugaucaacaaggccgugaacgcccugaucaacgaccagcugaucaugaagaaccaccugagagacaucaugggcauccccuacugcaacuacagcaaguacugguaccugaaccacaccaccaccggcaagaccagccugcccaagugcuggcuggugagcaacggcagcuaccugaacgagacccacuucagcgacgacaucgagcagcaggccgacaacaugaucaccgagaugcugcagaaggaguacauggagagacagggcaagaccccccugggccugguggaccuguucguguucagcaccagcuucuaccugaucagcaucuuccugcaccuggugaagauccccacccacagacacaucgugggcaagagcugccccaagccccacagacugaaccacaugggcaucugcagcugcggccuguacaagcagcccggcgugcccgugaaguggaagagaugaggacuagucccuguucccagagcccacuuuuuuuucuuuuuuugaaauaaaauagccugucuuucagaucucaaaggcucuuuucagagccaccaaaaaaaaaaaaaaaaaaaaaaaaaaaaaaaaaaaaaaaaaaaaaaaaaaaaaaaaaaaaaaaaaaaaaaaaaaaaaaaaaaaaaaaaaaaaaaaaaaaaa

SEQ ID NO: 14207 - RNA, 1748 nt, Artificial Sequence
  mRNA product Design a-1 (hSL-A100) comprising derived and/or modified sequence from LASV(G1442-SLE-2011;Clade IV)__AIT17180__GPC (opt4)
aggagagucccgcagucggcguccagcggcucugcuuguucgugugugugucguugcaggccuuauucaagcuuaccaugggccagaucgugaccuucuuccaggaggugccccacgugaucgaggaggugaugaacaucgugcugaucgcccugagcauccuggccgugcugaagggccuguacaacguggccaccugcggccugaucggccuggugaccuuccugcugcugugcggcagaagcugcaccaccacccuguacaagggcguguacgagcugcagacccuggagcugaacauggagacccugaacaugaccaugccccugagcugcaccaagaacaacagccaccacuacaucagagugggcaacgagaccggccuggagcugacccugaccaacaccagcaucaucaaccacaaguucugcaaccugagcgacgcccacaagaagaaccuguacgaccacgcccugaugagcaucaucagcaccuuccaccugagcauccccaacuucaaccaguacgaggccaugagcugcgacuucaacggcggcaagaucagcgugcaguacaaccugagccacagcuacgccggcgacgccgccaaccacugcggcaccguggccaacggcgugcugcagaccuucaugagaauggccuggggcggcagcuacaucgcccuggacagcggcagaggcaacugggacugcaucaugaccagcuaccaguaccugaucauccagaacaccaccugggacgaccacugccaguucagcagacccagccccaucggcuaccugggccugcugagccagagaaccagagacguguacaucagcagaagacugcugggcaccuucaccuggacccugagcgacagcgagggcaaggacacccccggcggcuacugccugaccagauggaugcugaucgaggccgagcugaagugcuucggcaacaccgccguggccaagugcaacgagaagcacgacgaggaguucugcgacaugcugagacuguucgacuucaacaagcaggccauccagagacugaaggccgaggcccagaugagcauccagcugaucaacaaggccgugaacgcccugaucaacgaccagcugaucaugaagaaccaccugagagacaucaugggcauccccuacugcaacuacagcaaguacugguaccugaacaacaccgccaccggcaagaccagccugcccaagugcuggcugaucagcaacggcagcuaccugaacgagacccacuucagcgacgacaucgagcaggaggccgacaacaugaucaccgagaugcugcagaaggaguacauggagagacagggcaagaccccccugggccugguggaccuguucguguucagcaccagcuucuaccugaucagcaucuuccugcaccuggugaagauccccacccacagacacaucgugggcaagagcugccccaagccccacagacugaaccacaugggcaucugcagcugcggccuguacaagcagcccggcgugcccgugagauggaagagaugaggacuagucccuguucccagagcccacuuuuuuuucuuuuuuugaaauaaaauagccugucuuucagaucucaaaggcucuuuucagagccaccaaaaaaaaaaaaaaaaaaaaaaaaaaaaaaaaaaaaaaaaaaaaaaaaaaaaaaaaaaaaaaaaaaaaaaaaaaaaaaaaaaaaaaaaaaaaaaaaaaaaa

SEQ ID NO: 14208 - RNA, 1748 nt, Artificial Sequence
  mRNA product Design a-1 (hSL-A100) comprising derived and/or modified sequence from LASV(G3010-SLE-2013;Clade IV)__AIT17344__GPC (opt4)
aggagagucccgcagucggcguccagcggcucugcuuguucgugugugugucguugcaggccuuauucaagcuuaccaugggccagaucgugaccuucuuccaggaggugccccacgugaucgaggaggugaugaacaucgugcugaucgcccugagcauccuggccgugcugaagggccuguacaacuucgccaccugcggccuggugggccuggugaccuuccugcugcugugcggcagaagcugcaccaccagccuguacaagggcguguacgagcugcagacccuggagcugaacauggagacccugaacaugaccaugccccugagcugcaccaagaacaacagccaccacuacaucauggugggcaacgagaccggccuggagcugacccugaccaacaccagcaucaucaaccacaaguucugcaaccugagcgacgcccacaagaagaaccuguacaaccacgcccugaugagcaucaucagcaccuuccaccugagcauccccaacuucaaccaguacgaggccaugagcugcgacuucaacggcggcaagaucagcgugcaguacaaccugagccacagcuacgccggcgacgccgccagccacugcggcaccguggccaacggcgugcugcagaccuucaugagaauggccuggggcggcagcuacaucgcccuggacagcggcuacggcaagugggacugcaucaugaccagcuaccaguaccugaucauccagaacaccaccugggaggaccacugccaguucagcagacccagccccaucggcuaccugggccugcugagccagagaaccagagacaucuacaucagcagaagacugcugggcaccuucaccuggacccugagcgacagcgagggcaaggacacccccggcggcuacugccugaccagauggaugcugaucgaggccgagcugaagugcuucggcaacaccgccguggccaagugcaacgagaagcacgacgaggaguucugcgacaugcugagacuguucgacuucaacaagcaggccauccagagacugaagaccgaggcccagaugagcauccagcugaucaacaaggccgugaacgcccugaucaacgaccagcugaucaugaagaaccaccugagagacaucaugggcauccccuacugcaacuacagcaaguacugguaccugaaccacaccaccaccggcaagaccagccugcccaagugcuggcuggugagcaacggcagcuaccugaacgagacccacuucagcgacgacaucgagcagcaggccgacaacaugaucaccgagaugcugcagaaggaguacauggagagacagggcaagaccccccugggccugguggaccuguucguguucagcaccagcuucuaccugaucagcaucuuccugcaccuggugaagauccccacccacagacacaucgugggcaagagcugccccaagccccacagacugaaccacaugggcaucugcagcugcggccuguacaagcagcccggcgugcccgugagauggaagagaugaggacuagucccuguucccagagcccacuuuuuuuucuuuuuuugaaauaaaauagccugucuuucagaucucaaaggcucuuuucagagccaccaaaaaaaaaaaaaaaaaaaaaaaaaaaaaaaaaaaaaaaaaaaaaaaaaaaaaaaaaaaaaaaaaaaaaaaaaaaaaaaaaaaaaaaaaaaaaaaaaaaaa

SEQ ID NO: 14209 - RNA, 1748 nt, Artificial Sequence
  mRNA product Design a-1 (hSL-A100) comprising derived and/or modified sequence from LASV(G502-SLE-2009;Clade IV)__AIT17126__GPC (opt4)
aggagagucccgcagucggcguccagcggcucugcuuguucgugugugugucguugcaggccuuauucaagcuuaccaugggccagaucgugaccuucuuccaggaggugccccacgugaucgaggaggugaugaacaucgugcugaucgcccugagcauccuggccgugcugaagggccuguacaacuucgccaccugcggccuggugggccugcugaccuuccugcugcugugcggcagaagcugcaccaccggccuguacaagggcguguacgagcugcagacccuggagcugaacauggagacccugaacaugaccaugccccugagcugcaccaagaacaacagccaccacuacaucauggugggcaacgagaccggccuggagcugacccugaccaacaccagcaucaucaaccacaaguucugcaaccugagcgacgcccacaagaagaaccuguacgaccacgcccugaugagcaucaucagcaccuuccaccugagcauccccaacuucaaccaguacgaggccaugagcugcgacuucaacggcggcaagaucagcgugcaguacaaccugagccacagcuacgccggcgacgccgccgaccacugcggcaccguggccaacggcgugcugcagaccuucaugagaauggccuggggcggcagcuacaucgcccuggacagcggcagaggcagaugggacugcaucaugaccagcuaccaguaccugaucauccagaacaccaccugggaggaccacugccaguucagcagacccagccccaucggcuaccugggccugcugagccagagaaccagagacaucuacaucagcagaagacugcugggcaccuucaccuggacccugagcgacagcgagggcaaggacacccccggcggcuacugccugaccagauggaugcugaucgaggccgagcugaagugcuucggcaacaccgccguggccaagugcaacgagaagcacgacgaggaguucugcgacaugcugagacuguucgacuucaacaagcaggccauccagagacugaaggccgaggcccagaugagcauccagcugaucaacaaggccgugaacgcccugaucaacgaccagcuggugaugaagaaccaccugagagacaucaugggcauccccuacugcaacuacagcagauacugguaccugaaccacaccaccaccggcagaaccagccugcccaagugcuggcuggugagcaacggcagcuaccugaacgagacccacuucagcgacgacaucgagcagcaggccgacaacaugaucaccgagaugcugcagaaggaguacauggagagacagggcaagaccccccugggccugguggaccuguucguguucagcaccagcuucuaccugaucagcaucuuccugcaccuggugaagauccccacccacagacacaucgugggcaagagcugccccaagccccacagacugaaccacaugggcaucugcagcugcggccuguacaagcagcccggcgugcccgugaaguggaagagaugaggacuagucccuguucccagagcccacuuuuuuuucuuuuuuugaaauaaaauagccugucuuucagaucucaaaggcucuuuucagagccaccaaaaaaaaaaaaaaaaaaaaaaaaaaaaaaaaaaaaaaaaaaaaaaaaaaaaaaaaaaaaaaaaaaaaaaaaaaaaaaaaaaaaaaaaaaaaaaaaaaaaa

SEQ ID NO: 14210 - RNA, 1748 nt, Artificial Sequence
  mRNA product Design a-1 (hSL-A100) comprising derived and/or modified sequence from LASV(G733-SLE-2010;Clade IV)__AIT17154__GPC (opt4)
aggagagucccgcagucggcguccagcggcucugcuuguucgugugugugucguugcaggccuuauucaagcuuaccaugggccagaucgugaccuucuuccaggaggugccccacgugaucgaggaggugaugaacaucgugcugaucgcccugagcauccuggccgugcugaagggccuguacaacuucgccaccugcggcaucgugggccuggugagcuuccugcugcugugcggcagaagcugcaccaccagccuguacaagggcguguacgagcugcagacccuggagcugaacauggagacccugaacaugaccaugccccugagcugcaccaagaacaacagccaccacuacaucauggugggcaacgagaccggccuggagcugacccugaccaacaccagcaucaucaaccacaaguucugcaaccugagcgacgcccacaagaagaaccuguacgaccacgcccugaugagcaucaucagcaccuuccaccugagcauccccaacuucaaccaguacgaggccaugagcugcgacuucaacggcggcaagaucagcgugcaguacaaccugagccacagcuacgccggcgacgccgccaaccacugcggcaccaucgccaacggcgugcugcagaccuucaugagaauggccuggggcggcagcuacaucgcccuggacagcggcagagacagaugggacugcaucaugaccagcuaccaguaccugaucauccagaacaccaccugggaggaccacugccaguucagcagacccagccccaucggcuaccugggccugcugagccagagaaccagagacaucuacaucagcagaagacugcugggcaccuucaccuggacccugagcgacagcgagggcaaggacacccccggcggcuacugccugaccagauggaugcugaucgaggccgagcugaagugcuucggcaacaccgccguggccaagugcaacgagaagcacgacgaggaguucugcgacaugcugagacuguucgacuucaacaagcaggccauccagagacugaaggccgaggcccagaugagcauccagcugaucaacaaggccgugaacgcccugaucaacgaccagcugaucaugaagaaccaccugagagacaucaugggcauccccuacugcaacuacagcaaguacugguaccugaaccacaccaccaccggcaagaccagccugcccaagugcuggcuggugagcaacggcagcuaccugaacgagacccacuucagcgacgacaucgagcagcaggccgacaacaugaucaccgagaugcugcagaaggaguacauggagagacagggcaagaccccccugggccugguggaccuguucguguucagcaccagcuucuaccugaucagcaucuuccugcaccuggugaagauccccacccacagacacguggugggcaagagcugccccaagccccacagacugaaccacaugggcaucugcagcugcggccuguacggccagcccggcgugcccgugaaguggaagagaugaggacuagucccuguucccagagcccacuuuuuuuucuuuuuuugaaauaaaauagccugucuuucagaucucaaaggcucuuuucagagccaccaaaaaaaaaaaaaaaaaaaaaaaaaaaaaaaaaaaaaaaaaaaaaaaaaaaaaaaaaaaaaaaaaaaaaaaaaaaaaaaaaaaaaaaaaaaaaaaaaaaaa

SEQ ID NO: 14211 - RNA, 1748 nt, Artificial Sequence
  mRNA product Design a-1 (hSL-A100) comprising derived and/or modified sequence from MOPV/LASV reassortant(IGS-1;Clade IV)__AFY05576__GPC (opt4)
aggagagucccgcagucggcguccagcggcucugcuuguucgugugugugucguugcaggccuuauucaagcuuaccaugggccagaucgugaccuucuuccaggaggugccccacgugaucgaggaggugaugaacaucgugcugaucgcccugagcgugcuggccgugcugaagggccuguacaacuucgccaccugcggccuggugggccuggugaccuuccugcugcugugcggcagaagcugcaccaccagccuguacaagggcguguacgagcugcagacccuggagcugaacauggagacccugaacaugaccaugccccugagcugcaccaagaacaacagccaccacuacaucauggugggcaacgagaccggccuggagcugacccugaccaacaccagcaucaucaaccacaaguucugcaaccugagcgacgcccacaagaagaaccuguacgaccacgcccugaugagcaucaucagcaccuuccaccugagcauccccaacuucaaccaguacgaggccaugagcugcgacuucaacggcggcaagaucagcgugcaguacaaccugagccacagcuacgccggcgacgccgccaaccacugcggcaccguggccaacggcgugcugcagaccuucaugagaauggccuggggcggcagcuacaucgcccuggacagcggcagaggcaacugggacugcaucaugaccagcuaccaguaccugaucauccagaacaccaccugggaggaccacugccaguucagcagacccagccccaucggcuaccugggccugcugagccagagaaccagagacaucuacaucagcagaagacugcugggcaccuucaccuggacccugagcgacagcgagggcgaggacacccccggcggcuacugccugaccagauggaugcugaucgaggccgagcugaagugcuucggcaacaccgccguggccaagugcaacgagaagcacgacgaggaguucugcgacaugcugagacuguucgacuucaacaagcaggccauccagagacugaaggccgaggcccagaugagcauccagcugaucaacaaggccgugaacgcccugaucaacgaccagcugaucaugaagaaccaccugagagacaucaugggcauccccuacugcaacuacagcaaguacugguaccugaaccacaccaccaccggcagaaccagccugcccaagugcuggcuggugagcaacggcagcuaccugaacgagacccacuucagcgacgacaucgagcagcaggccgacaacaugaucaccgagaugcugcagaaggaguacauggagagacagggcaagaccccccugggccugguggaccuguucguguucagcaccagcuucuaccugaucagcaucuuccugcaccuggugaagauccccacccacagacacaucgugggcaagagcugccccaagccccacagacugaaccacaugggcaucugcagcugcggccuguacaagcagcccggcgugcccgugaaguggaagagaugaggacuagucccuguucccagagcccacuuuuuuuucuuuuuuugaaauaaaauagccugucuuucagaucucaaaggcucuuuucagagccaccaaaaaaaaaaaaaaaaaaaaaaaaaaaaaaaaaaaaaaaaaaaaaaaaaaaaaaaaaaaaaaaaaaaaaaaaaaaaaaaaaaaaaaaaaaaaaaaaaaaaa

SEQ ID NO: 14212 - RNA, 1748 nt, Artificial Sequence
  mRNA product Design a-1 (hSL-A100) comprising derived and/or modified sequence from LASV(LM765-SLE-2012;Clade IV)__AIT17814__GPC (opt4)
aggagagucccgcagucggcguccagcggcucugcuuguucgugugugugucguugcaggccuuauucaagcuuaccaugggccagaucgugaccuucuuccaggaggugccccacgugaucgaggaggugaugaacaucgugcugaucgcccugagcauccuggccgugcugaagggccuguacaacuucgccaccugcggccuggugggccuggugaccuuccugcugcugugcggcagaagcugcaccaccagccuguacaagggcguguacgagcugcagacccuggagcugaacauggagacccugaacaugaccaugccccugagcugcaccaagaacaacagccaccacuacaucauggugggcaacgagaccggccuggagcugacccugaccaacaccagcaucaucgaccacaaguucugcaaccugagcgacgcccacagaaagaaccuguacgaccacgcccugaugagcaucaucagcaccuuccaccugagcauccccaacuucaaccaguacgaggccaugagcugcgacuucaacggcggcaagaucagcgugcaguacaaccugagccacagcuacgccaaggacgccgccgaccacugcggcaccguggccaacggcgugcugcagaccuucaugagaauggccuggggcggcagcuacaucgcccuggacagcggcagaggcagaugggacugcaucaugaccagcuaccaguaccugaucauccagaacaccaccugggaggaccacugccaguucagcagacccagccccaucggcuaccugggccugcugagccagagaaccagagacaucuacaucagcagaagacugcugggcaccuucaccuggacccugagcgacagcgagggcaaggacacccccggcggcuacugccugaccagauggaugcugaucgaggccgagcugaagugcuucggcaacaccgccguggccaagugcaacgagaagcacgacgaggaguucugcgacaugcugagacuguucgacuucaacaagcaggccauccagagacugaaggccgaggcccagaugagcauccagcugaucaacaaggccgugaacgcccugaucaacgaccagcugaucaugaagaaccaccugagagacaucaugggcauccccuacugcaacuacagcaaguacugguaccugaaccacaccaccaccggcaagaccagccugcccaagugcuggcuggugagcaacggcagcuaccugaacgagacccacuucagcgacgacaucgagcagcaggccgacaacaugaucaccgagaugcugcagaaggaguacauggagagacagggcaagaccccccugggccugguggaccuguucguguucagcaccagcuucuaccugaucagcaucuuccugcaccuggugaagauccccacccacagacacaucgugggcaagcccugccccaagccccacagacugaaccacaugggcaucugcagcugcggccuguacaagcagcccggcgugcccgugaaguggaagagaugaggacuagucccuguucccagagcccacuuuuuuuucuuuuuuugaaauaaaauagccugucuuucagaucucaaaggcucuuuucagagccaccaaaaaaaaaaaaaaaaaaaaaaaaaaaaaaaaaaaaaaaaaaaaaaaaaaaaaaaaaaaaaaaaaaaaaaaaaaaaaaaaaaaaaaaaaaaaaaaaaaaaa

SEQ ID NO: 14213 - RNA, 1748 nt, Artificial Sequence
  mRNA product Design a-1 (hSL-A100) comprising derived and/or modified sequence from LASV(LM776-SLE-2012;Clade IV)__AIT17824__GPC (opt4)
aggagagucccgcagucggcguccagcggcucugcuuguucgugugugugucguugcaggccuuauucaagcuuaccaugggccagaucgugaccuucuuccaggaggugccccacgugaucgaggaggugaugaacaucgugcugaucgcccugagcauccuggccgugcugaagggccuguacaacuucgccaccugcggccuggugggccuggugaccuuccugcugcugugcggcagaagcugcaccaccagcguguacaagggcguguacgagcugcagacccuggagcugaacauggagacccugaacaugaccaugccccugagcugcaccaagaacaacagccaccacuacaucauggugggcaacgagaccggccuggagcugacccugaccaacaccagcaucaucaaccacaaguucugcaaccugagcgacgcccacaagaagaaccuguacgaccacgcccugaugagcaucaucagcaccuuccaccugagcauccccaacuucaaccaguacgaggccaugagcugcgacuucaacggcggcaagaucagcgugcaguacaaccugagccacagcuacgccggcgacgccgccaaccacugcggcaccguggccaacggcgugcugcagaccuucaugagaauggccuggggcggcagcuacaucgcccuggacagcggccacggcaagugggacugcaucaugaccagcuaccaguaccugaucauccagaacaccaccugggaggaccacugccaguucagcagacccagccccaucggcuaccugggccugcugagccagagaaccagagacaucuacaucagcagaagacugcugggcaccuucaccuggacccugagcgacagcgagggcaaggacacccccggcggcuacugccugaccagauggaugcugaucgaggccgagcugaagugcuucggcaacaccgccguggccaagugcaacgagaagcacgacgaggaguucugcgacaugcugagacuguucgacuucaacaagcaggccauccagagacugaaggccgaggcccagaugagcauccagcugaucaacaaggccgugaacgcccugaucaacgaccagcugaucaugaagaaccaccugagagacaucaugggcauccccuacugcaacuacagcaaguacugguaccugaaccacaccaccaccggcaagaccagccugcccaagugcuggcuggugagcaacggcagcuaccugaacgagacccacuucagcgacgacaucgagcagcaggccgacaacaugaucaccgagaugcugcagaaggaguacauggagagacagggcaagaccccccugggccugguggaccuguucguguucagcaccagcuucuaccugaucagcaucuuccugcaccuggugaagauccccacccacagacacaucgugggcaagagcugccccaagccccacagacugaaccacaugggcaucugcagcugcggccuguacaagcagcccggcgugcccgugagauggaagagaugaggacuagucccuguucccagagcccacuuuuuuuucuuuuuuugaaauaaaauagccugucuuucagaucucaaaggcucuuuucagagccaccaaaaaaaaaaaaaaaaaaaaaaaaaaaaaaaaaaaaaaaaaaaaaaaaaaaaaaaaaaaaaaaaaaaaaaaaaaaaaaaaaaaaaaaaaaaaaaaaaaaaa

SEQ ID NO: 14214 - RNA, 1748 nt, Artificial Sequence
  mRNA product Design a-1 (hSL-A100) comprising derived and/or modified sequence from LASV(Mad39;Clade IV)__ANH09722__GPC (opt4)
aggagagucccgcagucggcguccagcggcucugcuuguucgugugugugucguugcaggccuuauucaagcuuaccaugggccagaucgugaccuucuuccaggaggugccccacgugaucgaggaggugaugaacaucgugcugaucgcccugagcauccuggccgugcugaagggccuguacaacguggccaccugcggccugaucggccuggugaccuuccugcugcugugcggcagaagcugcaccaccacccuguacaagggcguguacgagcugcaggcccuggagcugaacauggagacccugaacaugaccaugccccugagcugcaccaagaacaacagccaccacuacaucagagugggcaacgagaccggccuggagcugacccugaccaacaccagccugaucaaccacaaguucugcaaccugagcgacgcccacaagaagaaccuguacgaccacgcccugaugagcaucaucagcaccuuccaccugagcauccccaacuucaaccaguacgaggccaugagcugcgacuucaacgacggcaagaucagcgugcaguacaaccugagccacaccuacgccggcgacaccgccaaccacugcggcaccguggccaacggcgugcugcagaccuucaugagaauggccuggggcggcagcuacaucgcccuggacagcggcagaggcggcugggacugcaucaugaccagcuaccaguaccugaucauccagaacaccaccugggaggaccacugccaguucagcagacccagccccaucggcuaccugggccugcugagccagagaaccagagacaucuacaucagcagaagacugcugggcaccuucaccuggacccugagcgacagcgagggcaaggacacccccggcggcuacugccugaccagauggaugcugaucgaggccgagcugaagugcuucggcaacaccgccguggccaagugcaacgagaagcacgacgaggaguucugcgacaugcugagacuguucgacuucaacaagcaggccauccagagacugaaggccgaggcccagaugagcauccagcugaucaacaaggccgugaacgcccugaucaacgaccagcugaucaugaagaaccaccugagagacaucaugggcauccccuacugcaacuacagcaaguacugguaccugaaccacaccgugaccggcaagaccagccugcccaagugcuggcuggugagcaacggcagcuaccugaacgagacccacuucagcgacgacaucgagcagcaggccgacaacaugaucaccgagaugcugcagaaggaguacauggagagacagggcaagaccccccugggccugguggaccuguucguguucagcaccagcuucuaccugaucagcaucuuccugcaccuggugaagauccccacccacagacacguggugggcaagcccugccccaagccccacagacugaaccacaugggcaucugcagcugcggcuucuacaagcagcccggcgugcccgugagauggaagagaugaggacuagucccuguucccagagcccacuuuuuuuucuuuuuuugaaauaaaauagccugucuuucagaucucaaaggcucuuuucagagccaccaaaaaaaaaaaaaaaaaaaaaaaaaaaaaaaaaaaaaaaaaaaaaaaaaaaaaaaaaaaaaaaaaaaaaaaaaaaaaaaaaaaaaaaaaaaaaaaaaaaaa

SEQ ID NO: 14215 - RNA, 1748 nt, Artificial Sequence
  mRNA product Design a-1 (hSL-A100) comprising derived and/or modified sequence from LASV(Z0947-SLE-2011;Clade IV)__AIT17840__GPC (opt4)
aggagagucccgcagucggcguccagcggcucugcuuguucgugugugugucguugcaggccuuauucaagcuuaccaugggccagaucgugaccuucuuccaggaggugccccacgugaucgaggaggugaugaacaucgugcugaucgcccugagcauccuggccgugcugaagggccuguacaacuucgccaccugcggccuggugggccuggugaccuuccugcugcugugcggcagaagcugcaccaucagccuguacaagggcguguacgagcugcagacccuggagcugaacauggagacccugaacaugaccaugccccugagcugcaccaagaacaacagccaccacuacaucauggugggcaacgagaccggccuggagcugacccugaccaacaccagcaucaucaaccacaaguucugcaaccugagcgacgcccacaagaagaaccuguacgaccacgcccugaugagcaucaucagcaccuuccaccugagcauccccaacuucaaccaguacgaggccaugagcugcgacuucaacggcggcaagaucagcgugcaguacaaccugagccacagcuacgccggcgacgccgccaaccacugcggcaccguggccaacggcgugcugcagaccuucaugagaauggccuggggcggcagcuacaucgcccuggacagcggcagagacagaugggacugcaucaugaccagcuaccaguaccugaucauccagaacaccaccugggaggaccacugccaguucagcagacccagccccaucggcuaccugggccugcugagccagagaaccagagacaucuacaucagcagaagacugcugggcaccuucaccuggacccugagcgacagcgagggcaaggacacccccggcggcuacugccugaccagauggaugcugaucgaggccgagcugaagugcuucggcaacaccgccguggccaagugcaacgagaagcacgacgaggaguucugcgacaugcugagacuguucgacuucaacaagcaggccauccagagacugaaggccgaggcccagaugagcauccagcugaucaacaaggccgugaacgcccugaucaacgaccagcugaucaugaagaaccaccugagagacaucaugggcauccccuacugcaacuacagcaaguacugguaccugaaccacaccaccaccggcaagaccagccugcccaagugcuggcuggugagcaacggcagcuaccugaacgagacccacuucagcgacgacaucgagcagcaggccgacaacaugaucaccgagaugcugcagaaggaguacauggagagacagggcaagaccccccugggccugguggaccuguucguguucagcaccagcuucuaccugaucagcaucuuccugcaccuggugaagauccccacccacagacacaucgugggcaagcccugccccaagccccacagacugaaccacaugggcaucugcagcugcggccuguacaagcagcccggcgugcccgugaaguggaagagaugaggacuagucccuguucccagagcccacuuuuuuuucuuuuuuugaaauaaaauagccugucuuucagaucucaaaggcucuuuucagagccaccaaaaaaaaaaaaaaaaaaaaaaaaaaaaaaaaaaaaaaaaaaaaaaaaaaaaaaaaaaaaaaaaaaaaaaaaaaaaaaaaaaaaaaaaaaaaaaaaaaaaa

SEQ ID NO: 14216 - RNA, 1748 nt, Artificial Sequence
  mRNA product Design a-1 (hSL-A100) comprising derived and/or modified sequence from LASV(Josiah;Clade IV)__NP_694870__GPC (opt5)
aggagagucccgcagucggcguccagcggcucugcuuguucgugugugugucguugcaggccuuauucaagcuuaccaugggccagaucgugaccuucuuucaagaggucccccacguuauugaagaggugaugaacaucgugcugauugcccucagcguccuggcugugcuuaaggggcuguacaauuucgccacaugcggacucguuggccuggugacguuucuucugcucugugggagauccugcaccacaucucuguauaaaggagucuacgaacugcagacccucgagcugaacauggaaacacuuaauaugaccaugccucugagcuguacaaagaacaauucccaucacuauaucauggugggcaacgagaccgggcucgagcugacgcuuaccaauacaucuauuaucaaccauaaauucugcaaucugagcgacgcgcacaagaaaaaccucuacgaucaugcucugauguccaucauuucuaccuuucaccugagcaucccgaauuucaaccaguaugaagccauguccugugacuuuaauggaggcaagauuagcguucaguacaaccucucucacuccuaugccggcgaugcugccaaucauugcgggacaguggcuaacggaguccugcaaaccuucaugcggauggccuggggcgggagcuacaucgcgcuugacucuggacgcggcaacugggauuguauuaugacguccuaccaguaucugaucauucagaauacaaccugggaggaccacugccaguuuagcagacccucuccuaucggguaccucggacugcuuucccaacggacacgcgauaucuauauuagcagacggcugcucggcaccuucaccuggacacuguccgacucugaaggcaaggauacgcccgggggauacugucugacccgcuggaugcucaucgaggccgagcugaaaugcuuuggcaacacagcuguggccaaguguaaugaaaaacaugacgaggaguucugcgauaugcuuagacuguuugacuucaacaagcaggcuauucagcggcucaaagccgaagcgcagaugagcauccaacugauuaauaaggccgugaacgcucuuaucaaugaucagcugaucaugaagaaccaccuccgcgacauuauggggaucccuuauugcaauuacuccaaauauugguaccugaaccacaccacaaccggaagaacgagccugcccaaguguuggcucgucucuaauggcuccuaccugaacgaaacacauuucagcgacgauauugagcagcaagccgacaauaugaucaccgagaugcuucagaaagaauauauggagcggcaggggaagaccccucugggacucguugaucuguuuguguucucuaccagcuuuuaccugauuuccaucuuccuucaccucgugaaaaucccgacacaucgccacauugucggcaagucuugccccaaaccucauagacugaaccacaugggcaucuguagcugcgggcuguauaagcagcccggagugccuguuaaguggaaacggugaggacuagucccuguucccagagcccacuuuuuuuucuuuuuuugaaauaaaauagccugucuuucagaucucaaaggcucuuuucagagccaccaaaaaaaaaaaaaaaaaaaaaaaaaaaaaaaaaaaaaaaaaaaaaaaaaaaaaaaaaaaaaaaaaaaaaaaaaaaaaaaaaaaaaaaaaaaaaaaaaaaaa

SEQ ID NO: 14217 - RNA, 1745 nt, Artificial Sequence
  mRNA product Design a-1 (hSL-A100) comprising derived and/or modified sequence from LASV(LP;Clade I)__AAF86701__GPC (opt5)
aggagagucccgcagucggcguccagcggcucugcuuguucgugugugugucguugcaggccuuauucaagcuuaccaugggccagaucauuaccuucuuucaagaggugccccacgucaucgaagagguuaugaacauugugcugaucgcccucagccugcuugcuauucugaaggggcucuacaauaucgccacaugcggaaucauuggccugguggcguuccuuuuucugugugggaaauccugcucucucacgcugaagggaggcuaugaacugcagacccucgagcugaacauggaaacacuuaauaugaccaugccucugagcuguaccaaaaacuccucucaucacuacaucagagucgggaaugagacaggacucgagcugacacuuaccaacacgagcauuaucaaucauaaguucugcaaccuguccgacgcucacaaaaagaaucucuaugaucaugcccugaugucuauuaucagcaccuuucaccuguccauuccgaacuucaaucaguacgaagccaugagcugugacuuuaacggcggcaagaucucugugcaguauaaucucucccacagcuacgcuggggaugccgcugagcauugcggaacaguugccaacggcgugcugcaaaccuucaugcggauggcguggggagggcgcuauaucgcccuugacucuggcaaagggaauugggauuguauuaugacauccuaccaguaccugaucauucagaacaccacgugggaagaccacugccaguuuagcagacccucuccuaucggauaucucggccugcuuucccaacggacacgcgauauuuacaucagcagacggcugcucggcaccuucacauggacccuguccgacucugaggggaacgagacccccggaggcuauugucugacacgcuggaugcucaucgaagcugagcugaagugcuuugggaauacggccgucgcuaaauguaacgaaaagcaugaugaggaguucugcgacaugcuuagacuguuugauuucaauaaacaggccauucggcgccucaaggcggaagcccagaugagcauccagcugauuaacaaggcugugaaugcccuuaucaacgaccaacugauuaugaaaaaucaccucagagauaucaugggaaucccuuacugcaacuauuccaaguacugguaucugaaucacaccagcucuggccggacaucccugcccaaauguuggcucauuagcaacgggucuuaccugaaugagacccaguucagcgacgacaucgaacagcaagcugauaacaugauuacagagaugcuucagaaggaauacaucgagcgccagggaaaaaccccucugggccucguugacauuuuuaucuucuccacgucuuuuuaucugauuagcaucuuccugcaucuuaucaagauuccgacacacagacauaucgugggcaaacccugcccuaagccccaccggcucaaucauaugggggucuguuccugcggacuguacaagcacccuggcgugcccaccaaauggaagcgcugaggacuagucccuguucccagagcccacuuuuuuuucuuuuuuugaaauaaaauagccugucuuucagaucucaaaggcucuuuucagagccaccaaaaaaaaaaaaaaaaaaaaaaaaaaaaaaaaaaaaaaaaaaaaaaaaaaaaaaaaaaaaaaaaaaaaaaaaaaaaaaaaaaaaaaaaaaaaaaaaaaaaa

SEQ ID NO: 14218 - RNA, 1745 nt, Artificial Sequence
  mRNA product Design a-1 (hSL-A100) comprising derived and/or modified sequence from LASV(803213;Clade II)__AAF86703__GPC (opt5)
aggagagucccgcagucggcguccagcggcucugcuuguucgugugugugucguugcaggccuuauucaagcuuaccaugggccagaucauuaccuucuuucaagaggugccccacgucaucgaagagguuaugaacauugugcugaucgcccucagccugcuugcuauucugaaggggaucuacaauguggccacaugcggacucuucggccugaucuccuuucuucugcucugugggagaucuugcagcgucacguauaaaggaguguacgaacugcagacccuggagcucaacauggcgaaucugaacaugacaaugccucuuuccuguaccaagaauaacucucaucacuauauuaugguuggcaaugaaacagggcuggagcucacccugacaaacaccagcaucauuaaucauaaauucugcaaccuuuccgacgcucacaagaaaaaucuguacgaucaugcccucaugucuaucauuagcacguuucaccuguccaucccgaacuucaaucaguaugaggccaugagcugugacuuuaacggaggcaagauuucugugcaguacaaucugucccacagcuucgcugucgaugccgcuaaccauugcggcaccaucgccaacggggugcuccaaacauuuaugcggauggcguggggaggcucuuauaucgcccuggacuccgggaagggaaauugggauuguauuaugaccagcuaccaguaccuuaucauucagaacacaaccugggaagaccacugccaguucucucgccccuccccuaucggcuaucuggggcuccugagccaaagaacgcgggauauuuacaucucccgcagacuucugggaacauuuaccuggacacucucugacagcgagggcaaugaagcucccggcggguauugucugacccgguggaugcugaucgaggccgagcucaaaugcuucggaaacaccgcuguugccaaguguaaugaaaaacaugaugaggaauuuugcgacaugcugcgccuuuucgauuucaacaagcaggcgauuaaaagacugaagacagaggcccagauguccauccagcucauuaauaaggcugugaacgcccugaucaaugaccaacuuauuaugaaaaaccaucugcgggauaucaugggcaucccuuacugcaauuauagccgcuacugguaucucaaccacacggucaccgggaagacaucucugcccagauguuggcugguguccaauggaagcuaccucaacgaaacccacuuuucugacgacauugagcagcaggcugauaauaugaucacagagaugcugcaaaaagaauacauggaccggcagggcaagaccccucuugggcugguggaucucuucgucuuuagcacguccuucuaucugauuucuaucuuucugcaccuuguuaaaauuccgacacaucgccacaucgugggaaagcccugcccuaaaccccauagacucaaccacaugggcauuuguagcugcggccuguacaagcacccuggggugcccgucaaguggaaacggugaggacuagucccuguucccagagcccacuuuuuuuucuuuuuuugaaauaaaauagccugucuuucagaucucaaaggcucuuuucagagccaccaaaaaaaaaaaaaaaaaaaaaaaaaaaaaaaaaaaaaaaaaaaaaaaaaaaaaaaaaaaaaaaaaaaaaaaaaaaaaaaaaaaaaaaaaaaaaaaaaaaaa

SEQ ID NO: 14219 - RNA, 1745 nt, Artificial Sequence
  mRNA product Design a-1 (hSL-A100) comprising derived and/or modified sequence from LASV(GA391;Clade III)__CAA36645__GPC (opt5)
aggagagucccgcagucggcguccagcggcucugcuuguucgugugugugucguugcaggccuuauucaagcuuaccaugggccagaucgugaccuucuuucaagaggucccccacguuauugaagaggugaugaacaucgugcugauugcccucagcauccuggcuauucuuaaggggcuguacaaugucgccacaugcggacucaucggccuggugacguuccuucugcucuccgggagaucuuguagccugaucuauaaaggaaccuacgaacugcagacacucgagcugaacauggaaacccuuaauaugacaaugccucuguccugcaccaagaacaauucucaucacuauauucggguuggcaacgagacagggcucgagcugacccuuacgaauaccagcauccugaaccauaaauuuuguaaucucuccgacgcgcacaagcgcaaccuguacgaucauucucugaugagcauuaucuccacauuccaccucagcauuccgaauuuuaaccaguaugaagcuaugucuugcgacuucaauggaggcaaaaucaccgugcaguacaaccugucccacagcuuugccgucgaugccgcuggccauugugggacacuugccaauggagugcugcaaaccuucaugagaauggcuuggggcgggucuuauauugcccucgacuccggacggggcaacugggauugcaucaugacgagcuaccaguaccugaucauucagaacacaaccugggacgaucacugucaguuuucucgccccuccccuaucggguaucuuggacugcucagccaaagaacacgggacauuuacaucucccgcagacugcugggcaccuucaccuggacacucucugauagcgagggcaaugaaacgcccgggggauauugccugacccgguggaugcuuauugaggcggagcugaaguguuuuggcaacacagccguugcuaagugcaaugaaaaacaugacgaggaguucugugauaugcuccgccuguuugacuucaacaagcaggccaucagacggcuuaaaaccgaagcucagauguccauccagcugauuaauaaggccgugaacgcgcucaucaaugaucaacugauuaugaaaaaccaucugcgcgacaucauggggauuccuuacugcaauuauagcagauacugguaucucaaccacacaucuaccggaaagacgucccugccccggugcuggcuuaucagcaauggcucuuaccugaacgaaacaaaguucagcgacgauaucgagcagcaggccgacaauaugauuaccgagaugcuccaaaaagaauacaucgaucgccaggggaagaccccucugggacuggucgaccuuuuuguguucuccacaucuuuuuaucucauuagcaucuuccugcaccuggugaaaauuccgacccacagacauaucgucggcaagcccuguccuaaaccccaccggcucaaccauaugggcauuugcuccugugggcuguacaagcagccuggaguucccgugagauggaaacgcugaggacuagucccuguucccagagcccacuuuuuuuucuuuuuuugaaauaaaauagccugucuuucagaucucaaaggcucuuuucagagccaccaaaaaaaaaaaaaaaaaaaaaaaaaaaaaaaaaaaaaaaaaaaaaaaaaaaaaaaaaaaaaaaaaaaaaaaaaaaaaaaaaaaaaaaaaaaaaaaaaaaaa

SEQ ID NO: 14220 - RNA, 1748 nt, Artificial Sequence
  mRNA product Design a-1 (hSL-A100) comprising derived and/or modified sequence from LASV(AV;Clade V)__CCA30314__GPC (opt5)
aggagagucccgcagucggcguccagcggcucugcuuguucgugugugugucguugcaggccuuauucaagcuuaccaugggccagaucgugaccuucuuucaagaggucccccacguuauugaagaggugaugaacaucgugcugauugcccucagcauccuggcuguccuuaaggggcuguacaauauugccacaugcggacucaucggccugaucacguuccuucugcucugugggagauccugcucuagcaaccuguauaaaggaguguacgaacugcagucccucgaccugaauauggagacccuuaacaugacaaugccucugucuuguaccaagaauaacagccaucacuauauucggguuggcaaugauacagggcucgaacugacccuuacaaacaccuccauccugaaucauaaauuuugcaaccucucugacgcgcacaagaaagaucuguacgaccaugcucugaugagcauuaucuccacguuccaccucagcauuccgaauuuuaaccaguaugaggccaugucuugugauuucaauggaggcaagaucuccgugcaguacaaccugagccacucuuaugccauugacgcugccaaucauugcggcaccgucgcuaacgggauccuucaaacauuuaugcgcauggccuggggaggcuccuacaucgcgcuggauagcgggagaggaaacugggacuguauuaugaccucuuaccaguaucucaucauucagaauacaaccugggagaaccacugccaguucucccggcccagcccuaucggcuaccuggggcuucugucccaacgcacgagagauauuuauaucucucggcgccuccugggaacauuuaccuggacacugagcgacuccgaaggcaaugccacccccggcggguacugucucaccagauggaugcugaucgaggcugaacuuaagugcuucggaaacacagccguggcuaaauguaaugagaagcaugaugaggaauuuugcgacaugcugcgccucuucgauuuuaacaaacaggccauuagccggcugaagucugaggcgcagauguccauccagcuuauuaauaaagccguuaacgcucugaucaaugaccaacucauuaugaagaaccaccugagagacaucaugggcaucccuuauugcaauuacagcaaguauugguaccugaaccacacgauuaccgggaaaacaucucuccccaaguguuggcuggugagcaauggauccuaccuuaacgaaacccauuucucugaugacaucgagcagcaggccgauaauaugauuacagaaaugcugcaaaaagaguauauggagcggcagggcaagaccccucucgggcuggucgaccuguucguguuuagcacguccuucuaccuuaucagcauuuuucuccgccuggugaaaaucccgacacacagacauauugucggaaagcccugcccuaaaccccaccggcugaaccauaugggcaucuguucuugcggccucuauaagcagccugggguucccgugcgcuggaagagaugaggacuagucccuguucccagagcccacuuuuuuuucuuuuuuugaaauaaaauagccugucuuucagaucucaaaggcucuuuucagagccaccaaaaaaaaaaaaaaaaaaaaaaaaaaaaaaaaaaaaaaaaaaaaaaaaaaaaaaaaaaaaaaaaaaaaaaaaaaaaaaaaaaaaaaaaaaaaaaaaaaaaa

SEQ ID NO: 14221 - RNA, 1745 nt, Artificial Sequence
  mRNA product Design a-1 (hSL-A100) comprising derived and/or modified sequence from LASV(Togo/2016/7082;Clade VI)__AMR44577__GPC (opt5)
aggagagucccgcagucggcguccagcggcucugcuuguucgugugugugucguugcaggccuuauucaagcuuaccaugggccagaucauuaccuucuuucaagaggugccccacgucaucgaagagguuaugaacauugugcugaucgcccucagccugcuugcuauucugaaggggguguacaaugucgccacaugcggaaucaucggccucgugacguuccuguuucuuugugggagauccugcucucugauuuauaaaggaagcuacgaacuccagacccuggagcugaacauggaaacacucaauaugaccaugccucuguccuguacaaagaacucuagccaucacuauauccggguuggcaaugagaccgggcuugagcugacacucaccaacacguccauuaucaaucauaaauucugcaaccugucugacgcgcacaagcgcaaucuuuacgaucaugcucugaugagcauucucuccaccuuucaccugagcaucccgaacuucaaucaguaugaagccaugucuugugacuuuaacggaggcaaaauuuccgugcaguacaaucugagccacgccuaugcugucgaugccgcugagcauugcggcacaguggccaacgggguucuccaaaccuucaugagaauggcguggggaggcucuuacaucgcccuggacuccgggcggggaaauugggauuguaucaugacaagcuaccaguaucuuauuauccagaacaccacgugggaagaccacugccaguuuucucgccccuccccuauuggcuaccuggggcuccugagccaaagaacacgggauaucuauauuucccgcagacuucugggaaccuucacauggacccucucugacagcgagggcaacgagacccccggcggguacugucugacacgguggaugcugaucgaagcugagcucaagugcuuuggaaauacggccguggcuaaguguaacgaaaaacaugaugaggaguucugcgacaugcugcgccuuuuugauuucaauaagcaggccauccagagacugaaauccgaagcgcagaugagcauucaacucaucaacaaggccgucaaugcucugauuaacgaccagcuuaucaugaaaaaucaucugcgggauaugaugggcauuccuuauugcaacuacucuaaguauugguaccucaaucacaccuccagcgggcgcacaucucugcccaaguguuggcuggugagcaacggauccuaccucaaugagacccacuucucugacgacaucgaacagcaagccgauaacaugaucacagagaugcugcagaaagaauauauugacagacagggcaagaccccucuugggcugguggaucucuuugucuucagcacguccuuuuaccugaucagcauuuuccugcaccuuaucaaaauuccgacacaucggcacaucguuggaaagcccugcccuaaaccccaucgccucaaucacaugggcauuuguucuugcggccuguauaagcagccuggggugcccaccagauggaaacggugaggacuagucccuguucccagagcccacuuuuuuuucuuuuuuugaaauaaaauagccugucuuucagaucucaaaggcucuuuucagagccaccaaaaaaaaaaaaaaaaaaaaaaaaaaaaaaaaaaaaaaaaaaaaaaaaaaaaaaaaaaaaaaaaaaaaaaaaaaaaaaaaaaaaaaaaaaaaaaaaaaaaa

SEQ ID NO: 14222 - RNA, 1745 nt, Artificial Sequence
  mRNA product Design a-1 (hSL-A100) comprising derived and/or modified sequence from LASV(KAK-428;Clade n.d. (VII))__ANH09740__GPC (opt5)
aggagagucccgcagucggcguccagcggcucugcuuguucgugugugugucguugcaggccuuauucaagcuuaccaugggccagaucgugaccuucuuucaagaggucccccacguuauugaagaggugaugaacaucgugcugauugcccucagccugcuugcuauccugaaggggcucuacaauuucgccacaugcggagucauuggccugaucacguuucuucugcucugugggagauccugcucugcgaccuauaaaggacaguacgaacugcagacacuggagcucaacauggaaagccugaauaugaccaugccucuuuccuguacaaagaacaauucucaucacuauauccgggcuggcaacaauaccgggcuggagcucacacugaccaacacgagcauuaucucccauaaauucugcaaucuuucugacgcccacaagaaaaaccuguacgaucauacccucaugagcauuaucacaaccuuucaccuguccauuccgaauuucaaccaguaugaggccaugagcugugacuuuaauggaggcaagaucucuauucaauacaaccugucccacagcuaugcuggcgaugccgcucagcauugcgggacaguggccaauggaguucuccagaccuucaugcgcauggcguggggcgggucuuaccuggcccuugacuccggaagacggggcugggauuguaucaucagcucuuaccaguaucugauuauccaaaacacgacaugggacgaucacugccaguuuucccgccccagcccuauuggguaccucggauucgugucccagaagaccagagacaucuauauuucucggcgccugcuuggcacauuuaccuggacccugagcgauuccgaaggccaugacaugcccgggggauacugucucacaagauggaugcugaucgaggcugaucugaaaugcuucggcaacacggccgucgcuaaguguaaugaaaaacacgacgaggaguuuugcgauauguggcgccucuucgacuucaacaagcaggccauccaacggcugaaagcggaagcccagaugaauauucagcuuaucaacaaggcugugaaugcccugauuaacgaccaacucaugaugaagaaucaccugagagauaucauggggauuccuuauugcaacuacagcaaauuuugguaucuuaauaacaccacaaccggacggacaucucugccccgcuguuggcucaucuccaauggcagcuaccugaacgagacccauuucucugacgauaucgaacagcaggcugacaauaugauuacggagaugcugcagaaggaauacauggauagacaagggaaaacaccucucggacugguugaccuuuuuguguucagcaccuccuuuuaucugaucaccauuuuccuccaccuggucaagaucccgacacaucggcacauugugggcaaacccugcccuaagccccaucgccugaaccacaugggcaucuguucuugcgggcuuuacaaacagccuggagugcccgucagauggaagcggugaggacuagucccuguucccagagcccacuuuuuuuucuuuuuuugaaauaaaauagccugucuuucagaucucaaaggcucuuuucagagccaccaaaaaaaaaaaaaaaaaaaaaaaaaaaaaaaaaaaaaaaaaaaaaaaaaaaaaaaaaaaaaaaaaaaaaaaaaaaaaaaaaaaaaaaaaaaaaaaaaaaaa

SEQ ID NO: 14223 - RNA, 1745 nt, Artificial Sequence; identical to SEQ ID NO: 14217
  mRNA product Design a-1 (hSL-A100) comprising derived and/or modified sequence from LASV(Pinneo-NIG-1969;Clade I)__AIT17836__GPC (opt5)

SEQ ID NO: 14224 - RNA, 1745 nt, Artificial Sequence
  mRNA product Design a-1 (hSL-A100) comprising derived and/or modified sequence from LASV(ISTH0009-NIG-2011;Clade II)__AIT17404__GPC (opt5)
aggagagucccgcagucggcguccagcggcucugcuuguucgugugugugucguugcaggccuuauucaagcuuaccaugggccagaucauuaccuucuuucaagaggugccccacgucaucgaagagguuaugaacauugugcugaucgcccucagccugcuugcuauucugaaggggaucuacaauguggccacaugcggacucuucggccuggucuccuuucuucugcucugugggagaucuugcagcacgaccuauaaaggaguguacgaacugcagacacuggagcucgacauggcgucccugaacaugaccaugccucuuucuuguacaaagaauaacagccaucacuauaucaugguuggcaaugaaaccgggcuggagcucacacugaccaacacguccauuaucaaucauaaauucugcaaccuuucugaugcucacaagaaaaaucuguacgaccaugcccucaugagcauuaucuccaccuuucaccugagcauuccgaacuucaaucaguaugaggccaugucuugugauuuuaacggaggcaagaucuccgugcaguacaaucugagccacgcuuaugccgucgacgcugccaaccauugcggcacaauugcgaauggggugcuccaaaccuucaugcggauggccuggggaggcucuuacaucgcucuggauuccgggaagggaagcugggacuguaucaugacaucuuaccaguaucuuauuauccagaacaccacgugggaagaucacugccaguuuucccgccccagcccuauuggcuaccuggggcuccugucccaaagaacacgggacaucuauauuucucgcagacuucugggaaccuucacauggacccucagcgauuccgagggcaacgaaacccccggcggguacugucugacacgguggaugcugaucgaggccgagcucaaaugcuuuggaaauacggcuguugccaaguguaacgaaaaacaugacgaggaguucugcgauaugcugcgccuuuuugacuucaauaagcaggcgaucagacggcugaaaaccgaagcccagaugagcauucagcucaucaacaaggcugugaaugcccugauuaacgaucaacuuaucaugaagaaucaucugcgcgacauuaugggcaucccuuauugcaacuacucuaaauauugguaccucaaucacacagucaccgggaagacaucccugcccagauguuggcuggugagcaacggaucuuaccucaaugaaacccacuucagcgacgauaucgagcagcaggcugacaacaugauuacggagcugcuucaaaaagaauauauggaucggcagggcaagacaccucuggggcucguggaccuguuugucuucuccaccucuuuuuaccugaucagcauuuuccuucaccucaucaaaauuccgacccaucgccacaucacaggaaagcccugcccuaaaccccauagacugaaucacaugggcauuuguuccugcggccuguauaagcacccugggguucccgugaaguggaaacggugaggacuagucccuguucccagagcccacuuuuuuuucuuuuuuugaaauaaaauagccugucuuucagaucucaaaggcucuuuucagagccaccaaaaaaaaaaaaaaaaaaaaaaaaaaaaaaaaaaaaaaaaaaaaaaaaaaaaaaaaaaaaaaaaaaaaaaaaaaaaaaaaaaaaaaaaaaaaaaaaaaaaa

SEQ ID NO: 14225 - RNA, 1745 nt, Artificial Sequence
  mRNA product Design a-1 (hSL-A100) comprising derived and/or modified sequence from LASV(ISTH2010-NIG-2012;Clade II)__AIT17482__GPC (opt5)
aggagagucccgcagucggcguccagcggcucugcuuguucgugugugugucguugcaggccuuauucaagcuuaccaugggccagaucauuaccuucuuucaagaggugccccacgucaucgaagagguuaugaacauugugcugaucgcccucagccugcuugcuauucugaaggggaucuacaauguggccacaugcggacucuucggccuggucuccuuucuucugcucugugggagaucuugcagcacgaccuauaaaggaguguacgaacugcagacacuggagcucgacauggcgucccugaacaugaccaugccucuuucuuguacaaagaauaacagccaucacuauaucaugguuggcaaugaaaccgggcuggagcucacacugaccaacacguccauuaucaaucauaaauucugcaaccuuucugaugcucacaagaaaaaucuguacgaccaugcccucaugagcauuaucuccaccuuucaccugagcauuccgaacuucaaucaguaugaggccaugucuugugauuuuaacggaggcaagaucuccgugcaguacaaucugagccacgcuuaugccgucgacgcugccaaccauugcggcacaauugcgaauggggugcuccaaaccuucaugcggauggccuggggaggcucuuacaucgcucuggauuccgggaagggaagcugggacuguaucaugacaucuuaccaguaucuuauuauccagaacauuaccugggaagaucacugccaguuuucccgccccagcccuaucggcuaccuggggcuccugucccaaagaacgcgggacauuuauaucucucgcagacuucugggaacauucaccuggacacucagcgauuccgagggcaacgaaacccccggcggguacugucugacccgguggaugcugaucgaggccgagcucaaaugcuuuggaaauacagcuguugccaaguguaacgaaaaacaugacgaggaguucugcgauaugcugcgccuuuuugacuucaauaagcaggcgauuagacggcugaaaacggaagcccagaugagcauccagcucauuaacaaggcugugaaugcccugaucaacgaucaacuuauuaugaagaaucaucugcgcgacaucaugggcaucccuuauugcaacuacucuaaauauugguaccucaaucacaccgucacagggaagaccucccugcccagauguuggcuggugagcaacggaucuuaccucaaugaaacacacuucagcgacgauauugagcagcaggcugacaacaugaucaccgagcugcuucaaaaagaauauauugaucggcagggcaagacgccucuggggcucguggaccuguuugucuucuccacaucuuuuuaccugaucagcauuuuccuucaccucguuaaaaucccgacccaucgccacguggugggaaagcccugcccuaaaccccauagacugaaucacaugggcauuuguuccugcggccuguauaagcacccugggguccccgugaaguggaaacggugaggacuagucccuguucccagagcccacuuuuuuuucuuuuuuugaaauaaaauagccugucuuucagaucucaaaggcucuuuucagagccaccaaaaaaaaaaaaaaaaaaaaaaaaaaaaaaaaaaaaaaaaaaaaaaaaaaaaaaaaaaaaaaaaaaaaaaaaaaaaaaaaaaaaaaaaaaaaaaaaaaaaa

SEQ ID NO: 14226 - RNA, 1745 nt, Artificial Sequence
  mRNA product Design a-1 (hSL-A100) comprising derived and/or modified sequence from LASV(Lassa virus/H.sapiens-wt/NGA/2015/ISTH_0543;Clade II)__AVO03639__GPC (opt5)
aggagagucccgcagucggcguccagcggcucugcuuguucgugugugugucguugcaggccuuauucaagcuuaccaugggccagaucauuaccuucuuucaagaggugccccacgucaucgaagagguuaugaacauugugcugaucgcccucagccugcuugcuauucugaaggggaucuacaauguggccacaugcggacucuucggccuggucuccuuucuucugcucugugggagaucuugcagcacgaccuauaaaggaguguacgaacugcagacacuggagcucgacauggcgaaccugaauaugaccaugccucuuuccuguacaaagaacaauucucaucacuauaucaugguuggcaacgaaaccgggcuggagcucacacugaccaauacgagcauuaucaaccauaaauucugcaaucuuuccgaugcucacaagaaaaaccuguacgaccaugcccucaugucuauuaucagcaccuuucaccuguccauuccgaauuucaaccaguaugaggccaugagcugugauuuuaauggaggcaagaucucugugcaguacaaccugucccacacauaugcugucgacgccgcuaaucauugcggcaccauugccaacggggugcuccaaacauucaugcggauggcguggggaggcagcuacaucgcccuggauucugggaagggauccugggacuguaucaugaccagcuaccaguaucuuguuauucagaacacgacaugggaagaucacugccaguuuucucgccccuccccuaucggcuaccuggggcuccugagccaaagaacccgggacauuuauaucucccgcagacuucugggaacauucaccuggacccucucugauagcgagggcaaugaaacacccggcggguacugucugacgcgguggaugcugauugaggcugagcucaaaugcuuuggaaacaccgccguggcuaaguguaaugaaaaacaugacgaggaguucugcgauaugcugcgccuuuuugacuucaacaagcaggccaucagacggcugaaaacagaagcgcagauguccauccagcucauuaauaaggccgucaacgcucugaucaaugaucaacuuauuaugaagaaccaucugcgcgacaucaugggcauuccuuauugcaauuacagcaaauauugguaccucaaccacaccgugacagggaagaccucucugcccagauguuggcugguguccaauggaagcuaccucaacgaaacgcacuucucugacgauaucgagcagcaggccgacaauaugaucacagagcugcuucaaaaagaauauauugaucggcagggcaagaccccucuggggcucgucgaccuguuuguuuucagcaccuccuuuuaccugaucucuauuuuccuucaccucgugaaaaucccgacacaucgccacauuaccggaaagcccugcccuaaaccccauagacugaaccacaugggcaucuguagcugcggccuguauaagcacccuggggugcccgucaaguggaaacggugaggacuagucccuguucccagagcccacuuuuuuuucuuuuuuugaaauaaaauagccugucuuucagaucucaaaggcucuuuucagagccaccaaaaaaaaaaaaaaaaaaaaaaaaaaaaaaaaaaaaaaaaaaaaaaaaaaaaaaaaaaaaaaaaaaaaaaaaaaaaaaaaaaaaaaaaaaaaaaaaaaaaa

SEQ ID NO: 14227 - RNA, 1745 nt, Artificial Sequence
  mRNA product Design a-1 (hSL-A100) comprising derived and/or modified sequence from LASV(Lassa virus/H.sapiens-wt/NGA/2016/ISTH_0009;Clade II)__AVO03571__GPC (opt5)
aggagagucccgcagucggcguccagcggcucugcuuguucgugugugugucguugcaggccuuauucaagcuuaccaugggccagaucauuaccuucuuucaagaggugccccacgucaucgaagagguuaugaacauugugcugaucgcccucagccugcuugcuauucugaaggggaucuacaauguggccacaugcggacuccugggccuugucuccuuccugcuccugugugggagaucuugcagcacgaccuauaaaggaguguacgaacugcagacacucgagcuggacauggcgucccuuaacaugaccaugccucugucuuguacaaagaauaacagccaucacuauaucaugguuggcaaugaaaccgggcucgagcugacacuuaccaacacguccauuaucaaucauaaauuuugcaaccugucugaugcucacaagaaaaaucucuacgaccaugcccugaugagcauuaucuccaccuuccaccugagcauuccgaacuuuaaucaguaugaggccaugucuugugauuucaacggaggccggaucuccgugcaguacaaucucagccacucuuaugcugucgacgccgcuaaccauugcggcacaauugccaauggggugcugcaaaccuuuaugcgcauggcguggggaggcuccuacaucgcccuugauagcgggaagggaucuugggacuguaucaugacauccuaccaguaucugauuauccagaacaccacgugggaagaucacugccaguucagcagacccuccccuauuggcuaccucgggcugcuuucucaacggacacgcgacaucuauauuagcagacggcugcucggaaccuuuacauggacccuguccgauagcgagggcaacgaaacccccggcggguacugucugacacgcuggaugcucaucgaggcugagcugaagugcuucggaaauacggccguugcuaaauguaacgaaaagcaugacgaggaauuuugcgauaugcuuagacuguucgacuuuaauaaacaggccauccggcgccucaagaccgaggcgcagaugucuauucagcugaucaacaaagccgugaaugcucuuauuaacgaucaacugaucaugaagaaucaccucagagacauuaugggcaucccuuauugcaacuacuccaaguauugguaccugaaucacacagucaccgggaaaacaagccugccccgguguuggcucgugucuaacggaagcuaccugaaugaaacccauuucuccgacgauaucgagcagcaggccgacaacaugauuacggagcuucugcaaaaggaauauaucgaucgccagggcaaaacaccucucgggcugguggaccuguucgucuuuucuaccagcuucuaccuuauuuccaucuuucuccaccugguuaagauuccgacccauagacacaucacaggaaaacccugcccuaagccccaucggcugaaucacaugggcauuuguagcugcggccucuauaaccacccuggggugcccgugaaauggaagcgcugaggacuagucccuguucccagagcccacuuuuuuuucuuuuuuugaaauaaaauagccugucuuucagaucucaaaggcucuuuucagagccaccaaaaaaaaaaaaaaaaaaaaaaaaaaaaaaaaaaaaaaaaaaaaaaaaaaaaaaaaaaaaaaaaaaaaaaaaaaaaaaaaaaaaaaaaaaaaaaaaaaaaa

SEQ ID NO: 14228 - RNA, 1745 nt, Artificial Sequence
  mRNA product Design a-1 (hSL-A100) comprising derived and/or modified sequence from LASV(Lassa virus/H.sapiens-wt/NGA/2016/ISTH_0017;Clade II)__AVO03567__GPC (opt5)
aggagagucccgcagucggcguccagcggcucugcuuguucgugugugugucguugcaggccuuauucaagcuuaccaugggccagaucauuaccuucuuucaagaggugccccacgucaucgaagagguuaugaacauugugcugaucgcccucagccugcuugcuauucugaaggggaucuacaauguggccacaugcggacucuucggccuggucuccuuucuucugcucugugggagaucuugcagcacgaccuauaaaggaguguacgaacugcagacacuggagcucgacauggcgucccugaacaugaccaugccucuuucuuguacaaagaauaacagccaucacuauaucaugguuggcaaugaaaccgggcuggagcucacacugaccaacacguccauuaucaaucauaaauucugcaaccuuucugaugcucacaagaaaaaucuguacgaccaugcccucaugagcauuaucuccaccuuucaccugagcauuccgaacuucaaucaguaugaggccaugucuugugauuuuaacggaggcaagaucuccgugcaguacaaucugagccacacauaugcuauugacgccgcuaaccauugcggcaccaucgccaaugggguccuccaaacauucaugcggauggcguggggaggcucuuacaucgcccuggauuccgggaagggaagcugggacuguauuaugaccucuuaccaguaucuuaucauucagaacacgacaugggaagaucacugccaguuuucccgccccagcccuaucggcuaccuggggcuccugucccaaagaacccgggacauuuauaucucucgcagacuucugggaacauucaccuggacccucagcgauuccgagggcaacgaaacacccggcggguacugucugacgcgguggaugcugaucgaggcugagcucaaaugcuuuggaaauaccgccguggcuaaguguaacgaaaaacaugacgaggaguucugcgauaugcugcgccuuuuugacuucaauaagcaggccauuagacggcugaaaacagaagcgcagaugagcauccagcucauuaacaaggccguuaaugcucugaucaacgaucaacuuauuaugaagaaucaucugcgcgacaucaugggcaucccuuauugcaacuacucuaaauauugguaccucaaucacaccgugacagggaagaccucccugcccagauguuggcuggucagcaacggaucuuaccucaaugaaacgcacuucagcgacgauauugagcagcaggccgacaacaugaucacagagcugcuucaaaaagaauauauggaucggcagggcaagaccccucuggggcucguggaccuguuuguguucuccaccucuuuuuaccugauuagcaucuuccuucaccucguccgcauuccgacacauagacacguuaucggaaaacccugcccuaagccccaucggcugaaucacaugggcauuuguuccugcggccuguauaaacacccuggggugcccgugaaguggaagcgcugaggacuagucccuguucccagagcccacuuuuuuuucuuuuuuugaaauaaaauagccugucuuucagaucucaaaggcucuuuucagagccaccaaaaaaaaaaaaaaaaaaaaaaaaaaaaaaaaaaaaaaaaaaaaaaaaaaaaaaaaaaaaaaaaaaaaaaaaaaaaaaaaaaaaaaaaaaaaaaaaaaaaa

SEQ ID NO: 14229 - RNA, 1745 nt, Artificial Sequence
  mRNA product Design a-1 (hSL-A100) comprising derived and/or modified sequence from LASV(Lassa virus/H.sapiens-wt/NGA/2018/ISTH_0959;Clade II)__AVV65099__GPC (opt5)
aggagagucccgcagucggcguccagcggcucugcuuguucgugugugugucguugcaggccuuauucaagcuuaccaugggccagaucauuaccuucuuucaagaggugccccacgucaucgaagagguuaugaacauugugcugaucgcccucagccugcuugcuauucugaaggggaucuacaauguggucacaugcggacucuucggccugguguccuuucuucugcucugugggagaucuugcagcacgaccuauaaaggaguuuacgaacugcagacacuggagcucgacauggccucccugaacaugaccaugccucuuucuuguacaaagaauaacagccaucacuauaucauggugggcaaugaaaccgggcuggagcucacacugaccaacacguccauuaucaaucauaaauucugcaaccuuucugaugcgcacaagaaaaaucuguacgaccaugcucucaugagcauuaucuccaccuuucaccugagcauuccgaacuucaaucaguaugaggccaugucuugugauuuuaacggaggcaagaucuccguccaguacaaucugagccacgccuaugcuauugacgccgcuaaccauugcggcacaaucgccaauggggugcuccaaaccuucaugcggauggcguggggaggcucuuacaucgcccuggauuccgggaagggaagcugggacuguauuaugacaucuuaccaguaucuuaucauucagaacaccacgugggaagaucacugccaguuuucccgccccagcccuaucggcuaccuggggcuccugucccaaagaacacgggacauuuauaucucucgcagacuucugggaaccuucacauggacccucagcgauuccgagggcaacgaaacccccggcggguacugucugacacgguggaugcugaucgaggcugagcucaaaugcuuuggaaauacggccguugcuaaguguaacgaaaaacaugacgaggaguucugcgauaugcugcgccuuuuugacuucaauaagcaggccauuagacggcugaaaaccgaagcgcagaugagcauccagcucauuaacaaggccgugaaugcucugaucaacgaucaacuuauuaugaagaaucaucugcgcgacaucaugggcaucccuuauugcaacuacucuaaauauugguaccucaaucacacagucaccgggaagacaucccugcccagauguuggcuggugagcaacggaucuuaccucaaugaaacccacuucagcgacgauauugagcagcaggccgacaacaugaucacggagcugcuucaaaaagaauauauugaucggcagggcaagacaccucuggggcucguggaccuguuugucuucuccaccucuuuuuaccugaucagcauuuuccuucaccucguuaaaaucccgacccaucgccacgugauuggaaagcccugcccuaaaccccauagacugaaucacaugggcaucuguuccugcggccuguauaagcacccuggggugcccgucaaguggaaacggugaggacuagucccuguucccagagcccacuuuuuuuucuuuuuuugaaauaaaauagccugucuuucagaucucaaaggcucuuuucagagccaccaaaaaaaaaaaaaaaaaaaaaaaaaaaaaaaaaaaaaaaaaaaaaaaaaaaaaaaaaaaaaaaaaaaaaaaaaaaaaaaaaaaaaaaaaaaaaaaaaaaaa

SEQ ID NO: 14230 - RNA, 1745 nt, Artificial Sequence
  mRNA product Design a-1 (hSL-A100) comprising derived and/or modified sequence from LASV(LASV003-NIG-2008;Clade II)__AIT17580__GPC (opt5)
aggagagucccgcagucggcguccagcggcucugcuuguucgugugugugucguugcaggccuuauucaagcuuaccaugggccagaucauuaccuucuuucaagaggugccccacgucaucgaagagguuaugaacauugugcugaucgcccucagccugcuugcuauucugaaggggaucuacaauguggccacaugcggacucuucggccuggucuccuuucuucugcucugugggagaucuugcagcacgaccuauaaaggaguguacgaacugcagacacuggagcucgacauggcgucccugaacaugaccaugccucuuucuuguacaaagaauaacagccaucacuauaucaugguuggcaaugaaaccgggcuggagcucacacugaccaacacguccauuaucaaucauaaauucugcaaccuuucugaugcucacaagaaaaaucuguacgaccaugcccucaugagcauuaucuccaccuuucaccugagcauuccgaacuucaaucaguaugaggccaugucuugugauuuuaacggaggcaagaucuccgugcaguacaaucugagccacacauaugcugucgacgccgcuaaccauugcggcaccauugccaauggggugcuccaaacauucaugcggauggcguggggaggcucuuacaucgcccuggauuccgggaagggaagcugggacuguaucaugaccucuuaccaguaucuuauuauccagaacacgacaugggaagaucacugccaguuuucccgccccagcccuauuggcuaccuggggcuccugucccaaagaacccgggacaucuauauuucucgcagacuucugggaacauucaccuggacccucagcgauuccgagagcaacgaaacacccggcggcuacugucugacgcgguggaugcugaucgaggcugagcucaaaugcuuugggaauaccgccguugcuaaguguaacgaaaaacaugacgaggaguucugcgauaugcugcgccuuuuugacuucaauaagcaggccaucagacggcugaaagcggaagcccagaugucuauucagcucaucaacaaggcugugaaugcccugauuaacgaucaacuuaucaugaagaaucaucugcgcgacauuaugggaaucccuuauugcaacuacuccaaauauugguaccucaaucacacagucaccggcagaacaagccugccccgguguuggcuggugucuaacgggagcuaccucaaugaaacccacuucuccgacgauaucgagcagcaggcugacaacaugauuacggagcugcuucaaaaggaauauauggaucgccagggaaaaacaccucugggccucguggaccuguuugucuucucuaccagcuuuuaccugaucuccauuuuccuucaccucguuaagaucccgacccauagacacgugauugggaaacccugcccuaagccccaucggcugaaucacaugggaaucuguagcugcggccuguauaaacacccuggcgugcccgucaaguggaagcgcugaggacuagucccuguucccagagcccacuuuuuuuucuuuuuuugaaauaaaauagccugucuuucagaucucaaaggcucuuuucagagccaccaaaaaaaaaaaaaaaaaaaaaaaaaaaaaaaaaaaaaaaaaaaaaaaaaaaaaaaaaaaaaaaaaaaaaaaaaaaaaaaaaaaaaaaaaaaaaaaaaaaaa

SEQ ID NO: 14231 - RNA, 1745 nt, Artificial Sequence
  mRNA product Design a-1 (hSL-A100) comprising derived and/or modified sequence from LASV(LASV035-NIG-2009;Clade II)__AIT17588__GPC (opt5)
aggagagucccgcagucggcguccagcggcucugcuuguucgugugugugucguugcaggccuuauucaagcuuaccaugggccagaucauuaccuucuuucaagaggugccccacgucaucgaagagguuaugaacauugugcugaucgcccucagccugcuugcuauucugaaggggaucuacaauguggccacaugcggacucuucggccuggucuccuuucuucugcucugugggagaucuugcagcacgaccuauaaaggaguguacgaacugcagacacuggagcucgacauggcgucccugaacaugaccaugccucuuucuuguacaaagaauaacagccaucacuauaucaugguuggcaaugaaaccgggcuggagcucacacugaccaacacguccauuaucaaucauaaauucugcaaccuuucugaugcucacaagaaaaaucuguacgaccaugcccucaugagcauuaucuccaccuuucaccugagcauuccgaacuucaaucaguaugaggccaugucuugugauuuuaacggaggcaagaucuccgugcaguacaaucugagccacgcuuaugccgucgacgcugccaaccauugcggcacaauugcgaauggggugcuccaaaccuucaugcggauggccuggggaggcucuuacaucgcucuggauuccgggaagggaagcugggacuguaucaugacaucuuaccaguaucuuauuauccagaacaccacgugggaagaucacugccaguuuucccgccccagcccuauuggcuaccuggggcuccugucccaaagaacacgggacaucuauauuucucgcagacuucugggaaccuucacauggacccucagcgauuccgagggcaacgaaacccccggcggguacugucugacacgguggaugcugaucgaggccgagcucaaaugcuuuggaaauacggcuguugccaaguguaacgaaaaacaugacgaggaguucugcgauaugcugcgccuuuuugacuucaauaagcaggcgaucagacggcugaaagccgaagcucagaugagcauucagcucaucaacaaggccgugaaugcucugauuaacgaucaacuuaucaugaagaaucaucugcgcgacauuaugggcaucccuuauugcaacuacucuaaauauugguaccucaaucacaccgucacagggaagaccucccugcccagauguuggcuggugagcaacggaucuuaccucaaugaaacacacuucagcgacgauaucgagcagcaggccgacaacaugauuaccgagcugcuucaaaaagaauauaucgaucggcagggcaagacgccucuggggcucguggaccuguuugucuucuccacaucuuuuuaccugauuagcaucuuccuucaccucguuaaaauuccgacccaucgccacgugaucggaaagcccugcccuaaaccccauagacugaaucacaugggcauuuguuccugcggccuguauaagcacccuggggugcccgucaaguggaaacggugaggacuagucccuguucccagagcccacuuuuuuuucuuuuuuugaaauaaaauagccugucuuucagaucucaaaggcucuuuucagagccaccaaaaaaaaaaaaaaaaaaaaaaaaaaaaaaaaaaaaaaaaaaaaaaaaaaaaaaaaaaaaaaaaaaaaaaaaaaaaaaaaaaaaaaaaaaaaaaaaaaaaa

SEQ ID NO: 14232 - RNA, 1745 nt, Artificial Sequence
  mRNA product Design a-1 (hSL-A100) comprising derived and/or modified sequence from LASV(LASV1000-NIG-2009;Clade II)__AIT17782__GPC (opt5)
aggagagucccgcagucggcguccagcggcucugcuuguucgugugugugucguugcaggccuuauucaagcuuaccaugggccagaucauuaccuucuuucaagaggugccccacgucaucgaagagguuaugaacauugugcugaucgcccucagccugcuugcuauucugaaggggaucuacaauguggccacaugcggacucuucggccuggucuccuuucuucugcucugugggagaucuugcagcacgaccuauaaaggaguguacgaacugcagacacuggagcucgacauggcgucccugaacaugaccaugccucuuucuuguacaaagaauaacagccaucacuauaucaugguuggcaaugaaaccgggcuggagcucacacugaccaacacguccauuaucaaucauaaauucugcaaccuuucugaugcucacaagaaaaaucuguacgaccaugcccucaugagcauuaucuccaccuuucaccugagcauuccgaacuucaaucaguaugaggccaugucuugugauuuuaacggaggcaagaucuccgugcaguacaaucugagccacacauaugcugucgacgccgcuaaccauugcggcaccauugccaauggggugcuccaaacauucaugcggauggcguggggaggcucuuacaucgcccuggauuccgggaagggaagcugggacuguaucaugaccucuuaccaguaucuuauuauccagaacacgacaugggaagaucacugccaguuuucccgccccagcccuauuggcuaccuggggcuccugucccaaagaacccgggacaucuauauuucucgcagacuucugggaacauucaccuggacccucagcgauuccgagggcaacgaaacacccggcggguacugucugacgcgguggaugcugaucgaggcugagcucaaaugcuuuggaaauaccgccguugcuaaguguaacgaaaaacaugacgaggaguucugcgauaugcugcgccuuuuugacuucaauaagcaggccaucaaaagacugaagacagaagcgcagaugagcauucagcucaucaacaaggccgugaaugcucugauuaacgaucaacuuaucaugaaaaaucaucugcgggacauuaugggcaucccuuauugcaacuacucuaaguauugguaccucaaucacaccgucacagggaaaaccucccugccccgcuguuggcuggugagcaacggaucuuaccucaaugaaacgcacuucagcgacgauaucgagcagcaggccgacaacaugauuacagagcugcuucaaaaggaauauaucgauagacagggcaaaaccccucuggggcucguggaccuguuugucuucuccaccucuuuuuaccugauuagcaucuuccuucaccucguuaagauuccgacacaucggcacguggugggaaaacccugcccuaagccccaucgccugaaucacaugggcaucuguuccugcggccuguauaagcacccugggguccccgugaaauggaagagaugaggacuagucccuguucccagagcccacuuuuuuuucuuuuuuugaaauaaaauagccugucuuucagaucucaaaggcucuuuucagagccaccaaaaaaaaaaaaaaaaaaaaaaaaaaaaaaaaaaaaaaaaaaaaaaaaaaaaaaaaaaaaaaaaaaaaaaaaaaaaaaaaaaaaaaaaaaaaaaaaaaaaa

SEQ ID NO: 14233 - RNA, 1745 nt, Artificial Sequence
  mRNA product Design a-1 (hSL-A100) comprising derived and/or modified sequence from LASV(LASV221-NIG-2010;Clade II)__AIT17624__GPC (opt5)
aggagagucccgcagucggcguccagcggcucugcuuguucgugugugugucguugcaggccuuauucaagcuuaccaugggccagaucauuaccuucuuucaagaggugccccacgucaucgaagagguuaugaacauugugcugaucgcccucagccugcuugcuauucugaaggggaucuacaauguggccacaugcggacucuucggccuggucuccuuucuucugcucugugggagaucuugcagcacgaccuauaaaggaguguacgaacugcagacacuggagcucgacauggcgucccugaacaugaccaugccucuuucuuguacaaagaauaacagccaucacuauaucaugguuggcaaugaaaccgggcuggagcucacacugaccaacacguccauuaucaaucauaaauucugcaaccuuucugaugcucacaagaaaaaucuguacgaccaugcccucaugagcauuaucuccaccuuucaccugagcauuccgaacuucaaucaguaugaggccaugucuugugauuuuaacggaggcaagaucuccgugcaguacaaucugagccacacauaugcuauugacgccgcuaaccauugcggcaccaucgccaaugggguccuccaaacauucaugcggauggcguggggaggcucuuacaucgcccuggauuccgggaagggaagcugggacuguauuaugaccucuuaccaguaucuuaucauucagaacacgacaugggaagaucacugccaguuuucccgccccagcccuaucggcuaccuggggcuccugucccaaagaacccgggacauuuauaucucucgcagacuucugggaacauucaccuggacccucagcgauuccgagggcaacgaaacacccggcggguacugucugacgcgguggaugcugaucgaggcugagcucaaaugcuuuggaaauaccgccguggcuaaguguaacgaaaaacaugacgaggaguucugcgauaugcugcgccuuuuugacuucaauaagcaggccauuagacggcugaaaacagaagcgcagaugagcauccagcucauuaacaaggccguuaaugcucugaucaacgaucaacuuauuaugaagaaucaucugcgcgacaucaugggcaucccuuauugcaacuacucuaaauauugguaccucaaucacaccgugacagggaagaccucccugcccagauguuggcuggucagcaacggaucuuaccucaaugaaacgcacuucagcgacgauauugagcagcaggccgacaacaugaucacagagaugcugcaaaaagaauauauggaucggcagggcaagaccccucuugggcugguggaccucuuuguguucuccaccucuuuuuaccugauuagcaucuuccugcaccuugucaaaauuccgacacaucgccacguuaucggaaagcccugcccuaaaccccauagacucaaucacaugggcauuuguuccugcggccuguauaagcacccuggggugcccgugaaguggaaacggugaggacuagucccuguucccagagcccacuuuuuuuucuuuuuuugaaauaaaauagccugucuuucagaucucaaaggcucuuuucagagccaccaaaaaaaaaaaaaaaaaaaaaaaaaaaaaaaaaaaaaaaaaaaaaaaaaaaaaaaaaaaaaaaaaaaaaaaaaaaaaaaaaaaaaaaaaaaaaaaaaaaaa

SEQ ID NO: 14234 - RNA, 1745 nt, Artificial Sequence
  mRNA product Design a-1 (hSL-A100) comprising derived and/or modified sequence from LASV(LASV237-NIG-2010;Clade II)__AIT17638__GPC (opt5)
aggagagucccgcagucggcguccagcggcucugcuuguucgugugugugucguugcaggccuuauucaagcuuaccaugggccagaucauuaccuucuuucaagaggugccccacgucaucgaagagguuaugaacauugugcugaucgcccucagccugcuugcuauucugaaggggaucuacaauguggccacaugcggacucuucggccuggucuccuuucuucugcucugugggagaucuugcagcacgaccuauaaaggaguguacgaacugcagacacuggagcucgacauggcgucccugaacaugaccaugccucuuucuuguacaaagaauaacagccaucacuauaucaugguuggcaaugaaaccgggcuggagcucacacugaccaacacguccauuaucaaucauaaauucugcaaccuuucugaugcucacaagaaagaccuguacgaucaugcccucaugagcauuaucuccaccuuucaccugagcauuccgaauuucaaccaguaugaggccaugucuugugacuuuaauggaggcaagaucuccgugcaguacaaccugagccacacauaugcugucgaugccgcuaaucauugcggcaccauugccaacggggugcuccaaacauucaugcggauggcguggggaggcucuuacaucgcccuggacuccgggaagggaagcugggauuguaucaugaccucuuaccaguaucuuauuauccagaauacgacaugggaagaccacugccaguuuucccgccccagcccuauuggcuaccuggggcuccugucccaaagaacccgggauaucuauauuucucgcagacuucugggaacauucaccuggacccucagcgacuccgagggcaacgaaacacccggcggguacugucugacgcgguggaugcugaucgaggcugagcucaaaugcuuuggaaacaccgccguugcuaaguguaaugaaaaacaugaugaggaguucugcgacaugcugcgccuuuuugauuucaacaagcaggccaucagacggcugaaaacagaagcgcagaugagcauucagcucaucaauaaggccgugaacgcucugauuaaugaccaacuuaucaugaagaaccaucugcgcgacauuaugggcaucccuuauugcaauuacucuaaauauugguaccucaaccacaccgucacagggaagaccucccugcccagauguuggcuggugagcaauggaucuuaccucaacgaaacgcacuucagcgaugacaucgagcagcaggccgauaauaugauuacagagcugcuucaaaaagaauauauggaccggcagggcaagaccccucuggggcucguggaucuguuugucuucuccaccucuuuuuaccugaucagcauuuuccuucaccucaucaaaauuccgacacaucgccacaucaccggaaagcccugcccuaaaccccauagacugaaccacaugggcauuuguuccugcggccuguauaagcacccugggguucccgugaaguggaaacggugaggacuagucccuguucccagagcccacuuuuuuuucuuuuuuugaaauaaaauagccugucuuucagaucucaaaggcucuuuucagagccaccaaaaaaaaaaaaaaaaaaaaaaaaaaaaaaaaaaaaaaaaaaaaaaaaaaaaaaaaaaaaaaaaaaaaaaaaaaaaaaaaaaaaaaaaaaaaaaaaaaaaa

SEQ ID NO: 14235 - RNA, 1745 nt, Artificial Sequence
  mRNA product Design a-1 (hSL-A100) comprising derived and/or modified sequence from LASV(LASV253-NIG-2011;Clade II)__AIT17670__GPC (opt5)
aggagagucccgcagucggcguccagcggcucugcuuguucgugugugugucguugcaggccuuauucaagcuuaccaugggccagaucauuaccuucuuucaagaggugccccacgucaucgaagagguuaugaacauugugcugaucgcccucagccugcuugcuauucugaaggggaucuacaauguggccacaugcggacucuucggccuggucuccuuucuucugcucugugggagaucuugcagcacgaccuauaaaggaguguacgaacugcagacacuggagcucgacauggcgucccugaacaugaccaugccucuuucuuguacaaagaauaacagccaucacuauaucaugguuggcaaugaaaccgggcuggagcucacacugaccaacacguccauuaucaaucauaaauucugcaaccuuucugaugcucacaagaaaaaucuguacgaccaugcccucaugagcauuaucuccaccuuucaccugagcauuccgaacuucaaucaguaugaggccaugucuugugauuuuaacggaggcaagaucuccgugcaguacaaucugagccacacauaugcugucgacgccgcuaaccauugcggcaccauugccaauggggugcuccaaacauucaugcggauggcguggggaggcucuuacaucgcccuggauuccgggaagggaagcugggacuguaucaugaccucuuaccaguaucuuauuauccagaacacgacaugggaagaucacugccaguuuucccgccccagcccuauuggcuaccuggggcuccugucccaaagaacccgggacaucuauauuucucgcagacuucugggaacauucaccuggacccucagcgauuccgagggcaacgaaacacccggcggguacugucugacgcgguggaugcugaucgaggcugagcucaaaugcuuuggaaauaccgccguugcuaaguguaacgaaaaacaugacgaggaguucugcgauaugcugcgccuuuuugacuucaauaagcaggccaucagacggcugaaagcggaagcccagaugagcauucagcucaucaacaaggcugugaaugcccugauuaacgaucaacuuaucaugaagaaucaucugcgcgacauuaugggcaucccuuauugcaacuacucuaaauauugguaccucaaucacacagucaccgggagaacaucccugccccgguguuggcuggugagcaacggaucuuaccucaaugaaacccacuucagcgacgauaucgagcagcaggcugacaacaugauuacggagcugcuucaaaaggaauauaucgaucgccagggcaaaacaccucuggggcucguggaccuguuugucuucuccaccucuuuuuaccugauuagcaucuuccuucaccucguuaagauuccgacccauagacacaucauuggaaaacccugcccuaagccccaucggcugaaucacaugggcaucuguuccugcggccuguauaaacacccuggggugcccgugaaguggaagcgcugaggacuagucccuguucccagagcccacuuuuuuuucuuuuuuugaaauaaaauagccugucuuucagaucucaaaggcucuuuucagagccaccaaaaaaaaaaaaaaaaaaaaaaaaaaaaaaaaaaaaaaaaaaaaaaaaaaaaaaaaaaaaaaaaaaaaaaaaaaaaaaaaaaaaaaaaaaaaaaaaaaaaa

SEQ ID NO: 14236 - RNA, 1745 nt, Artificial Sequence
  mRNA product Design a-1 (hSL-A100) comprising derived and/or modified sequence from LASV(LASV254-NIG-2011;Clade II)__AIT17674__GPC (opt5)
aggagagucccgcagucggcguccagcggcucugcuuguucgugugugugucguugcaggccuuauucaagcuuaccaugggccagaucauuaccuucuuucaagaggugccccacgucaucgaagagguuaugaacauugugcugaucgcccucagccugcuugcuauucugaaggggaucuacaauguggccacaugcggacucuucggccuggucuccuuucuucugcucugugggagaucuugcagcacgaccuauaaaggaguguacgaacugcagacacuggagcucgacaugaccaaccugaauaugacaaugccucuuuccuguaccaagaacaauucucaucacuauaucaugguuggcaacgaaacagggcuggagcucacccugacgaauaccagcauuaucaaccauaaauucugcaaucuuuccgaugcgcacaagaaaaaccuguacaaucaugcucucaugucuauuaucagcacauuucaccuguccauuccgaacuucaaucaguaugaggccaugagcugugacuuuaacggaggcaagaucucugugcaguacaaucugucccacagcuaugccgucgaugcugccaaccauugcggcaccauugcuaacggggugcuccaaacauucaugcggauggccuggggaggcucuuacaucgcgcuggacuccgggaagggaaauugggauuguaucaugaccagcuaccaguaucuuauuauccagaacacgacaugggaagaccacugccaguuuucucgccccuccccuauuggcuaccuggggcuccugagccaaagaacccgggauaucuauauuucccgcagacuucugggaacauucaccuggacccucucugacagcgagggcaaugaaacacccggcggguacugucugacgcgguggaugcugaucgaggccgagcucaaaugcuuuggaaacaccgcuguugccaaguguaaugaaaaacaugaugaggaguucugcgacaugcugcgccuuuuugauuucaacaagcaggcuaucagacggcugaaaacagaagcccaggcgaauauucagcucaucaacaaggccgugaaugcucugauuaacgaccaacuuaucaugaagaaucaucugcgcgauauuaugggcaucccuuauugcaacuacuccaaauauugguaccucaaucacaccgucacagggaagaccagccugcccagauguuggcuggugucuaacggauccuaccucaaugaaacgcacuucagcgacgacaucgagcagcaggccgauaacaugauuacagagcugcuucaaaaagaauauauggaccggcagggcaagaccccucuggggcucguggaucuguuugucuucucuaccagcuuuuaccugaucuccauuuuccuucaccucguuaaaaucccgacacaucgccacgugauuggaaagcccugcccuaaaccccauagacugaaccacaugggcaucuguucuugcggccuguauaagcacccuggggugcccgucaaguggaaacggugaggacuagucccuguucccagagcccacuuuuuuuucuuuuuuugaaauaaaauagccugucuuucagaucucaaaggcucuuuucagagccaccaaaaaaaaaaaaaaaaaaaaaaaaaaaaaaaaaaaaaaaaaaaaaaaaaaaaaaaaaaaaaaaaaaaaaaaaaaaaaaaaaaaaaaaaaaaaaaaaaaaaa

SEQ ID NO: 14237 - RNA, 1745 nt, Artificial Sequence
  mRNA product Design a-1 (hSL-A100) comprising derived and/or modified sequence from LASV(Nig08-A19;Clade III)__ADU56618__GPC (opt5)
aggagagucccgcagucggcguccagcggcucugcuuguucgugugugugucguugcaggccuuauucaagcuuaccaugggccagaucgugaccuucuuucaagaggucccccacguuauugaagaggugaugaacaucgugcugauugcccucagcauccuggcuauucuuaaggggcuguacaauaucgccacaugcggacucaucggccuggucacguuccuucugcucuccgggagaucuuguagcaugaccuauaaaggaguguacgaacugcagacacuggagcucaacaugaauacccugaacaugacaaugccucuuuccugcaccaagaauaacucucaucacuauauuaugguuggcaaugaaacagggcuggagcucacccugacgaacaccagccuucugcaucacaaauuuuguaaucucuccgacgcgcauaagaaaaaccuguacgaucacacacugaugucuaucauuagcaccuuccaccucuccaucccgaauuuuaaccaguaugaggcuaugagcugcgacuucaauggaggcaagauuacagugcaguacaaccugucucauuccuaugccaucgaugccgcuaaucacuguggcaccgucgccaacggggugcuucaaacguuuaugcggauggcuuggggaggcagcuacauugcccuggacucugggcgcggaaagugggauugcaucaugacauccuaccaguaucucaucauucagaacaccacaugggaagaccauugucaguucagcagacccucuccuaucggcuaccuggggcuucugucccaacggacccgcgauauuuauaucagcagacggcuccugggaaccuuuacauggacgcuguccgacucugagggcaaugaaacccccggcggguacugccucacacgcuggaugcugauugaggcggagcuuaaauguuucggaaacaccgccguugcuaagugcaaugaaaaacacgaugaggaauuuugugacaugcugagacucuucgauuuuaacaagcaggccauccggcgccugaaagcugaggcccagaugagcauccagcuuauuaauaaggcggugaacgcccugaucaaugaccaacucauuaugaagaaccaccugagagauaucaugggcauuccuuauugcaauuacuccaaauauugguaccugaaccauacaagcaccgggcggacgucucucccccgcugcuggcuggucuccaauggaagcuaccuuaacgaaacacacuucucugacgacaucgagcagcaggcugauaauaugaucaccgagaugcugcaaaaggaauaucucgacagacagggcaaaaccccucuggggcugguggaucuuuucguguuuagcacauccuucuaccucauuucuaucuuucugcaucuggucaagauuccgacccaccggcauaucguuggaaaacccuguccuaagccccaccgccucaaccacaugggcauuugcagcuguggccuguauaaacagccuggggugcccgugagauggaagcggugaggacuagucccuguucccagagcccacuuuuuuuucuuuuuuugaaauaaaauagccugucuuucagaucucaaaggcucuuuucagagccaccaaaaaaaaaaaaaaaaaaaaaaaaaaaaaaaaaaaaaaaaaaaaaaaaaaaaaaaaaaaaaaaaaaaaaaaaaaaaaaaaaaaaaaaaaaaaaaaaaaaaa

SEQ ID NO: 14238 - RNA, 1748 nt, Artificial Sequence
  mRNA product Design a-1 (hSL-A100) comprising derived and/or modified sequence from LASV(G1180-SLE-2010;Clade IV)__AIT17168__GPC (opt5)
aggagagucccgcagucggcguccagcggcucugcuuguucgugugugugucguugcaggccuuauucaagcuuaccaugggccagaucgugaccuucuuucaagaggucccccacguuauugaagaggugaugaacaucgugcugauugcccucagcauccuggcuguccuuaaggggcuguacaauuucgccacaugcggacucgugggccugcuuacguuucugcuccugugugggagauccugcaccgcgucucgguauaaaggaguuuacgaacugcagacacucgagcugaacauggaaacccuuaauaugacaaugccucugagcuguaccaagaacaauucccaucacuauauuauggugggcaacgagacagggcucgagcugacccuuacgaauaccucuaucaucaaccauaaauucugcaaucugagcgacgcucacaagaaaaaccucuacgaucaugcccugauguccauuaucucuacauuucaccugagcauuccgaauuucaaccaguaugaagccauguccugugacuuuaauggaggcaagaucagcguccaguacaaccucucucacuccuaugcuggcgaugccgcuaaucauugcgggaccguggccaacggaguucugcaaacauucaugcgcauggcguggggcgggagcuacauugcccuugacucuggacacggcuccugggauuguaucaugaccagcuaccaguaucugauuauccagaacacgacaugggaggaccauugccaguuuucuagacccuccccuaucggguaccucggacugcuuagccaacggacccgcgauauuuauaucuccagacggcugcucggcacauucaccuggacccugucugacagcgaaggcaaggauacacccgggggauacugucugacgcgcuggaugcucauugaggcugagcugaaaugcuuuggcaauaccgccguggcuaaguguaacgaaaaacacgacgaggaguucugcgauaugcuuagacuguuugacuucaauaagcaggccauccagcggcucaaagcggaagcccagauguccauucaacugaucaacaaggcugucaaugcccuuaucaacgaucagcugauuaugaagaaucaccuccgcgacaucauggggauuccuuauugcaacuacagcaaauauugguaccugaaucauacaaccacaggaaagaccucucugcccaaauguuggcucguguccaacggcagcuaccugaaugaaacgcacuucucugacgauaucgagcagcaagcugacaacaugauuacagagaugcuucagaaggaauauauggagagacaggggaaaaccccucugggacucguggaucuguuugucuucagcaccuccuuuuaccugaucucuaucuuccuucaucucguuaagauuccgacacaccggcauaucgugggcaaaagcugccccaagccucaccgccugaaucacaugggcauuuguuccugcgggcuguauaagcagcccggagugccugucaaauggaagagaugaggacuagucccuguucccagagcccacuuuuuuuucuuuuuuugaaauaaaauagccugucuuucagaucucaaaggcucuuuucagagccaccaaaaaaaaaaaaaaaaaaaaaaaaaaaaaaaaaaaaaaaaaaaaaaaaaaaaaaaaaaaaaaaaaaaaaaaaaaaaaaaaaaaaaaaaaaaaaaaaaaaaa

SEQ ID NO: 14239 - RNA, 1748 nt, Artificial Sequence
  mRNA product Design a-1 (hSL-A100) comprising derived and/or modified sequence from LASV(G1442-SLE-2011;Clade IV)__AIT17180__GPC (opt5)
aggagagucccgcagucggcguccagcggcucugcuuguucgugugugugucguugcaggccuuauucaagcuuaccaugggccagaucgugaccuucuuucaagaggucccccacguuauugaagaggugaugaacaucgugcugauugcccucagcauccuggcuguccuuaaggggcuguacaauguggccacaugcggacucauuggccugguuacguuccuucugcucugugggagauccugcaccacaacccuguauaaaggaguguacgaacugcagacacucgagcugaacauggaaacccuuaauaugacaaugccucugucuuguaccaagaacaauagccaucacuauauccgggucggcaacgagacggggcucgagcugacccuuacaaauaccuccaucauuaaccauaaauuuugcaaucugucugacgcgcacaagaaaaaccucuacgaucaugcucugaugagcaucauuuccacauuccaccugucuaucccgaauuuuaaccaguaugaagccaugagcugugacuucaauggaggcaagauuuccgugcaguacaaccucagccacucuuaugccggcgaugcugccaaucauugcgggaccguugcuaacggagugcugcaaacguuuaugcgcauggccuggggcggguccuacaucgcgcuugacagcggaagaggcaacugggauuguauuaugacaucuuaccaguaucugaucauccagaauaccacaugggacgaucacugccaguucucccggcccagcccuauuggguaccucggacugcuuucucaacgcaccagagacgucuauaucucccggcgccugcucggcaccuuuacauggacgcugagcgauuccgagggcaaggacacccccgggggauacugucugacaagauggaugcucauugaagccgagcugaaaugcuucggcaacaccgcuguggccaaguguaaugagaaacaugaugaagaguuuugcgacaugcuucggcuguucgauuuuaacaagcaggcuauccagcgccucaaagccgaagcgcagaugucuauucaacugaucaauaaggccgugaacgcucuuaucaaugaccagcugauuaugaagaaccaccucagagacaucauggggauuccuuauugcaauuacagcaaauauugguaccugaacaauacagccaccggaaagacgucccugcccaaauguuggcucaucagcaacggcucuuaccugaaugagacacacuucuccgaugacauugaacaggaggcugauaacaugaucaccgagaugcuucaaaaggaauauauggagcggcaggggaaaaccccucugggacucgucgaccuguucguuuuuagcacaucuuucuaccugaucagcauuuuucuucaucucgugaagaucccgacccaccgccauauugugggcaaauccugccccaagccucacagacugaaucauaugggcaucuguucuugcgggcuguauaagcagcccggagucccugugcgguggaaacgcugaggacuagucccuguucccagagcccacuuuuuuuucuuuuuuugaaauaaaauagccugucuuucagaucucaaaggcucuuuucagagccaccaaaaaaaaaaaaaaaaaaaaaaaaaaaaaaaaaaaaaaaaaaaaaaaaaaaaaaaaaaaaaaaaaaaaaaaaaaaaaaaaaaaaaaaaaaaaaaaaaaaaa

SEQ ID NO: 14240 - RNA, 1748 nt, Artificial Sequence
  mRNA product Design a-1 (hSL-A100) comprising derived and/or modified sequence from LASV(G3010-SLE-2013;Clade IV)__AIT17344__GPC (opt5)
aggagagucccgcagucggcguccagcggcucugcuuguucgugugugugucguugcaggccuuauucaagcuuaccaugggccagaucgugaccuucuuucaagaggucccccacguuauugaagaggugaugaacaucgugcugauugcccucagcauccuggcuguccuuaaggggcuguacaauuucgccacaugcggacucgugggccugguuacguuucuucugcucugugggagauccugcaccacaucucuguauaaaggaguguacgaacugcagacccucgagcugaacauggaaacacuuaauaugaccaugccucugagcuguacaaagaacaauucccaucacuauauuauggucggcaacgagaccgggcucgagcugacgcuuaccaauacaucuaucaucaaccauaaauucugcaaucugagcgacgcgcacaagaaaaaccucuacaaucaugcucugauguccauuaucucuaccuuucaccugagcauuccgaacuucaaucaguaugaagccauguccugugauuuuaacggaggcaagaucagcgugcaguacaaucucucucacuccuaugccggcgacgcugccagccauugcgggacaguugcuaacggagugcugcaaaccuucaugcggauggccuggggcgggucuuacauugcgcuugauuccggauacggcaagugggacuguaucaugacgagcuaucaguaccugauuauccagaacacaaccugggaggaucacugccaguuuucucgccccuccccuaucggguaucucggacugcuuagccaaagaacacgggacauuuacaucucccgcagacugcucggcaccuucaccuggacacugucugauagcgaaggcaaagacacgcccgggggauauugucugacccgguggaugcucauugaggccgagcugaagugcuuuggcaauacagcugucgccaaauguaacgaaaagcaugaugaggaguucugcgacaugcuucgccuguuugauuucaauaaacaggcuauccagagacucaagaccgaagcccagauguccauucaacugaucaacaaggcggugaaugcccuuaucaacgaccagcugauuaugaaaaaucaccuccgggauaucauggggauuccuuacugcaacuauagcaaguacugguaccugaaucacacaaccacgggaaaaacaucucugcccaaguguuggcucguguccaacggcagcuaucugaaugaaacccauuucucugacgacaucgagcagcaagcugauaacaugauuaccgagaugcuucagaaagaauacauggagcgccaggggaagacaccucugggacucgucgaccuguuuguuuucagcaccuccuuuuaucugaucucuaucuuccuucaccucgugaaaauuccgacacauagacacaucgugggcaagagcugccccaagccucaucggcugaaucacaugggcauuuguuccugcgggcuguacaaacagcccggagucccugugcgcuggaagagaugaggacuagucccuguucccagagcccacuuuuuuuucuuuuuuugaaauaaaauagccugucuuucagaucucaaaggcucuuuucagagccaccaaaaaaaaaaaaaaaaaaaaaaaaaaaaaaaaaaaaaaaaaaaaaaaaaaaaaaaaaaaaaaaaaaaaaaaaaaaaaaaaaaaaaaaaaaaaaaaaaaaaa

SEQ ID NO: 14241 - RNA, 1748 nt, Artificial Sequence
  mRNA product Design a-1 (hSL-A100) comprising derived and/or modified sequence from LASV(G502-SLE-2009;Clade IV)__AIT17126__GPC (opt5)
aggagagucccgcagucggcguccagcggcucugcuuguucgugugugugucguugcaggccuuauucaagcuuaccaugggccagaucgugaccuucuuucaagaggucccccacguuauugaagaggugaugaacaucgugcugauugcccucagcauccuggcuguccuuaaggggcuguacaauuucgccacaugcggacucgugggccugcuuacguuucugcuccugugugggagauccugcaccacaggacuguauaaaggcguuuacgaacuccagacccuggagcuuaacauggaaacacugaauaugaccaugccucucucuuguacaaagaacaauagccaucacuauauuaugguggggaacgagaccggacuggagcuuacgcugaccaauacauccaucaucaaccauaaauucugcaaucucucugacgcgcacaagaaaaaccuguacgaucaugcucugaugagcauuaucuccaccuuucaccucucuauuccgaauuucaaccaguaugaagccaugagcugugacuuuaauggcggcaagaucuccguccaguacaaccugagccacucuuaugccggggaugcugccgaccauugcggaacaguggcuaauggcguucuucaaaccuucaugcggauggccuggggaggguccuacauugcgcuggauagcggccgcgggagaugggacuguaucaugacgucuuaccaguaucucauuauccagaacacaaccugggaggaucacugccaguuuucccggcccagcccuaucggauaccugggccuucugucucaacgcacaagagacauuuauaucucccggcgccuccugggcaccuucaccuggacacugagcgauuccgaagggaaggacacgcccggaggcuacugucucaccagauggaugcugauugaggccgagcuuaaaugcuuugggaacacagcuguggccaaguguaaugaaaaacaugaugaggaguucugcgacaugcugcggcucuuugauuucaacaagcaggcuauccagcgccugaaagccgaagcgcagaugucuauucaacuuaucaauaaggccgucaacgcucugaucaaugaccagcucgugaugaagaaccaccugagagacauuaugggaaucccuuauugcaauuacagccgguauugguaccugaaccacaccacaaccggccgcacgucccuccccaaauguuggcuggugagcaaugggucuuaccuuaacgaaacacauuucuccgaugacauugagcagcaagccgauaauaugaucaccgagaugcugcagaaggaauauauggagagacagggaaaaaccccucucggccuggucgaccuguuuguuuucagcacaucuuuuuaccuuauuagcaucuuccuccaccuggugaagaucccgacccaucggcacauugugggcaaauccugccccaagccucaucgccugaaccacauggggaucuguucuugcggacucuauaaacagcccggcgucccugugaaguggaagagaugaggacuagucccuguucccagagcccacuuuuuuuucuuuuuuugaaauaaaauagccugucuuucagaucucaaaggcucuuuucagagccaccaaaaaaaaaaaaaaaaaaaaaaaaaaaaaaaaaaaaaaaaaaaaaaaaaaaaaaaaaaaaaaaaaaaaaaaaaaaaaaaaaaaaaaaaaaaaaaaaaaaaa

SEQ ID NO: 14242 - RNA, 1748 nt, Artificial Sequence
  mRNA product Design a-1 (hSL-A100) comprising derived and/or modified sequence from LASV(G733-SLE-2010;Clade IV)__AIT17154__GPC (opt5)
aggagagucccgcagucggcguccagcggcucugcuuguucgugugugugucguugcaggccuuauucaagcuuaccaugggccagaucgugaccuucuuucaagaggucccccacguuauugaagaggugaugaacaucgugcugauugcccucagcauccuggcuguccuuaaggggcuguacaauuucgccacaugcggaauugugggccucguuuccuuucugcuucugugugggagaucuugcacgaccagccucuauaaaggaguguacgaacugcagacacuggagcucaacauggaaacccugaauaugacaaugccucuuuccuguaccaagaacaauucucaucacuauaucauggucggcaacgagacagggcuggagcucacccugacgaauaccagcaucauuaaccauaaauucugcaaucuuuccgacgcgcacaagaaaaaccuguacgaucaugcucucaugucuaucauuagcacauuucaccuguccaucccgaauuucaaccaguaugaagccaugagcugugacuuuaauggaggcaagauuucugugcaguacaaccugucccacagcuaugccggcgaugcugccaaucauugcgggaccaucgcuaacggaguucuccaaacauucaugcggauggccuggggcgggucuuacauugcgcuggacuccggacgcgauagaugggacuguaucaugaccagcuaccaguaucuuaucauucagaacacgacaugggaggaucacugccaguuuucucggcccuccccuaucggcuaccuggggcuccugagccaacgcaccagagacauuuauaucucccggcgccuucugggaacauucaccuggacccucucugauagcgaaggcaaggacacacccggcggguacugucugacgagauggaugcugauugaggccgagcucaaaugcuuuggaaauaccgcuguggccaaguguaacgaaaaacaugaugaggaguucugcgacaugcugcggcuuuuugauuucaauaagcaggcuauccagcgccugaaagccgaagcgcagauguccauccaacucauuaacaaggccgucaaugcucugaucaacgaccagcuuauuaugaagaaucaccugagagacaucaugggcauuccuuauugcaacuacagcaaauauugguaccucaaucacacaaccacagggaagaccucucugcccaaauguuggcugguguccaacggaagcuaccucaaugaaacgcauuucucugaugacaucgagcagcaagccgauaacaugaucacagagaugcugcagaaggaauauauggagcggcagggcaaaaccccucuugggcugguggaccucuuugucuucagcaccuccuuuuaccugauuucuaucuuccugcaccuuguuaagauuccgacacaucgccacguggugggaaaaagcugccccaagccucauagacucaaucacaugggcaucuguuccugcggccuguaugggcagcccggagucccugugaaguggaaacggugaggacuagucccuguucccagagcccacuuuuuuuucuuuuuuugaaauaaaauagccugucuuucagaucucaaaggcucuuuucagagccaccaaaaaaaaaaaaaaaaaaaaaaaaaaaaaaaaaaaaaaaaaaaaaaaaaaaaaaaaaaaaaaaaaaaaaaaaaaaaaaaaaaaaaaaaaaaaaaaaaaaaa

SEQ ID NO: 14243 - RNA, 1748 nt, Artificial Sequence
  mRNA product Design a-1 (hSL-A100) comprising derived and/or modified sequence from MOPV/LASV reassortant(IGS-1;Clade IV)__AFY05576__GPC (opt5)
aggagagucccgcagucggcguccagcggcucugcuuguucgugugugugucguugcaggccuuauucaagcuuaccaugggccagaucgugaccuucuuucaagaggucccccacguuauugaagaggugaugaacaucgugcugauugcccucagcguccuggcugugcuuaaggggcuguacaauuucgccacaugcggacucguuggccuggugacguuucuucugcucugugggagauccugcaccacaucucuguauaaaggagucuacgaacugcagacccucgagcugaacauggaaacacuuaauaugaccaugccucugagcuguacaaagaacaauucccaucacuauaucauggugggcaacgagaccgggcucgagcugacgcuuaccaauacaucuauuaucaaccauaaauucugcaaucugagcgacgcgcacaagaaaaaccucuacgaucaugcucugauguccaucauuucuaccuuucaccugagcaucccgaauuucaaccaguaugaagccauguccugugacuuuaauggaggcaagauuagcguucaguacaaccucucucacuccuaugccggcgaugcugccaaucauugcgggacaguggcuaacggaguccugcaaaccuucaugcggauggccuggggcgggagcuacaucgcgcuugacucuggacgcggcaacugggauuguauuaugacguccuaccaguaucugaucauucagaauacaaccugggaggaccacugccaguuuagcagacccucuccuaucggguaccucggacugcuuucccaacggacacgcgauaucuauauuagcagacggcugcucggcaccuucaccuggacacuguccgacucugaaggcgaggauacgcccgggggauacugucugacccgcuggaugcucaucgaggccgaacugaagugcuuuggcaacacagcuguggccaaauguaaugagaagcaugacgaagaguucugcgauaugcuuagacuguuugacuucaacaaacaggcuauucagcggcucaaggccgaagcgcagaugagcauccaacugauuaauaaagccgugaacgcucuuaucaaugaucagcugaucaugaagaaccaccuccgcgacauuauggggaucccuuauugcaauuacuccaaguauugguaccugaaccacaccacaaccggaagaacgagccugcccaaauguuggcucgucucuaauggcuccuaccugaacgagacacauuucagcgacgauauugagcagcaagccgacaauaugaucaccgaaaugcuucagaaggaguauauggaacggcaggggaaaaccccucugggacucguugaucuguuuguguucucuaccagcuuuuaccugauuuccaucuuccuucaccucgugaagaucccgacacaucgccacauugucggcaaaucuugccccaagccucauagacugaaccacaugggcaucuguagcugcgggcuguauaaacagcccggagugccuguuaaguggaagcggugaggacuagucccuguucccagagcccacuuuuuuuucuuuuuuugaaauaaaauagccugucuuucagaucucaaaggcucuuuucagagccaccaaaaaaaaaaaaaaaaaaaaaaaaaaaaaaaaaaaaaaaaaaaaaaaaaaaaaaaaaaaaaaaaaaaaaaaaaaaaaaaaaaaaaaaaaaaaaaaaaaaaa

SEQ ID NO: 14244 - RNA, 1748 nt, Artificial Sequence
  mRNA product Design a-1 (hSL-A100) comprising derived and/or modified sequence from LASV(LM765-SLE-2012;Clade IV)__AIT17814__GPC (opt5)
aggagagucccgcagucggcguccagcggcucugcuuguucgugugugugucguugcaggccuuauucaagcuuaccaugggccagaucgugaccuucuuucaagaggucccccacguuauugaagaggugaugaacaucgugcugauugcccucagcauccuggcuguccuuaaggggcuguacaauuucgccacaugcggacucgugggccugguuacguuucuucugcucugugggagauccugcaccacaucucuguauaaaggaguguacgaacugcagacccucgagcugaacauggaaacacuuaauaugaccaugccucugagcuguacaaagaacaauucccaucacuauauuauggucggcaacgagaccgggcucgagcugacgcuuaccaauacaucuaucaucgaccauaaauucugcaaccugagcgaugcgcaccggaagaaucucuacgaccaugcucugauguccauuaucucuaccuuucaccugagcauuccgaacuucaaucaguaugaagccauguccugugauuuuaacggaggcaaaaucagcgugcaguacaaucucucucacuccuaugccaaggacgcugccgaucauugcggcacaguugcuaacggggugcugcaaaccuucaugcgcauggccuggggaggcagcuacauugcgcuugacucugggagaggacggugggauuguaucaugacguccuaccaguaucugauuauccagaauacaaccugggaggaccacugccaguuuagccgccccucuccuaucggcuaccucgggcugcuuucccaaagaacacgggauauuuauaucagccgcagacugcucggaaccuucaccuggacacuguccgacucugaaggcaaggauacgcccggcggguacugucugacccgguggaugcucauugaggccgagcugaaaugcuuuggaaacacagcugucgccaaguguaacgaaaaacaugacgaggaguucugcgauaugcuucgccuguuugacuucaauaagcaggcuauccagagacucaaagccgaagcgcagaugagcauucaacugaucaacaaggccgugaaugcucuuaucaacgaccagcugauuaugaagaaucaccuccgggauaucaugggcauuccuuauugcaacuacuccaaauauugguaccugaaucacaccacaaccgggaagacgagccugcccaaauguuggcucgugucuaacggauccuaccugaaugaaacacauuucagcgacgauaucgagcagcaagccgacaacaugauuaccgagaugcuucagaaggaauauauggagcgccagggcaaaaccccucuggggcucgucgaucuguuuguuuucucuaccagcuuuuaccugaucuccaucuuccuucaccucgugaagauuccgacacauagacacaucgugggaaaacccugcccuaagccccaucggcugaaucacaugggcauuuguucuugcggccuguauaagcagccugggguccccgugaaauggaagcgcugaggacuagucccuguucccagagcccacuuuuuuuucuuuuuuugaaauaaaauagccugucuuucagaucucaaaggcucuuuucagagccaccaaaaaaaaaaaaaaaaaaaaaaaaaaaaaaaaaaaaaaaaaaaaaaaaaaaaaaaaaaaaaaaaaaaaaaaaaaaaaaaaaaaaaaaaaaaaaaaaaaaaa

SEQ ID NO: 14245 - RNA, 1748 nt, Artificial Sequence
  mRNA product Design a-1 (hSL-A100) comprising derived and/or modified sequence from LASV(LM776-SLE-2012;Clade IV)__AIT17824__GPC (opt5)
aggagagucccgcagucggcguccagcggcucugcuuguucgugugugugucguugcaggccuuauucaagcuuaccaugggccagaucgugaccuucuuucaagaggucccccacguuauugaagaggugaugaacaucgugcugauugcccucagcauccuggcuguccuuaaggggcuguacaauuucgccacaugcggacucgugggccugguuacguuucuucugcucugugggagauccugcaccacaucuguguauaaaggagucuacgaacugcagacccuggagcucaacauggaaacacugaauaugaccaugccucuuagcuguacaaagaacaauucccaucacuauauuauggugggcaacgagaccgggcuggagcucacgcugaccaauacaucuaucaucaaccauaaauucugcaaucuuagcgacgcgcacaagaaaaaccuguacgaucaugcucucauguccauuaucucuaccuuucaccugagcauuccgaauuucaaccaguaugaagccauguccugugacuuuaauggaggcaagaucagcguucaguacaaccugucucacuccuaugccggcgaugcugccaaucauugcgggacaguggcuaacggaguccuccaaaccuucaugcggauggccuggggcgggagcuacauugcgcuggacucuggacacggcaagugggauuguaucaugacguccuaccaguaucuuauuauccagaacacaaccugggaggaccauugccaguuuagccgccccucuccuaucggguaccugggacuccugucccaaagaacacgggauauuuauaucagccgcagacuucugggcaccuucaccuggacacucuccgacucugaaggcaaagauacgcccgggggauacugucugacccgguggaugcugauugaggccgagcucaagugcuuuggcaauacagcuguggccaaauguaacgaaaagcacgacgaggaguucugcgauaugcugcgccuuuuugacuucaauaaacaggcuauccagagacugaaggccgaagcgcagaugagcauucaacucaucaacaaggccgugaaugcucugaucaacgaucagcuuauuaugaaaaaucaucugcgggacaucauggggauuccuuauugcaacuacuccaaguauugguaccucaaucacaccacaaccggaaaaacgagccugcccaaguguuggcuggucucuaacggcuccuaccucaaugaaacacacuucagcgacgauaucgagcagcaagccgacaacaugauuaccgagaugcugcagaaagaauauauggagcgccaggggaagaccccucuuggacugguugaucucuuuguguucucuaccagcuuuuaccugaucuccaucuuccugcaucuugugaaaauuccgacacacagacauaucgucggcaagucuugccccaagccucaccggcucaaucacaugggcauuuguagcugcgggcuguauaaacagcccggagugccuguucgcuggaagagaugaggacuagucccuguucccagagcccacuuuuuuuucuuuuuuugaaauaaaauagccugucuuucagaucucaaaggcucuuuucagagccaccaaaaaaaaaaaaaaaaaaaaaaaaaaaaaaaaaaaaaaaaaaaaaaaaaaaaaaaaaaaaaaaaaaaaaaaaaaaaaaaaaaaaaaaaaaaaaaaaaaaaa

SEQ ID NO: 14246 - RNA, 1748 nt, Artificial Sequence
  mRNA product Design a-1 (hSL-A100) comprising derived and/or modified sequence from LASV(Mad39;Clade IV)__ANH09722__GPC (opt5)
aggagagucccgcagucggcguccagcggcucugcuuguucgugugugugucguugcaggccuuauucaagcuuaccaugggccagaucgugaccuucuuucaagaggucccccacguuauugaagaggugaugaacaucgugcugauugcccucagcauccuggcuguccuuaaggggcuguacaauguggccacaugcggacucauuggccugguuacguuccuucugcucugugggagauccugcaccacaacccuguauaaaggaguguacgaacugcaggcgcucgagcugaacauggaaacacuuaauaugaccaugccucugucuuguacaaagaacaauagccaucacuauauccgggucggcaacgagaccgggcucgagcugacgcuuaccaauacaucccugaucaaccauaaauuuugcaaucucucugacgcucacaagaaaaaccuguacgaucaugcccugaugagcauuaucuccaccuuccaccucucuauuccgaauuuuaaccaguaugaagccaugagcugugacuucaaugauggaaagaucuccgugcaguacaaccugagccacacauaugcuggcgacaccgccaaucauugcggcacgguugcuaacggggugcuucaaacauuuaugcgcauggccuggggaggcucuuacauugcgcuggauuccgggagaggaggcugggacuguaucaugaccagcuaccaguaucucauuauccagaacacaaccugggaggaucacugccaguucucucggcccuccccuaucggguaccugggacuucugagccaacgcaccagagacauuuauaucucucggcgccuccugggcacauuuacguggacccuguccgauagcgaaggcaaggacacacccgggggauacugucucaccagauggaugcugauugaggccgagcuuaaaugcuucggcaauacagcugucgccaaguguaacgaaaaacaugaugaggaauuuugcgacaugcugcgccucuucgauuuuaauaagcaggcuauccagcggcugaaagccgaggcgcagauguccauucaacuuaucaacaaggccgugaaugcucugaucaacgaccagcucauuaugaagaaucaccugagagacaucauggggauuccuuauugcaacuacucuaaauauugguaccugaaucacaccgugacgggaaagacaagccuccccaaauguuggcuggucuccaacggcagcuaccuuaaugaaacccauuucucugaugacaucgagcagcaagccgauaacaugauuaccgagaugcugcagaaggaauauauggagcggcaggggaaaacaccucucggacugguugaccuguucguguuuuccaccagcuucuaccuuaucucuaucuuucuccaccuggugaagauuccgacacaucgccacgucgugggcaaacccugcccuaagccccauagacugaaucacaugggcaucuguagcugcggguucuauaagcagccuggaguucccgugcgguggaaacgcugaggacuagucccuguucccagagcccacuuuuuuuucuuuuuuugaaauaaaauagccugucuuucagaucucaaaggcucuuuucagagccaccaaaaaaaaaaaaaaaaaaaaaaaaaaaaaaaaaaaaaaaaaaaaaaaaaaaaaaaaaaaaaaaaaaaaaaaaaaaaaaaaaaaaaaaaaaaaaaaaaaaaa

SEQ ID NO: 14247 - RNA, 1748 nt, Artificial Sequence
  mRNA product Design a-1 (hSL-A100) comprising derived and/or modified sequence from LASV(Z0947-SLE-2011;Clade IV)__AIT17840__GPC (opt5)
aggagagucccgcagucggcguccagcggcucugcuuguucgugugugugucguugcaggccuuauucaagcuuaccaugggccagaucgugaccuucuuucaagaggucccccacguuauugaagaggugaugaacaucgugcugauugcccucagcauccuggcuguccuuaaggggcuguacaauuucgccacaugcggacucgugggccugguuacguuucuucugcucugugggagauccugcaccauuucucuguauaaaggaguguacgaacugcagacacucgagcugaacauggaaacccuuaauaugacaaugccucugagcuguaccaagaacaauucccaucacuauaucauggucggcaacgagacagggcucgagcugacccuuacgaauaccucuaucauuaaccauaaauucugcaaucugagcgacgcgcacaagaaaaaccucuacgaucaugcucugauguccaucauuucuacauuucaccugagcaucccgaauuucaaccaguaugaagccauguccugugacuuuaauggaggcaagauuagcgugcaguacaaccucucucacuccuaugccggcgaugcugccaaucauugcgggaccguugcuaacggagugcugcaaacauucaugcggauggccuggggcgggagcuacaucgcgcuugacucuggacgcgauagaugggacuguauuaugaccuccuaccaguaucugaucauccagaacacgacaugggaggaucacugccaguuuagccggcccucuccuauuggcuaccucgggcugcuuucccaacgcaccagagacaucuauauuagccggcgccugcucggaacauucaccuggacccuguccgauucugaaggcaaggacacacccggcggguacugucugacgagauggaugcucaucgaggccgagcugaaaugcuuuggaaauaccgcugucgccaaguguaacgaaaaacaugaugaggaguucugcgacaugcuucggcuguuugauuucaauaagcaggcuauucagcgccucaaagccgaagcgcagaugagcauccaacugaucaacaaggccgugaaugcucuuauuaacgaccagcugaucaugaagaaucaccucagagacauuaugggcaucccuuauugcaacuacuccaaauauugguaccugaaucacacaaccacagggaagaccagccugcccaaauguuggcucgugucuaacggauccuaccugaaugaaacgcauuucagcgaugacauugagcagcaagccgauaacaugaucacagagaugcuucagaaggaauauauggagcggcagggcaaaaccccucuggggcucgucgaccuguuuguuuucucuaccagcuuuuaccugaucuccauuuuccuucaccucgugaagaucccgacacaucgccacauugugggaaaacccugcccuaagccccauagacugaaucacaugggcaucuguucuugcggccuguauaagcagccugggguccccgugaaauggaagcggugaggacuagucccuguucccagagcccacuuuuuuuucuuuuuuugaaauaaaauagccugucuuucagaucucaaaggcucuuuucagagccaccaaaaaaaaaaaaaaaaaaaaaaaaaaaaaaaaaaaaaaaaaaaaaaaaaaaaaaaaaaaaaaaaaaaaaaaaaaaaaaaaaaaaaaaaaaaaaaaaaaaaa

SEQ ID NO: 14248 - RNA, 1724 nt, Artificial Sequence
  mRNA product Design a-1 (A100) comprising derived and/or modified sequence from LASV(Josiah;Clade IV)__NP_694870__GPC (opt1)
aggagagucccgcagucggcguccagcggcucugcuuguucgugugugugucguugcaggccuuauucaagcuuaccaugggccagaucgugaccuucuuccaggaggucccccacgugaucgaggaggugaugaacaucguccugaucgcccucagcgugcuggccgugcugaaggggcucuacaacuucgcgaccugcggccuggucgggcuggugacguuccuccugcugugcggccgcuccugcaccaccagccucuacaaggggguguacgagcugcagacccuggagcucaacauggagacgcugaacaugaccaugccgcuguccugcaccaagaacaacagccaccacuacaucauggucggcaacgagaccggccucgagcugacgcugaccaacaccuccaucaucaaccacaaguucugcaaccucagcgacgcccacaagaagaaccuguacgaccacgcccugauguccaucaucagcaccuuccaccucuccauccccaacuucaaccaguacgaggccaugagcugcgacuucaacgggggcaagaucuccgugcaguacaaccugagccacuccuacgccggggacgcggccaaccacugcggcacgguggccaacgggguccugcagaccuucaugcggauggccuggggcggcagcuacaucgcgcucgacuccgggcgcggcaacugggacugcaucaugaccagcuaccaguaccugaucauccagaacaccacgugggaggaccacugccaguucucccggcccagccccaucggguaccugggccuccugucccagcgcacccgggacaucuacaucagccgccggcugcucggcaccuucaccuggacgcugagcgacuccgaggggaaggacaccccgggcggguacugccugacccgcuggaugcucaucgaggccgagcugaagugcuucggcaacaccgccguggccaagugcaacgagaagcacgacgaggaguucugcgacaugcugcggcuguucgacuucaacaagcaggccauccagcgccugaaggcggaggcccagaugagcauccagcugaucaacaaggccgugaacgcccucaucaacgaccagcugaucaugaagaaccaccuccgggacaucauggggauccccuacugcaacuacuccaaguacugguaccucaaccacacgaccaccggccgcaccagccugcccaagugcuggcuggucuccaacggcagcuaccucaacgagacgcacuucuccgacgacaucgagcagcaggccgacaacaugaucaccgagaugcugcagaaggaguacauggagcggcaggggaagacgccccugggccucguggaccuguucguguucagcaccuccuucuaccugaucagcaucuuccugcaccucgucaagaucccgacccaccgccacaucguggggaaguccugccccaagccccaccggcugaaccacaugggcaucugcagcugcgggcuguacaagcagcccggcgugccggucaaguggaagcgcugaggacuagucccuguucccagagcccacuuuuuuuucuuuuuuugaaauaaaauagccugucuuucagaucuaaaaaaaaaaaaaaaaaaaaaaaaaaaaaaaaaaaaaaaaaaaaaaaaaaaaaaaaaaaaaaaaaaaaaaaaaaaaaaaaaaaaaaaaaaaaaaaaaaaa

SEQ ID NO: 14249 - RNA, 1721 nt, Artificial Sequence
  mRNA product Design a-1 (A100) comprising derived and/or modified sequence from LASV(LP;Clade I)__AAF86701__GPC (opt1)
aggagagucccgcagucggcguccagcggcucugcuuguucgugugugugucguugcaggccuuauucaagcuuaccaugggccagaucaucaccuucuuccaggaggugccccacgucaucgaggaggugaugaacaucgugcugaucgcccucagccugcuggccauccucaaggggcuguacaacaucgcgaccugcggcaucaucgggcuggucgccuuccucuuccugugcggcaaguccugcagccugacgcucaagggcggguacgagcugcagacccuggagcucaacauggagacccugaacaugaccaugccgcuguccugcacgaagaacagcucccaccacuacauccgcgugggcaacgagaccgggcucgagcugacccugaccaacacgagcaucaucaaccacaaguucugcaaccucuccgacgcccacaagaagaaccuguacgaccacgcccugaugagcaucaucuccaccuuccaccucagcauccccaacuucaaccaguacgaggccauguccugcgacuucaacggcgggaagaucagcgugcaguacaaccugucccacagcuacgcgggcgacgccgccgagcacugcgggaccgucgccaacggcgugcugcagaccuucaugcggauggcguggggcgggcgcuacaucgcccucgacuccggcaaggggaacugggacugcaucaugacgagcuaccaguaccugaucauccagaacaccaccugggaggaccacugccaguucucccggcccagccccaucggcuaccugggccuccugucccagcgcacccgggacaucuacaucagccgccggcugcucgggacguucaccuggacccugagcgacuccgagggcaacgagacccccgggggcuacugccugacgcgcuggaugcucaucgaggccgagcugaagugcuucgggaacaccgccguggccaagugcaacgagaagcacgacgaggaguucugcgacaugcugcggcuguucgacuucaacaagcaggcgauccgccggcugaaggccgaggcccagaugagcauccagcugaucaacaaggccgucaacgcccucaucaacgaccagcugaucaugaagaaccaccuccgcgacaucaugggcauccccuacugcaacuacuccaaguacugguaccucaaccacaccagcuccggccggaccagccugcccaagugcuggcugaucuccaacgggagcuaccucaacgagacgcaguucuccgacgacaucgagcagcaggcggacaacaugaucaccgagaugcugcagaaggaguacaucgagcgccagggcaagaccccgcuggggcucguggacaucuucaucuucagcaccuccuucuaccugaucagcaucuuccugcaccugaucaagaucccgacgcaccggcacaucgugggcaagcccugccccaagccccaccgccucaaccacaugggggucugcuccugcggccuguacaagcacccgggcgugcccaccaaguggaagcggugaggacuagucccuguucccagagcccacuuuuuuuucuuuuuuugaaauaaaauagccugucuuucagaucuaaaaaaaaaaaaaaaaaaaaaaaaaaaaaaaaaaaaaaaaaaaaaaaaaaaaaaaaaaaaaaaaaaaaaaaaaaaaaaaaaaaaaaaaaaaaaaaaaaaa

SEQ ID NO: 14250 - RNA, 1721 nt, Artificial Sequence
  mRNA product Design a-1 (A100) comprising derived and/or modified sequence from LASV(803213;Clade II)__AAF86703__GPC (opt1)
aggagagucccgcagucggcguccagcggcucugcuuguucgugugugugucguugcaggccuuauucaagcuuaccaugggccagaucaucaccuucuuccaggaggugccccacgucaucgaggaggugaugaacaucgugcugaucgcccucagccugcuggccauccucaaggggaucuacaacgucgcgaccugcggccuguucgggcugaucuccuuccuccugcugugcggccgcagcugcuccgugacguacaaggggguguacgagcuccagacccuggagcugaacauggccaaccucaacaugaccaugccgcugagcugcaccaagaacaacucccaccacuacaucauggucggcaacgagacgggccuggagcucacccugaccaacaccagcaucaucaaccacaaguucugcaaccuguccgacgcccacaagaagaaccucuacgaccacgcccugaugagcaucaucuccacguuccaccugagcauccccaacuucaaccaguacgaggccauguccugcgacuucaacgggggcaagaucagcgugcaguacaaccucucccacagcuucgcgguggacgccgccaaccacugcgggaccaucgccaacggcguccugcagaccuucaugcggauggcguggggcggguccuacaucgcccuggacagcggcaaggggaacugggacugcaucaugaccuccuaccaguaccucaucauccagaacacgaccugggaggaccacugccaguucagccgccccucccccaucggcuaccuggggcugcucagccagcggacccgcgacaucuacaucagccggcgccugcugggcaccuucacguggacccucuccgacagcgagggcaacgaggcccccgggggcuacugccugacccgguggaugcugaucgaggccgagcucaagugcuucgggaacaccgccguggcgaagugcaacgagaagcacgacgaggaguucugcgacaugcugcgccuguucgacuucaacaagcaggccaucaagcggcucaagacggaggcccagauguccauccagcugaucaacaaggccgugaacgcccugaucaacgaccagcucaucaugaagaaccaccuccgcgacaucaugggcauccccuacugcaacuacagccgguacugguaccugaaccacaccgucaccgggaagaccucccugccccgcugcuggcuggugagcaacggcuccuaccugaacgagacgcacuucagcgacgacaucgagcagcaggcggacaacaugaucaccgagaugcuccagaaggaguacauggaccggcagggcaagaccccgcuggggcugguggaccucuucgucuucuccaccagcuucuaccugaucuccaucuuccugcaccuggugaagaucccgacgcaccgccacaucgugggcaagcccugccccaagccccaccggcucaaccacauggggaucugcagcugcggccuguacaagcacccggggguccccgugaaguggaagcgcugaggacuagucccuguucccagagcccacuuuuuuuucuuuuuuugaaauaaaauagccugucuuucagaucuaaaaaaaaaaaaaaaaaaaaaaaaaaaaaaaaaaaaaaaaaaaaaaaaaaaaaaaaaaaaaaaaaaaaaaaaaaaaaaaaaaaaaaaaaaaaaaaaaaaa

SEQ ID NO: 14251 - RNA, 1721 nt, Artificial Sequence
  mRNA product Design a-1 (A100) comprising derived and/or modified sequence from LASV(GA391;Clade III)__CAA36645__GPC (opt1)
aggagagucccgcagucggcguccagcggcucugcuuguucgugugugugucguugcaggccuuauucaagcuuaccaugggccagaucgugaccuucuuccaggaggucccccacgugaucgaggaggugaugaacaucguccugaucgcccucagcauccuggccauccugaaggggcucuacaacguggcgaccugcggccugaucgggcuggugacguuccuccugcuguccggccgcagcugcucccucaucuacaaggggaccuacgagcugcagacccuggagcucaacauggagacccugaacaugacgaugccgcugagcugcaccaagaacaacucccaccacuacauccgggucggcaacgagaccggccucgagcugacccugacgaacaccagcauccucaaccacaaguucugcaaccuguccgacgcccacaagcgcaaccuguacgaccacagccucauguccaucaucagcaccuuccaccuguccauccccaacuucaaccaguacgaggccaugagcugcgacuucaacgggggcaagaucaccgugcaguacaaccugucccacagcuucgccguggacgccgcggggcacugcggcacgcucgccaacgggguccugcagaccuucaugcggauggccuggggcggcuccuacaucgcccuggacagcgggcgcggcaacugggacugcaucaugaccuccuaccaguaccucaucauccagaacaccacgugggacgaccacugccaguucagccggcccucccccaucggguaccugggccugcucagccagcgcacccgggacaucuacaucagccgccggcugcugggcaccuucaccuggacgcucuccgacagcgaggggaacgagaccccgggcggguacugccugacccgcuggaugcugaucgaggcggagcucaagugcuucggcaacaccgccguggccaagugcaacgagaagcacgacgaggaguucugcgacaugcugcggcuguucgacuucaacaagcaggccauccgccggcucaagacggaggcccagauguccauccagcugaucaacaaggcggugaacgcccugaucaacgaccagcucaucaugaagaaccaccuccgcgacaucauggggauccccuacugcaacuacagccgguacugguaccugaaccacaccuccaccggcaagaccagccugccccgcugcuggcugaucuccaacggcagcuaccugaacgagacgaaguucuccgacgacaucgagcagcaggccgacaacaugaucaccgagaugcuccagaaggaguacaucgaccggcaggggaagacgccccugggccuggucgaccuguucguguucagcaccuccuucuaccucaucagcaucuuccugcaccuggugaagaucccgacccaccgccacaucgucgggaagcccugccccaagccccaccggcucaaccacaugggcaucugcuccugcgggcuguacaagcagccgggcgugcccgugcgcuggaagcggugaggacuagucccuguucccagagcccacuuuuuuuucuuuuuuugaaauaaaauagccugucuuucagaucuaaaaaaaaaaaaaaaaaaaaaaaaaaaaaaaaaaaaaaaaaaaaaaaaaaaaaaaaaaaaaaaaaaaaaaaaaaaaaaaaaaaaaaaaaaaaaaaaaaaa

SEQ ID NO: 14252 - RNA, 1724 nt, Artificial Sequence
  mRNA product Design a-1 (A100) comprising derived and/or modified sequence from LASV(AV;Clade V)__CCA30314__GPC (opt1)
aggagagucccgcagucggcguccagcggcucugcuuguucgugugugugucguugcaggccuuauucaagcuuaccaugggccagaucgugaccuucuuccaggaggucccccacgugaucgaggaggugaugaacaucguccugaucgcccucagcauccuggccgugcugaaggggcucuacaacaucgcgaccugcggccugaucgggcugaucacguuccuccugcugugcggccgcuccugcagcuccaaccucuacaaggggguguacgagcugcagagccuggaccucaacauggagacccugaacaugaccaugccgcuguccugcaccaagaacaacagccaccacuacauccgggucggcaacgacacgggccucgagcugacccugaccaacaccuccauccucaaccacaaguucugcaaccugagcgacgcccacaagaaggaccuguacgaccacgcccucauguccaucaucagcacguuccaccuguccauccccaacuucaaccaguacgaggccaugagcugcgacuucaacgggggcaagaucuccgugcaguacaaccugagccacuccuacgccaucgacgcggccaaccacugcgggaccguggccaacggcauccuccagaccuucaugcgcauggccuggggcgggagcuacaucgcgcuggacuccggccgggggaacugggacugcaucaugaccagcuaccaguaccugaucauccagaacacgaccugggagaaccacugccaguucucccgccccagccccaucggcuaccucgggcugcugagccagcggacccgcgacaucuacaucucccggcgccuccugggcaccuucacguggacccugagcgacuccgagggcaacgccacccccgggggcuacugccucacccgguggaugcugaucgaggccgagcugaagugcuucgggaacacggccgucgccaagugcaacgagaagcacgacgaggaguucugcgacaugcuccgccuguucgacuucaacaagcaggcgaucagccggcugaaguccgaggcccagaugagcauccagcucaucaacaaggccgugaacgcccugaucaacgaccagcugaucaugaagaaccaccuccgcgacaucaugggcauccccuacugcaacuacuccaaguacugguaccugaaccacaccaucaccgggaagaccagccugcccaagugcuggcucguguccaacggcagcuaccugaacgagacgcacuucuccgacgacaucgagcagcaggccgacaacaugaucaccgagaugcugcagaaggaguacauggagcggcagggcaagaccccgcucgggcuggucgaccuguucguguucagcaccuccuucuaccugaucagcaucuuccuccgccuggugaagaucccgacgcaccggcacaucgucggcaagcccugccccaagccccaccgccugaaccacauggggaucugcuccugcggccucuacaagcagccgggggugcccgugcgguggaagcgcugaggacuagucccuguucccagagcccacuuuuuuuucuuuuuuugaaauaaaauagccugucuuucagaucuaaaaaaaaaaaaaaaaaaaaaaaaaaaaaaaaaaaaaaaaaaaaaaaaaaaaaaaaaaaaaaaaaaaaaaaaaaaaaaaaaaaaaaaaaaaaaaaaaaaa

SEQ ID NO: 14253 - RNA, 1721 nt, Artificial Sequence
  mRNA product Design a-1 (A100) comprising derived and/or modified sequence from LASV(Togo/2016/7082;Clade VI)__AMR44577__GPC (opt1)
aggagagucccgcagucggcguccagcggcucugcuuguucgugugugugucguugcaggccuuauucaagcuuaccaugggccagaucaucaccuucuuccaggaggugccccacgucaucgaggaggugaugaacaucgugcugaucgcccucagccugcuggccauccucaagggggucuacaacguggcgaccugcggcaucaucgggcuggugacguuccuguuccucugcggccgcuccugcagccugaucuacaagggguccuacgagcugcagacccucgagcugaacauggagacccugaacaugaccaugccgcucagcugcacgaagaacuccagccaccacuacauccgggucggcaacgagaccggccuggagcugacccucaccaacacguccaucaucaaccacaaguucugcaaccugagcgacgcccacaagcgcaaccuguacgaccacgcccucauguccauccugagcaccuuccaccuguccauccccaacuucaaccaguacgaggccaugagcugcgacuucaacgggggcaagaucuccgugcaguacaaccucagccacgccuacgcgguggacgccgccgagcacugcgggaccgucgccaacggcgugcugcagaccuucaugcggauggcguggggcggguccuacaucgcccuggacagcggccgcgggaacugggacugcaucaugacguccuaccaguaccucaucauccagaacaccaccugggaggaccacugccaguucagccggcccucccccaucggcuaccuggggcugcucagccagcgcacccgggacaucuacaucagccgccggcugcugggcacguucaccuggacccucuccgacagcgagggcaacgagacccccgggggcuacugccugacgcgcuggaugcugaucgaggccgagcucaagugcuucgggaacaccgccguggccaagugcaacgagaagcacgacgaggaguucugcgacaugcugcggcuguucgacuucaacaagcaggcgauccagcgccucaaguccgaggcccagaugagcauccagcugaucaacaaggccgucaacgcccugaucaacgaccagcucaucaugaagaaccaccuccgggacaugaugggcauccccuacugcaacuacuccaaguacugguaccugaaccacaccagcuccgggcgcaccagccugcccaagugcuggcugguguccaacggcagcuaccugaacgagacgcacuucuccgacgacaucgagcagcaggccgacaacaugaucaccgagaugcuccagaaggaguacaucgaccggcagggcaagaccccgcuggggcugguggaccucuucgucuucagcaccuccuucuaccugaucagcaucuuccugcaccugaucaagaucccgacgcaccgccacaucgugggcaagcccugccccaagccccaccggcucaaccacauggggaucugcuccugcggccuguacaagcagccgggggugcccacccgcuggaagcggugaggacuagucccuguucccagagcccacuuuuuuuucuuuuuuugaaauaaaauagccugucuuucagaucuaaaaaaaaaaaaaaaaaaaaaaaaaaaaaaaaaaaaaaaaaaaaaaaaaaaaaaaaaaaaaaaaaaaaaaaaaaaaaaaaaaaaaaaaaaaaaaaaaaaa

SEQ ID NO: 14254 - RNA, 1721 nt, Artificial Sequence
  mRNA product Design a-1 (A100) comprising derived and/or modified sequence from LASV(KAK-428;Clade n.d. (VII))__ANH09740__GPC (opt1)
aggagagucccgcagucggcguccagcggcucugcuuguucgugugugugucguugcaggccuuauucaagcuuaccaugggccagaucgugaccuucuuccaggaggucccccacgugaucgaggaggugaugaacaucguccugaucgcccucagccugcuggccauccucaaggggcuguacaacuucgcgaccugcggcgugaucgggcugaucacguuccuccugcugugcggccgcuccugcagcgccaccuacaaggggcaguacgagcuccagacccuggagcugaacauggagucccucaacaugaccaugccgcugagcugcacgaagaacaacucccaccacuacauccgggccggcaacaacaccggccuggagcucacccugaccaacacgagcaucaucucccacaaguucugcaaccugagcgacgcccacaagaagaaccucuacgaccacacccugauguccaucaucaccaccuuccaccugagcauccccaacuucaaccaguacgaggccauguccugcgacuucaacgggggcaagaucagcauccaguacaaccucucccacagcuacgcgggggacgccgcccagcacugcggcacgguggccaacgggguccugcagaccuucaugcgcauggcguggggcggcuccuaccuggcccucgacagcgggcggcgcggcugggacugcaucaucuccagcuaccaguaccugaucauccagaacaccaccugggacgaccacugccaguucucccggcccagccccaucggguaccugggcuucgugagccagaagacgcgcgacaucuacaucucccggcgccuccugggcaccuucaccuggacccugagcgacuccgaggggcacgacaugccgggcggguacugccucacgcgguggaugcugaucgaggccgaccugaagugcuucggcaacaccgccguggccaagugcaacgagaagcacgacgaggaguucugcgacauguggcgccucuucgacuucaacaagcaggcgauccagcggcugaaggccgaggcccagaugaacauccagcugaucaacaaggccgucaacgcccucaucaacgaccagcugaugaugaagaaccaccuccgcgacaucauggggauccccuacugcaacuacagcaaguucugguaccugaacaacaccaccacgggccggaccucccugccccgcugcuggcugaucagcaacggcuccuaccucaacgagacccacuucagcgacgacaucgagcagcaggcggacaacaugaucaccgagaugcugcagaaggaguacauggaccggcaggggaagacgccccugggccucguggaccuguucguguucuccaccagcuucuaccugaucaccaucuuccuccaccuggucaagaucccgacccaccgccacaucguggggaagcccugccccaagccccaccggcugaaccacaugggcaucugcuccugcgggcuguacaagcagccgggcgugcccguccgcuggaagcggugaggacuagucccuguucccagagcccacuuuuuuuucuuuuuuugaaauaaaauagccugucuuucagaucuaaaaaaaaaaaaaaaaaaaaaaaaaaaaaaaaaaaaaaaaaaaaaaaaaaaaaaaaaaaaaaaaaaaaaaaaaaaaaaaaaaaaaaaaaaaaaaaaaaaa

SEQ ID NO: 14255 - RNA, 1721 nt, Artificial Sequence; identical to SEQ ID NO: 14249
  mRNA product Design a-1 (A100) comprising derived and/or modified sequence from LASV(Pinneo-NIG-1969;Clade I)__AIT17836__GPC (opt1)

SEQ ID NO: 14256 - RNA, 1721 nt, Artificial Sequence
  mRNA product Design a-1 (A100) comprising derived and/or modified sequence from LASV(ISTH0009-NIG-2011;Clade II)__AIT17404__GPC (opt1)
aggagagucccgcagucggcguccagcggcucugcuuguucgugugugugucguugcaggccuuauucaagcuuaccaugggccagaucaucaccuucuuccaggaggugccccacgucaucgaggaggugaugaacaucgugcugaucgcccucagccugcuggccauccucaaggggaucuacaacgucgcgaccugcggccuguucgggcugguguccuuccuccugcugugcggccgcagcugcuccacgaccuacaaggggguguacgagcuccagacccuggagcuggacauggccagccucaacaugaccaugccgcuguccugcacgaagaacaacagccaccacuacaucauggucggcaacgagaccggccuggagcucacccugaccaacacguccaucaucaaccacaaguucugcaaccugagcgacgcccacaagaagaaccucuacgaccacgcccugauguccaucaucagcaccuuccaccuguccauccccaacuucaaccaguacgaggccaugagcugcgacuucaacgggggcaagaucuccgugcaguacaaccucagccacgcguacgccguggacgccgccaaccacugcgggaccaucgcgaacggcguccugcagaccuucaugcggauggccuggggcggguccuacaucgcccuggacagcggcaagggguccugggacugcaucaugacgagcuaccaguaccucaucauccagaacaccaccugggaggaccacugccaguucucccgccccagccccaucggcuaccuggggcugcucagccagcggacccgcgacaucuacaucucccggcgccugcugggcacguucaccuggacccucagcgacuccgagggcaacgagacccccgggggcuacugccugacgcgguggaugcugaucgaggccgagcucaagugcuucgggaacaccgccguggcgaagugcaacgagaagcacgacgaggaguucugcgacaugcugcgccuguucgacuucaacaagcaggccauccggcgccucaagaccgaggcccagaugagcauccagcugaucaacaaggccgugaacgcccugaucaacgaccagcucaucaugaagaaccaccuccgggacaucaugggcaucccguacugcaacuacuccaaguacugguaccugaaccacaccgucacggggaagaccagccugccccgcugcuggcugguguccaacggcagcuaccugaacgagacccacuucuccgacgacaucgagcagcaggcggacaacaugaucaccgagcuccugcagaaggaguacauggaccggcagggcaagacgccccuggggcucguggaccuguucgucuucagcaccuccuucuaccugaucagcaucuuccugcaccucaucaagaucccgacccaccgccacaucaccggcaagcccugccccaagccccaccggcugaaccacauggggaucugcuccugcggccuguacaagcacccgggggugcccgugaaguggaagcgcugaggacuagucccuguucccagagcccacuuuuuuuucuuuuuuugaaauaaaauagccugucuuucagaucuaaaaaaaaaaaaaaaaaaaaaaaaaaaaaaaaaaaaaaaaaaaaaaaaaaaaaaaaaaaaaaaaaaaaaaaaaaaaaaaaaaaaaaaaaaaaaaaaaaaa

SEQ ID NO: 14257 - RNA, 1721 nt, Artificial Sequence
  mRNA product Design a-1 (A100) comprising derived and/or modified sequence from LASV(ISTH2010-NIG-2012;Clade II)__AIT17482__GPC (opt1)
aggagagucccgcagucggcguccagcggcucugcuuguucgugugugugucguugcaggccuuauucaagcuuaccaugggccagaucaucaccuucuuccaggaggugccccacgucaucgaggaggugaugaacaucgugcugaucgcccucagccugcuggccauccucaaggggaucuacaacgucgcgaccugcggccuguucgggcugguguccuuccuccugcugugcggccgcagcugcuccacgaccuacaaggggguguacgagcuccagacccuggagcuggacauggccagccucaacaugaccaugccgcuguccugcacgaagaacaacagccaccacuacaucauggucggcaacgagaccggccuggagcucacccugaccaacacguccaucaucaaccacaaguucugcaaccugagcgacgcccacaagaagaaccucuacgaccacgcccugauguccaucaucagcaccuuccaccuguccauccccaacuucaaccaguacgaggccaugagcugcgacuucaacgggggcaagaucuccgugcaguacaaccucagccacgcguacgccguggacgccgccaaccacugcgggaccaucgcgaacggcguccugcagaccuucaugcggauggccuggggcggguccuacaucgcccuggacagcggcaagggguccugggacugcaucaugacgagcuaccaguaccucaucauccagaacaucaccugggaggaccacugccaguucucccgccccagccccaucggcuaccuggggcugcucagccagcggacccgcgacaucuacaucucccggcgccugcugggcaccuucacguggacccucagcgacuccgagggcaacgagacccccgggggcuacugccugacccgguggaugcugaucgaggccgagcucaagugcuucgggaacacggccguggcgaagugcaacgagaagcacgacgaggaguucugcgacaugcugcgccuguucgacuucaacaagcaggccauccggcgccucaagaccgaggcccagaugagcauccagcugaucaacaaggccgugaacgcccugaucaacgaccagcucaucaugaagaaccaccuccgggacaucaugggcauccccuacugcaacuacuccaaguacugguaccugaaccacaccgucaccgggaagacgagccugccccgcugcuggcugguguccaacggcagcuaccugaacgagacccacuucuccgacgacaucgagcagcaggcggacaacaugaucaccgagcuccugcagaaggaguacaucgaccggcagggcaagaccccgcuggggcucguggaccuguucgucuucagcacguccuucuaccugaucagcaucuuccugcaccucgugaagaucccgacccaccgccacguggucggcaagcccugccccaagccccaccggcugaaccacauggggaucugcuccugcggccuguacaagcacccgggggugcccgugaaguggaagcgcugaggacuagucccuguucccagagcccacuuuuuuuucuuuuuuugaaauaaaauagccugucuuucagaucuaaaaaaaaaaaaaaaaaaaaaaaaaaaaaaaaaaaaaaaaaaaaaaaaaaaaaaaaaaaaaaaaaaaaaaaaaaaaaaaaaaaaaaaaaaaaaaaaaaaa

SEQ ID NO: 14258 - RNA, 1721 nt, Artificial Sequence
  mRNA product Design a-1 (A100) comprising derived and/or modified sequence from LASV(Lassa virus/H.sapiens-wt/NGA/2015/ISTH_0543;Clade II)__AVO03639__GPC (opt1)
aggagagucccgcagucggcguccagcggcucugcuuguucgugugugugucguugcaggccuuauucaagcuuaccaugggccagaucaucaccuucuuccaggaggugccccacgucaucgaggaggugaugaacaucgugcugaucgcccucagccugcuggccauccucaaggggaucuacaacgucgcgaccugcggccuguucgggcugguguccuuccuccugcugugcggccgcagcugcuccacgaccuacaaggggguguacgagcuccagacccuggagcuggacauggccaaccucaacaugaccaugccgcugagcugcacgaagaacaacucccaccacuacaucauggucggcaacgagaccggccuggagcucacccugaccaacacgagcaucaucaaccacaaguucugcaaccuguccgacgcccacaagaagaaccucuacgaccacgcccugaugagcaucaucuccaccuuccaccugagcauccccaacuucaaccaguacgaggccauguccugcgacuucaacgggggcaagaucagcgugcaguacaaccucucccacaccuacgcgguggacgccgccaaccacugcgggaccaucgccaacggcguccugcagacguucaugcggauggcguggggcgggagcuacaucgcccuggacuccggcaaggggagcugggacugcaucaugaccuccuaccaguaccucgugauccagaacaccaccugggaggaccacugccaguucagccgccccucccccaucggcuaccuggggcugcucagccagcggacgcgcgacaucuacaucagccggcgccugcugggcaccuucaccuggacccucuccgacagcgagggcaacgagacgcccgggggcuacugccugacccgguggaugcugaucgaggccgagcucaagugcuucgggaacaccgccguggccaagugcaacgagaagcacgacgaggaguucugcgacaugcugcgccuguucgacuucaacaagcaggcgauccggcgccucaagaccgaggcccagauguccauccagcugaucaacaaggccgucaacgcccugaucaacgaccagcucaucaugaagaaccaccuccgggacaucaugggcauccccuacugcaacuacagcaaguacugguaccugaaccacacggugaccgggaagaccucccugccccgcugcuggcuggugagcaacggcuccuaccugaacgagacccacuucagcgacgacaucgagcagcaggccgacaacaugaucacggagcuccugcagaaggaguacaucgaccggcagggcaagaccccgcuggggcucgucgaccuguucguguucuccaccagcuucuaccugaucuccaucuuccugcaccucgugaagaucccgacccaccgccacaucacgggcaagcccugccccaagccccaccggcugaaccacauggggaucugcagcugcggccuguacaagcacccggggguccccgugaaguggaagcgcugaggacuagucccuguucccagagcccacuuuuuuuucuuuuuuugaaauaaaauagccugucuuucagaucuaaaaaaaaaaaaaaaaaaaaaaaaaaaaaaaaaaaaaaaaaaaaaaaaaaaaaaaaaaaaaaaaaaaaaaaaaaaaaaaaaaaaaaaaaaaaaaaaaaaa

SEQ ID NO: 14259 - RNA, 1721 nt, Artificial Sequence
  mRNA product Design a-1 (A100) comprising derived and/or modified sequence from LASV(Lassa virus/H.sapiens-wt/NGA/2016/ISTH_0009;Clade II)__AVO03571__GPC (opt1)
aggagagucccgcagucggcguccagcggcucugcuuguucgugugugugucguugcaggccuuauucaagcuuaccaugggccagaucaucaccuucuuccaggaggugccccacgucaucgaggaggugaugaacaucgugcugaucgcccucagccugcuggccauccucaaggggaucuacaacgucgcgaccugcggccugcuggggcucguguccuuccugcugcucugcggccgcagcugcuccacgaccuacaaggggguguacgagcugcagacccuggagcucgacauggccagccugaacaugaccaugccgcuguccugcacgaagaacaacagccaccacuacaucauggucggcaacgagaccggccucgagcugacccugaccaacacguccaucaucaaccacaaguucugcaaccucagcgacgcccacaagaagaaccuguacgaccacgcccugauguccaucaucagcaccuuccaccucuccauccccaacuucaaccaguacgaggccaugagcugcgacuucaacgggggccggaucuccgugcaguacaaccugagccacuccuacgcgguggacgccgccaaccacugcgggaccaucgccaacggcguccugcagaccuucaugcgcauggcguggggcgggagcuacaucgcccucgacuccggcaaggggagcugggacugcaucaugacguccuaccaguaccugaucauccagaacaccaccugggaggaccacugccaguucagccggcccagccccaucggcuaccuggggcuccugucccagcgcacccgggacaucuacaucagccgccggcugcucggcacguucaccuggacccuguccgacagcgagggcaacgagacccccgggggcuacugccugacgcgcuggaugcucaucgaggccgagcugaagugcuucgggaacaccgccguggccaagugcaacgagaagcacgacgaggaguucugcgacaugcugcggcuguucgacuucaacaagcaggcgauccgccggcugaagaccgaggcccagauguccauccagcugaucaacaaggccgugaacgcccucaucaacgaccagcugaucaugaagaaccaccuccgcgacaucaugggcaucccguacugcaacuacagcaaguacugguaccucaaccacaccgucacggggaagaccucccugccccggugcuggcuggugagcaacggcuccuaccucaacgagacccacuucagcgacgacaucgagcagcaggccgacaacaugaucaccgagcugcugcagaaggaguacaucgaccgccagggcaagacgccccucgggcugguggaccuguucgucuucuccaccagcuucuaccugaucuccaucuuccuccaccuggugaagaucccgacccaccggcacaucaccggcaagcccugccccaagccccaccgccugaaccacauggggaucugcagcugcggccucuacaaccacccgggggugcccgucaaguggaagcggugaggacuagucccuguucccagagcccacuuuuuuuucuuuuuuugaaauaaaauagccugucuuucagaucuaaaaaaaaaaaaaaaaaaaaaaaaaaaaaaaaaaaaaaaaaaaaaaaaaaaaaaaaaaaaaaaaaaaaaaaaaaaaaaaaaaaaaaaaaaaaaaaaaaaa

SEQ ID NO: 14260 - RNA, 1721 nt, Artificial Sequence
  mRNA product Design a-1 (A100) comprising derived and/or modified sequence from LASV(Lassa virus/H.sapiens-wt/NGA/2016/ISTH_0017;Clade II)__AVO03567__GPC (opt1)
aggagagucccgcagucggcguccagcggcucugcuuguucgugugugugucguugcaggccuuauucaagcuuaccaugggccagaucaucaccuucuuccaggaggugccccacgucaucgaggaggugaugaacaucgugcugaucgcccucagccugcuggccauccucaaggggaucuacaacgucgcgaccugcggccuguucgggcugguguccuuccuccugcugugcggccgcagcugcuccacgaccuacaaggggguguacgagcuccagacccuggagcuggacauggccagccucaacaugaccaugccgcuguccugcacgaagaacaacagccaccacuacaucauggucggcaacgagaccggccuggagcucacccugaccaacacguccaucaucaaccacaaguucugcaaccugagcgacgcccacaagaagaaccucuacgaccacgcccugauguccaucaucagcaccuuccaccuguccauccccaacuucaaccaguacgaggccaugagcugcgacuucaacgggggcaagaucuccgugcaguacaaccucagccacaccuacgcgaucgacgccgccaaccacugcgggaccaucgccaacggcgugcugcagacguucaugcggauggcguggggcggguccuacaucgcccuggacagcggcaagggguccugggacugcaucaugaccagcuaccaguaccucaucauccagaacaccaccugggaggaccacugccaguucucccgccccagccccaucggcuaccuggggcugcucagccagcggacgcgcgacaucuacaucucccggcgccugcugggcaccuucaccuggacccucagcgacuccgagggcaacgagacgcccgggggcuacugccugacccgguggaugcugaucgaggccgagcucaagugcuucgggaacaccgccgucgccaagugcaacgagaagcacgacgaggaguucugcgacaugcugcgccuguucgacuucaacaagcaggcgauccggcgccucaagaccgaggcccagaugagcauccagcugaucaacaaggccgugaacgcccugaucaacgaccagcucaucaugaagaaccaccuccgggacaucaugggcauccccuacugcaacuacuccaaguacugguaccugaaccacacggugaccgggaagaccagccugccccgcugcuggcuggucuccaacggcagcuaccugaacgagacccacuucuccgacgacaucgagcagcaggccgacaacaugaucacggagcuccugcagaaggaguacauggaccggcagggcaagaccccgcuggggcucguggaccuguucguguucagcaccuccuucuaccugaucagcaucuuccugcaccucguccgcaucccgacccaccggcacgugaucggcaagcccugccccaagccccaccgccugaaccacauggggaucugcuccugcggccuguacaagcacccgggggugcccgucaaguggaagcggugaggacuagucccuguucccagagcccacuuuuuuuucuuuuuuugaaauaaaauagccugucuuucagaucuaaaaaaaaaaaaaaaaaaaaaaaaaaaaaaaaaaaaaaaaaaaaaaaaaaaaaaaaaaaaaaaaaaaaaaaaaaaaaaaaaaaaaaaaaaaaaaaaaaaa

SEQ ID NO: 14261 - RNA, 1721 nt, Artificial Sequence
  mRNA product Design a-1 (A100) comprising derived and/or modified sequence from LASV(Lassa virus/H.sapiens-wt/NGA/2018/ISTH_0959;Clade II)__AVV65099__GPC (opt1)
aggagagucccgcagucggcguccagcggcucugcuuguucgugugugugucguugcaggccuuauucaagcuuaccaugggccagaucaucaccuucuuccaggaggugccccacgucaucgaggaggugaugaacaucgugcugaucgcccucagccugcuggccauccucaaggggaucuacaacgucgugaccugcggccuguucgggcugguguccuuccuccugcugugcggccgcagcugcuccacgaccuacaagggggucuacgagcuccagacccuggagcuggacauggcgagccucaacaugaccaugccgcuguccugcacgaagaacaacagccaccacuacaucauggugggcaacgagaccggccuggagcucacccugaccaacacguccaucaucaaccacaaguucugcaaccugagcgacgcccacaagaagaaccucuacgaccacgcccugauguccaucaucagcaccuuccaccuguccauccccaacuucaaccaguacgaggccaugagcugcgacuucaacgggggcaagaucuccgugcaguacaaccucagccacgccuacgcgaucgacgccgccaaccacugcgggaccaucgccaacggcguccugcagaccuucaugcggauggcguggggcggguccuacaucgcccuggacagcggcaagggguccugggacugcaucaugacgagcuaccaguaccucaucauccagaacaccaccugggaggaccacugccaguucucccgccccagccccaucggcuaccuggggcugcucagccagcggacccgcgacaucuacaucucccggcgccugcugggcacguucaccuggacccucagcgacuccgagggcaacgagacccccgggggcuacugccugacgcgguggaugcugaucgaggccgagcucaagugcuucgggaacaccgccguggccaagugcaacgagaagcacgacgaggaguucugcgacaugcugcgccuguucgacuucaacaagcaggcgauccggcgccucaagaccgaggcccagaugagcauccagcugaucaacaaggccgugaacgcccugaucaacgaccagcucaucaugaagaaccaccuccgggacaucaugggcaucccguacugcaacuacuccaaguacugguaccugaaccacaccgucacggggaagaccagccugccccgcugcuggcugguguccaacggcagcuaccugaacgagacccacuucuccgacgacaucgagcagcaggccgacaacaugaucaccgagcuccugcagaaggaguacaucgaccggcagggcaagacgccccuggggcucguggaccuguucgucuucagcaccuccuucuaccugaucagcaucuuccugcaccucgugaagaucccgacccaccgccacgugaucggcaagcccugccccaagccccaccggcugaaccacauggggaucugcuccugcggccuguacaagcacccggggguccccgugaaguggaagcgcugaggacuagucccuguucccagagcccacuuuuuuuucuuuuuuugaaauaaaauagccugucuuucagaucuaaaaaaaaaaaaaaaaaaaaaaaaaaaaaaaaaaaaaaaaaaaaaaaaaaaaaaaaaaaaaaaaaaaaaaaaaaaaaaaaaaaaaaaaaaaaaaaaaaaa

SEQ ID NO: 14262 - RNA, 1721 nt, Artificial Sequence
  mRNA product Design a-1 (A100) comprising derived and/or modified sequence from LASV(LASV003-NIG-2008;Clade II)__AIT17580__GPC (opt1)
aggagagucccgcagucggcguccagcggcucugcuuguucgugugugugucguugcaggccuuauucaagcuuaccaugggccagaucaucaccuucuuccaggaggugccccacgucaucgaggaggugaugaacaucgugcugaucgcccucagccugcuggccauccucaaggggaucuacaacgucgcgaccugcggccuguucgggcugguguccuuccuccugcugugcggccgcagcugcuccacgaccuacaaggggguguacgagcuccagacccuggagcuggacauggccagccucaacaugaccaugccgcuguccugcacgaagaacaacagccaccacuacaucauggucggcaacgagaccggccuggagcucacccugaccaacacguccaucaucaaccacaaguucugcaaccugagcgacgcccacaagaagaaccucuacgaccacgcccugauguccaucaucagcaccuuccaccuguccauccccaacuucaaccaguacgaggccaugagcugcgacuucaacgggggcaagaucuccgugcaguacaaccucagccacaccuacgcgguggacgccgccaaccacugcgggaccaucgccaacggcguccugcagacguucaugcggauggcguggggcggguccuacaucgcccuggacagcggcaagggguccugggacugcaucaugaccagcuaccaguaccucaucauccagaacaccaccugggaggaccacugccaguucucccgccccagccccaucggcuaccuggggcugcucagccagcggacgcgcgacaucuacaucucccggcgccugcugggcaccuucaccuggacccucagcgacuccgagagcaacgagacgccgggcggguacugccugacccgguggaugcugaucgaggccgagcucaagugcuucggcaacaccgccguggccaagugcaacgagaagcacgacgaggaguucugcgacaugcugcgccuguucgacuucaacaagcaggcgauccggcgccucaaggccgaggcccagauguccauccagcugaucaacaaggccgugaacgcccugaucaacgaccagcucaucaugaagaaccaccuccgggacaucauggggauccccuacugcaacuacagcaaguacugguaccugaaccacaccgucacgggccgcaccucccugccccggugcuggcuggugagcaacggguccuaccugaacgagacccacuucagcgacgacaucgagcagcaggcggacaacaugaucaccgagcuccugcagaaggaguacauggaccgccagggcaagacgccccugggccucguggaccuguucgucuucuccaccagcuucuaccugaucuccaucuuccugcaccucgugaagaucccgacccaccggcacgugaucgggaagcccugccccaagccccaccgccugaaccacaugggcaucugcagcugcgggcuguacaagcacccgggcguccccgugaaguggaagcggugaggacuagucccuguucccagagcccacuuuuuuuucuuuuuuugaaauaaaauagccugucuuucagaucuaaaaaaaaaaaaaaaaaaaaaaaaaaaaaaaaaaaaaaaaaaaaaaaaaaaaaaaaaaaaaaaaaaaaaaaaaaaaaaaaaaaaaaaaaaaaaaaaaaaa

SEQ ID NO: 14263 - RNA, 1721 nt, Artificial Sequence
  mRNA product Design a-1 (A100) comprising derived and/or modified sequence from LASV(LASV035-NIG-2009;Clade II)__AIT17588__GPC (opt1)
aggagagucccgcagucggcguccagcggcucugcuuguucgugugugugucguugcaggccuuauucaagcuuaccaugggccagaucaucaccuucuuccaggaggugccccacgucaucgaggaggugaugaacaucgugcugaucgcccucagccugcuggccauccucaaggggaucuacaacgucgcgaccugcggccuguucgggcugguguccuuccuccugcugugcggccgcagcugcuccacgaccuacaaggggguguacgagcuccagacccuggagcuggacauggccagccucaacaugaccaugccgcuguccugcacgaagaacaacagccaccacuacaucauggucggcaacgagaccggccuggagcucacccugaccaacacguccaucaucaaccacaaguucugcaaccugagcgacgcccacaagaagaaccucuacgaccacgcccugauguccaucaucagcaccuuccaccuguccauccccaacuucaaccaguacgaggccaugagcugcgacuucaacgggggcaagaucuccgugcaguacaaccucagccacgcguacgccguggacgccgccaaccacugcgggaccaucgcgaacggcguccugcagaccuucaugcggauggccuggggcggguccuacaucgcccuggacagcggcaagggguccugggacugcaucaugacgagcuaccaguaccucaucauccagaacaccaccugggaggaccacugccaguucucccgccccagccccaucggcuaccuggggcugcucagccagcggacccgcgacaucuacaucucccggcgccugcugggcacguucaccuggacccucagcgacuccgagggcaacgagacccccgggggcuacugccugacgcgguggaugcugaucgaggccgagcucaagugcuucgggaacaccgccguggcgaagugcaacgagaagcacgacgaggaguucugcgacaugcugcgccuguucgacuucaacaagcaggccauccggcgccucaaggccgaggcccagaugagcauccagcugaucaacaaggccgugaacgcgcugaucaacgaccagcucaucaugaagaaccaccuccgggacaucaugggcauccccuacugcaacuacuccaaguacugguaccugaaccacaccgucaccgggaagacgagccugccccgcugcuggcugguguccaacggcagcuaccugaacgagacccacuucuccgacgacaucgagcagcaggccgacaacaugaucaccgagcuccugcagaaggaguacaucgaccggcagggcaagaccccgcuggggcucguggaccuguucgucuucagcacguccuucuaccugaucagcaucuuccugcaccucgugaagaucccgacccaccgccacgugaucggcaagcccugccccaagccccaccggcugaaccacauggggaucugcuccugcggccuguacaagcacccggggguccccgugaaguggaagcgcugaggacuagucccuguucccagagcccacuuuuuuuucuuuuuuugaaauaaaauagccugucuuucagaucuaaaaaaaaaaaaaaaaaaaaaaaaaaaaaaaaaaaaaaaaaaaaaaaaaaaaaaaaaaaaaaaaaaaaaaaaaaaaaaaaaaaaaaaaaaaaaaaaaaaa

SEQ ID NO: 14264 - RNA, 1721 nt, Artificial Sequence
  mRNA product Design a-1 (A100) comprising derived and/or modified sequence from LASV(LASV1000-NIG-2009;Clade II)__AIT17782__GPC (opt1)
aggagagucccgcagucggcguccagcggcucugcuuguucgugugugugucguugcaggccuuauucaagcuuaccaugggccagaucaucaccuucuuccaggaggugccccacgucaucgaggaggugaugaacaucgugcugaucgcccucagccugcuggccauccucaaggggaucuacaacgucgcgaccugcggccuguucgggcugguguccuuccuccugcugugcggccgcagcugcuccacgaccuacaaggggguguacgagcuccagacccuggagcuggacauggccagccucaacaugaccaugccgcuguccugcacgaagaacaacagccaccacuacaucauggucggcaacgagaccggccuggagcucacccugaccaacacguccaucaucaaccacaaguucugcaaccugagcgacgcccacaagaagaaccucuacgaccacgcccugauguccaucaucagcaccuuccaccuguccauccccaacuucaaccaguacgaggccaugagcugcgacuucaacgggggcaagaucuccgugcaguacaaccucagccacaccuacgcgguggacgccgccaaccacugcgggaccaucgccaacggcguccugcagacguucaugcggauggcguggggcggguccuacaucgcccuggacagcggcaagggguccugggacugcaucaugaccagcuaccaguaccucaucauccagaacaccaccugggaggaccacugccaguucucccgccccagccccaucggcuaccuggggcugcucagccagcggacgcgcgacaucuacaucucccggcgccugcugggcaccuucaccuggacccucagcgacuccgagggcaacgagacgcccgggggcuacugccugacccgguggaugcugaucgaggccgagcucaagugcuucgggaacaccgccguggccaagugcaacgagaagcacgacgaggaguucugcgacaugcugcgccuguucgacuucaacaagcaggcgaucaagcggcucaagaccgaggcccagaugagcauccagcugaucaacaaggccgugaacgcccugaucaacgaccagcucaucaugaagaaccaccuccgcgacaucaugggcauccccuacugcaacuacuccaaguacugguaccugaaccacacggucaccgggaagaccagccugccccggugcuggcugguguccaacggcagcuaccugaacgagacccacuucuccgacgacaucgagcagcaggccgacaacaugaucacggagcuccugcagaaggaguacaucgaccgccagggcaagaccccgcuggggcucguggaccuguucgucuucagcaccuccuucuaccugaucagcaucuuccugcaccucgugaagaucccgacccaccggcacguggucggcaagcccugccccaagccccaccgccugaaccacauggggaucugcuccugcggccuguacaagcacccgggggugcccgugaaguggaagcggugaggacuagucccuguucccagagcccacuuuuuuuucuuuuuuugaaauaaaauagccugucuuucagaucuaaaaaaaaaaaaaaaaaaaaaaaaaaaaaaaaaaaaaaaaaaaaaaaaaaaaaaaaaaaaaaaaaaaaaaaaaaaaaaaaaaaaaaaaaaaaaaaaaaaa

SEQ ID NO: 14265 - RNA, 1721 nt, Artificial Sequence
  mRNA product Design a-1 (A100) comprising derived and/or modified sequence from LASV(LASV221-NIG-2010;Clade II)__AIT17624__GPC (opt1)
aggagagucccgcagucggcguccagcggcucugcuuguucgugugugugucguugcaggccuuauucaagcuuaccaugggccagaucaucaccuucuuccaggaggugccccacgucaucgaggaggugaugaacaucgugcugaucgcccucagccugcuggccauccucaaggggaucuacaacgucgcgaccugcggccuguucgggcugguguccuuccuccugcugugcggccgcagcugcuccacgaccuacaaggggguguacgagcuccagacccuggagcuggacauggccagccucaacaugaccaugccgcuguccugcacgaagaacaacagccaccacuacaucauggucggcaacgagaccggccuggagcucacccugaccaacacguccaucaucaaccacaaguucugcaaccugagcgacgcccacaagaagaaccucuacgaccacgcccugauguccaucaucagcaccuuccaccuguccauccccaacuucaaccaguacgaggccaugagcugcgacuucaacgggggcaagaucuccgugcaguacaaccucagccacaccuacgcgaucgacgccgccaaccacugcgggaccaucgccaacggcgugcugcagacguucaugcggauggcguggggcggguccuacaucgcccuggacagcggcaagggguccugggacugcaucaugaccagcuaccaguaccucaucauccagaacaccaccugggaggaccacugccaguucucccgccccagccccaucggcuaccuggggcugcucagccagcggacgcgcgacaucuacaucucccggcgccugcugggcaccuucaccuggacccucagcgacuccgagggcaacgagacgcccgggggcuacugccugacccgguggaugcugaucgaggccgagcucaagugcuucgggaacaccgccgucgccaagugcaacgagaagcacgacgaggaguucugcgacaugcugcgccuguucgacuucaacaagcaggcgauccggcgccucaagaccgaggcccagaugagcauccagcugaucaacaaggccgugaacgcccugaucaacgaccagcucaucaugaagaaccaccuccgggacaucaugggcauccccuacugcaacuacuccaaguacugguaccugaaccacacggugaccgggaagaccagccugccccgcugcuggcuggucuccaacggcagcuaccugaacgagacccacuucuccgacgacaucgagcagcaggccgacaacaugaucacggagaugcuccagaaggaguacauggaccggcagggcaagaccccgcuggggcugguggaccucuucguguucagcaccuccuucuaccugaucagcaucuuccugcaccuggucaagaucccgacccaccgccacgugaucggcaagcccugccccaagccccaccggcucaaccacauggggaucugcuccugcggccuguacaagcacccgggggugcccgucaaguggaagcgcugaggacuagucccuguucccagagcccacuuuuuuuucuuuuuuugaaauaaaauagccugucuuucagaucuaaaaaaaaaaaaaaaaaaaaaaaaaaaaaaaaaaaaaaaaaaaaaaaaaaaaaaaaaaaaaaaaaaaaaaaaaaaaaaaaaaaaaaaaaaaaaaaaaaaa

SEQ ID NO: 14266 - RNA, 1721 nt, Artificial Sequence
  mRNA product Design a-1 (A100) comprising derived and/or modified sequence from LASV(LASV237-NIG-2010;Clade II)__AIT17638__GPC (opt1)
aggagagucccgcagucggcguccagcggcucugcuuguucgugugugugucguugcaggccuuauucaagcuuaccaugggccagaucaucaccuucuuccaggaggugccccacgucaucgaggaggugaugaacaucgugcugaucgcccucagccugcuggccauccucaaggggaucuacaacgucgcgaccugcggccuguucgggcugguguccuuccuccugcugugcggccgcagcugcuccacgaccuacaaggggguguacgagcuccagacccuggagcuggacauggccagccucaacaugaccaugccgcuguccugcacgaagaacaacagccaccacuacaucauggucggcaacgagaccggccuggagcucacccugaccaacacguccaucaucaaccacaaguucugcaaccugagcgacgcccacaagaaggaccucuacgaccacgcccugauguccaucaucagcaccuuccaccuguccauccccaacuucaaccaguacgaggccaugagcugcgacuucaacgggggcaagaucuccgugcaguacaaccucagccacaccuacgcgguggacgccgccaaccacugcgggaccaucgccaacggcguccugcagacguucaugcggauggcguggggcggguccuacaucgcccuggacagcggcaagggguccugggacugcaucaugaccagcuaccaguaccucaucauccagaacaccaccugggaggaccacugccaguucucccgccccagccccaucggcuaccuggggcugcucagccagcggacgcgcgacaucuacaucucccggcgccugcugggcaccuucaccuggacccucagcgacuccgagggcaacgagacgcccgggggcuacugccugacccgguggaugcugaucgaggccgagcucaagugcuucgggaacaccgccguggccaagugcaacgagaagcacgacgaggaguucugcgacaugcugcgccuguucgacuucaacaagcaggcgauccggcgccucaagaccgaggcccagaugagcauccagcugaucaacaaggccgugaacgcccugaucaacgaccagcucaucaugaagaaccaccuccgggacaucaugggcauccccuacugcaacuacuccaaguacugguaccugaaccacacggucaccgggaagaccagccugccccgcugcuggcugguguccaacggcagcuaccugaacgagacccacuucuccgacgacaucgagcagcaggccgacaacaugaucacggagcuccugcagaaggaguacauggaccggcagggcaagaccccgcuggggcucguggaccuguucgucuucagcaccuccuucuaccugaucagcaucuuccugcaccucaucaagaucccgacccaccgccacaucacgggcaagcccugccccaagccccaccggcugaaccacauggggaucugcuccugcggccuguacaagcacccgggggugcccgugaaguggaagcgcugaggacuagucccuguucccagagcccacuuuuuuuucuuuuuuugaaauaaaauagccugucuuucagaucuaaaaaaaaaaaaaaaaaaaaaaaaaaaaaaaaaaaaaaaaaaaaaaaaaaaaaaaaaaaaaaaaaaaaaaaaaaaaaaaaaaaaaaaaaaaaaaaaaaaa

SEQ ID NO: 14267 - RNA, 1721 nt, Artificial Sequence
  mRNA product Design a-1 (A100) comprising derived and/or modified sequence from LASV(LASV253-NIG-2011;Clade II)__AIT17670__GPC (opt1)
aggagagucccgcagucggcguccagcggcucugcuuguucgugugugugucguugcaggccuuauucaagcuuaccaugggccagaucaucaccuucuuccaggaggugccccacgucaucgaggaggugaugaacaucgugcugaucgcccucagccugcuggccauccucaaggggaucuacaacgucgcgaccugcggccuguucgggcugguguccuuccuccugcugugcggccgcagcugcuccacgaccuacaaggggguguacgagcuccagacccuggagcuggacauggccagccucaacaugaccaugccgcuguccugcacgaagaacaacagccaccacuacaucauggucggcaacgagaccggccuggagcucacccugaccaacacguccaucaucaaccacaaguucugcaaccugagcgacgcccacaagaagaaccucuacgaccacgcccugauguccaucaucagcaccuuccaccuguccauccccaacuucaaccaguacgaggccaugagcugcgacuucaacgggggcaagaucuccgugcaguacaaccucagccacaccuacgcgguggacgccgccaaccacugcgggaccaucgccaacggcguccugcagacguucaugcggauggcguggggcggguccuacaucgcccuggacagcggcaagggguccugggacugcaucaugaccagcuaccaguaccucaucauccagaacaccaccugggaggaccacugccaguucucccgccccagccccaucggcuaccuggggcugcucagccagcggacgcgcgacaucuacaucucccggcgccugcugggcaccuucaccuggacccucagcgacuccgagggcaacgagacgcccgggggcuacugccugacccgguggaugcugaucgaggccgagcucaagugcuucgggaacaccgccguggccaagugcaacgagaagcacgacgaggaguucugcgacaugcugcgccuguucgacuucaacaagcaggcgauccggcgccucaaggccgaggcccagaugagcauccagcugaucaacaaggccgugaacgcccugaucaacgaccagcucaucaugaagaaccaccuccgggacaucaugggcaucccguacugcaacuacuccaaguacugguaccugaaccacaccgucacggggcgcaccagccugccccggugcuggcugguguccaacggcagcuaccugaacgagacccacuucuccgacgacaucgagcagcaggcggacaacaugaucaccgagcuccugcagaaggaguacaucgaccgccagggcaagacgccccuggggcucguggaccuguucgucuucagcaccuccuucuaccugaucagcaucuuccugcaccucgugaagaucccgacccaccggcacaucaucggcaagcccugccccaagccccaccgccugaaccacauggggaucugcuccugcggccuguacaagcacccgggggugcccgucaaguggaagcggugaggacuagucccuguucccagagcccacuuuuuuuucuuuuuuugaaauaaaauagccugucuuucagaucuaaaaaaaaaaaaaaaaaaaaaaaaaaaaaaaaaaaaaaaaaaaaaaaaaaaaaaaaaaaaaaaaaaaaaaaaaaaaaaaaaaaaaaaaaaaaaaaaaaaa

SEQ ID NO: 14268 - RNA, 1721 nt, Artificial Sequence
  mRNA product Design a-1 (A100) comprising derived and/or modified sequence from LASV(LASV254-NIG-2011;Clade II)__AIT17674__GPC (opt1)
aggagagucccgcagucggcguccagcggcucugcuuguucgugugugugucguugcaggccuuauucaagcuuaccaugggccagaucaucaccuucuuccaggaggugccccacgucaucgaggaggugaugaacaucgugcugaucgcccucagccugcuggccauccucaaggggaucuacaacgucgcgaccugcggccuguucgggcugguguccuuccuccugcugugcggccgcagcugcuccacgaccuacaaggggguguacgagcuccagacccuggagcuggacaugaccaaccucaacaugacgaugccgcugagcugcaccaagaacaacucccaccacuacaucauggucggcaacgagaccggccuggagcucacccugacgaacaccagcaucaucaaccacaaguucugcaaccuguccgacgcccacaagaagaaccucuacaaccacgcccugaugagcaucaucuccaccuuccaccugagcauccccaacuucaaccaguacgaggccauguccugcgacuucaacgggggcaagaucagcgugcaguacaaccucucccacagcuacgccguggacgcggccaaccacugcgggaccaucgccaacggcguccugcagacguucaugcggauggccuggggcggguccuacaucgcgcuggacagcggcaaggggaacugggacugcaucaugaccuccuaccaguaccucaucauccagaacaccaccugggaggaccacugccaguucagccgccccucccccaucggcuaccuggggcugcucagccagcggacgcgcgacaucuacaucagccggcgccugcugggcaccuucaccuggacccucuccgacagcgagggcaacgagacgcccgggggcuacugccugacccgguggaugcugaucgaggccgagcucaagugcuucgggaacaccgccguggccaagugcaacgagaagcacgacgaggaguucugcgacaugcugcgccuguucgacuucaacaagcaggccauccggcgccucaagaccgaggcgcaggccaacauccagcugaucaacaaggccgugaacgcccugaucaacgaccagcucaucaugaagaaccaccuccgggacaucaugggcauccccuacugcaacuacuccaaguacugguaccugaaccacacggucaccgggaagaccagccugccccgcugcuggcugguguccaacggcagcuaccugaacgagacccacuucuccgacgacaucgagcagcaggccgacaacaugaucacggagcuccugcagaaggaguacauggaccggcagggcaagaccccgcuggggcucguggaccuguucgucuucagcaccuccuucuaccugaucagcaucuuccugcaccucgugaagaucccgacccaccgccacgugaucggcaagcccugccccaagccccaccggcugaaccacauggggaucugcuccugcggccuguacaagcacccggggguccccgugaaguggaagcgcugaggacuagucccuguucccagagcccacuuuuuuuucuuuuuuugaaauaaaauagccugucuuucagaucuaaaaaaaaaaaaaaaaaaaaaaaaaaaaaaaaaaaaaaaaaaaaaaaaaaaaaaaaaaaaaaaaaaaaaaaaaaaaaaaaaaaaaaaaaaaaaaaaaaaa

SEQ ID NO: 14269 - RNA, 1721 nt, Artificial Sequence
  mRNA product Design a-1 (A100) comprising derived and/or modified sequence from LASV(Nig08-A19;Clade III)__ADU56618__GPC (opt1)
aggagagucccgcagucggcguccagcggcucugcuuguucgugugugugucguugcaggccuuauucaagcuuaccaugggccagaucgugaccuucuuccaggaggucccccacgugaucgaggaggugaugaacaucguccugaucgcccucagcauccuggccauccugaaggggcucuacaacaucgcgaccugcggccugaucgggcuggugacguuccuccugcuguccggccgcagcugcuccaugaccuacaaggggguguacgagcuccagacccuggagcugaacaugaacacccucaacaugacgaugccgcugagcugcaccaagaacaacucccaccacuacaucauggucggcaacgagaccggccuggagcucacccugacgaacaccagccugcuccaccacaaguucugcaaccuguccgacgcccacaagaagaaccuguacgaccacacccucaugagcaucaucuccaccuuccaccugagcauccccaacuucaaccaguacgaggccauguccugcgacuucaacgggggcaagaucacggugcaguacaaccugagccacuccuacgccaucgacgccgcgaaccacugcgggaccguggccaacggcguccuccagaccuucaugcggauggccuggggcgggagcuacaucgcccuggacuccggccgcgggaagugggacugcaucaugaccagcuaccaguaccugaucauccagaacacgaccugggaggaccacugccaguucucccggcccagccccaucggcuaccucgggcugcugucccagcgcacccgggacaucuacaucagccgccggcuccugggcaccuucacguggacccugagcgacuccgagggcaacgagacccccgggggcuacugccucacccgcuggaugcugaucgaggcggagcugaagugcuucgggaacacggccguggccaagugcaacgagaagcacgacgaggaguucugcgacaugcuccggcuguucgacuucaacaagcaggccauccgccggcugaaggccgaggcgcagaugagcauccagcucaucaacaaggccgugaacgcccugaucaacgaccagcugaucaugaagaaccaccuccgcgacaucaugggcauccccuacugcaacuacuccaaguacugguaccugaaccacaccagcaccgggcggaccucccugccccgcugcuggcucgucagcaacggcuccuaccugaacgagacgcacuucagcgacgacaucgagcagcaggccgacaacaugaucaccgagaugcugcagaaggaguaccucgaccggcagggcaagaccccgcuggggcugguggaccuguucguguucuccaccagcuucuaccucaucuccaucuuccugcaccuggucaagaucccgacgcaccgccacaucgugggcaagcccugccccaagccccaccggcucaaccacauggggaucugcagcugcggccuguacaagcagccgggggugcccguccgcuggaagcggugaggacuagucccuguucccagagcccacuuuuuuuucuuuuuuugaaauaaaauagccugucuuucagaucuaaaaaaaaaaaaaaaaaaaaaaaaaaaaaaaaaaaaaaaaaaaaaaaaaaaaaaaaaaaaaaaaaaaaaaaaaaaaaaaaaaaaaaaaaaaaaaaaaaaa

SEQ ID NO: 14270 - RNA, 1724 nt, Artificial Sequence
  mRNA product Design a-1 (A100) comprising derived and/or modified sequence from LASV(G1180-SLE-2010;Clade IV)__AIT17168__GPC (opt1)
aggagagucccgcagucggcguccagcggcucugcuuguucgugugugugucguugcaggccuuauucaagcuuaccaugggccagaucgugaccuucuuccaggaggucccccacgugaucgaggaggugaugaacaucguccugaucgcccucagcauccuggccgugcugaaggggcucuacaacuucgcgaccugcggccugguggggcugcucaccuuccugcugcucugcggccgcuccugcaccgccagccgguacaagggggucuacgagcugcagacccuggagcucaacauggagacccugaacaugacgaugccgcuguccugcaccaagaacaacagccaccacuacaucauggugggcaacgagaccggccucgagcugacccugacgaacaccuccaucaucaaccacaaguucugcaaccucagcgacgcccacaagaagaaccuguacgaccacgcccugauguccaucaucagcaccuuccaccucuccauccccaacuucaaccaguacgaggccaugagcugcgacuucaacgggggcaagaucuccgugcaguacaaccugagccacuccuacgcgggggacgccgccaaccacugcggcaccgucgccaacggggugcugcagacguucaugcgcauggcguggggcggcagcuacaucgcccucgacuccgggcacggcagcugggacugcaucaugaccuccuaccaguaccugaucauccagaacaccaccugggaggaccacugccaguucagccggcccucccccaucggguaccugggccuccugagccagcgcacgcgggacaucuacaucagccgccggcugcucggcaccuucaccuggacccuguccgacagcgaggggaaggacacgccgggcggguacugccugacccgcuggaugcucaucgaggccgagcugaagugcuucggcaacaccgccguggccaagugcaacgagaagcacgacgaggaguucugcgacaugcugcggcuguucgacuucaacaagcaggcgauccagcgccugaaggccgaggcccagauguccauccagcugaucaacaaggccgucaacgcccucaucaacgaccagcugaucaugaagaaccaccuccgggacaucauggggauccccuacugcaacuacagcaaguacugguaccucaaccacaccacgaccggcaagaccucccugcccaagugcuggcuggugagcaacggcuccuaccucaacgagacccacuucagcgacgacaucgagcagcaggcggacaacaugaucacggagaugcugcagaaggaguacauggagcgccaggggaagacgccccugggccucguggaccuguucgucuucuccaccagcuucuaccugaucuccaucuuccugcaccucgugaagaucccgacccaccggcacaucgugggcaagagcugccccaagccccaccgccugaaccacauggggaucugcuccugcgggcuguacaagcagcccggcgucccggugaaguggaagcggugaggacuagucccuguucccagagcccacuuuuuuuucuuuuuuugaaauaaaauagccugucuuucagaucuaaaaaaaaaaaaaaaaaaaaaaaaaaaaaaaaaaaaaaaaaaaaaaaaaaaaaaaaaaaaaaaaaaaaaaaaaaaaaaaaaaaaaaaaaaaaaaaaaaaa

SEQ ID NO: 14271 - RNA, 1724 nt, Artificial Sequence
  mRNA product Design a-1 (A100) comprising derived and/or modified sequence from LASV(G1442-SLE-2011;Clade IV)__AIT17180__GPC (opt1)
aggagagucccgcagucggcguccagcggcucugcuuguucgugugugugucguugcaggccuuauucaagcuuaccaugggccagaucgugaccuucuuccaggaggucccccacgugaucgaggaggugaugaacaucguccugaucgcccucagcauccuggccgugcugaaggggcucuacaacguggcgaccugcggccugaucgggcuggucacguuccuccugcugugcggccgcuccugcaccaccacccucuacaaggggguguacgagcugcagacgcuggagcucaacauggagacccugaacaugaccaugccgcugagcugcaccaagaacaacucccaccacuacauccgggugggcaacgagacgggccucgagcugacccugaccaacaccagcaucaucaaccacaaguucugcaaccucuccgacgcccacaagaagaaccuguacgaccacgcccugaugagcaucaucuccacguuccaccucagcauccccaacuucaaccaguacgaggccauguccugcgacuucaacgggggcaagaucagcguccaguacaaccugucccacagcuacgccggggacgcggccaaccacugcggcaccguggccaacggggugcugcagaccuucaugcgcauggccuggggcggcuccuacaucgcgcucgacagcgggcggggcaacugggacugcaucaugaccuccuaccaguaccugaucauccagaacacgaccugggacgaccacugccaguucagccgccccucccccaucggguaccugggccuccugagccagcggacccgcgacgucuacaucucccggcgccugcucggcaccuucacguggacccugagcgacagcgaggggaaggacaccccgggcggguacugccugacccgguggaugcucaucgaggccgagcugaagugcuucggcaacacggccguggccaagugcaacgagaagcacgacgaggaguucugcgacaugcugcgccucuucgacuucaacaagcaggccauccagcggcugaaggcggaggcccagauguccauccagcugaucaacaaggccgugaacgcccucaucaacgaccagcugaucaugaagaaccaccuccgcgacaucauggggauccccuacugcaacuacagcaaguacugguaccugaacaacaccgccaccggcaagaccucccugcccaagugcuggcugaucagcaacggcuccuaccucaacgagacgcacuucagcgacgacaucgagcaggaggcggacaacaugaucaccgagaugcugcagaaggaguacauggagcggcaggggaagacgccccugggccucgucgaccuguucguguucuccaccagcuucuaccugaucuccaucuuccugcaccucgugaagaucccgacccaccgccacaucgucggcaagagcugccccaagccccaccggcugaaccacauggggaucugcuccugcgggcuguacaagcagcccggcgugccggugcgcuggaagcggugaggacuagucccuguucccagagcccacuuuuuuuucuuuuuuugaaauaaaauagccugucuuucagaucuaaaaaaaaaaaaaaaaaaaaaaaaaaaaaaaaaaaaaaaaaaaaaaaaaaaaaaaaaaaaaaaaaaaaaaaaaaaaaaaaaaaaaaaaaaaaaaaaaaaa

SEQ ID NO: 14272 - RNA, 1724 nt, Artificial Sequence
  mRNA product Design a-1 (A100) comprising derived and/or modified sequence from LASV(G3010-SLE-2013;Clade IV)__AIT17344__GPC (opt1)
aggagagucccgcagucggcguccagcggcucugcuuguucgugugugugucguugcaggccuuauucaagcuuaccaugggccagaucgugaccuucuuccaggaggucccccacgugaucgaggaggugaugaacaucguccugaucgcccucagcauccuggccgugcugaaggggcucuacaacuucgcgaccugcggccugguggggcuggucacguuccuccugcugugcggccgcuccugcaccaccagccucuacaaggggguguacgagcugcagacccuggagcucaacauggagacgcugaacaugaccaugccgcuguccugcaccaagaacaacagccaccacuacaucauggugggcaacgagaccggccucgagcugacgcugaccaacaccuccaucaucaaccacaaguucugcaaccucagcgacgcccacaagaagaaccuguacaaccacgcccugauguccaucaucagcaccuuccaccucuccauccccaacuucaaccaguacgaggccaugagcugcgacuucaacgggggcaagaucuccguccaguacaaccugagccacuccuacgccggggacgcggccagccacugcggcacgguggccaacggggugcugcagaccuucaugcggauggccuggggcggcuccuacaucgcgcucgacagcggguacggcaagugggacugcaucaugaccuccuaccaguaccugaucauccagaacaccacgugggaggaccacugccaguucagccgccccucccccaucggguaccugggccuccugagccagcggacccgcgacaucuacaucagccggcgccugcucggcaccuucaccuggacgcuguccgacagcgaggggaaggacaccccgggcggguacugccugacccgguggaugcucaucgaggccgagcugaagugcuucggcaacaccgccgucgccaagugcaacgagaagcacgacgaggaguucugcgacaugcugcgccucuucgacuucaacaagcaggccauccagcggcugaagacggaggcgcagauguccauccagcugaucaacaaggccgugaacgcccucaucaacgaccagcugaucaugaagaaccaccuccgcgacaucauggggauccccuacugcaacuacagcaaguacugguaccugaaccacaccaccaccggcaagacgucccugcccaagugcuggcuggugagcaacggcuccuaccucaacgagacccacuucagcgacgacaucgagcagcaggccgacaacaugaucaccgagaugcugcagaaggaguacauggagcggcaggggaagacgccccugggccucgucgaccuguucguguucuccaccagcuucuaccugaucuccaucuuccugcaccucgugaagaucccgacccaccgccacaucgucggcaagagcugccccaagccccaccggcugaaccacauggggaucugcuccugcgggcuguacaagcagcccggcgugccggugcgcuggaagcggugaggacuagucccuguucccagagcccacuuuuuuuucuuuuuuugaaauaaaauagccugucuuucagaucuaaaaaaaaaaaaaaaaaaaaaaaaaaaaaaaaaaaaaaaaaaaaaaaaaaaaaaaaaaaaaaaaaaaaaaaaaaaaaaaaaaaaaaaaaaaaaaaaaaaa

SEQ ID NO: 14273 - RNA, 1724 nt, Artificial Sequence
  mRNA product Design a-1 (A100) comprising derived and/or modified sequence from LASV(G502-SLE-2009;Clade IV)__AIT17126__GPC (opt1)
aggagagucccgcagucggcguccagcggcucugcuuguucgugugugugucguugcaggccuuauucaagcuuaccaugggccagaucgugaccuucuuccaggaggucccccacgugaucgaggaggugaugaacaucguccugaucgcccucagcauccuggccgugcugaaggggcucuacaacuucgcgaccugcggccugguggggcugcucacguuccugcugcucugcggccgcuccugcaccaccgggcuguacaagggcgucuacgagcugcagacccucgagcugaacauggagacgcugaacaugaccaugccgcucagcugcaccaagaacaacucccaccacuacaucauggugggcaacgagaccgggcuggagcugacgcucaccaacaccagcaucaucaaccacaaguucugcaaccuguccgacgcccacaagaagaaccuguacgaccacgcccucaugagcaucaucuccaccuuccaccugagcauccccaacuucaaccaguacgaggccauguccugcgacuucaacggcgggaagaucagcgugcaguacaaccugucccacagcuacgccggcgacgcggccgaccacugcgggacggucgccaacggcgugcuccagaccuucaugcggauggccuggggcggguccuacaucgcgcuggacagcggccgcgggcggugggacugcaucaugaccuccuaccaguaccugaucauccagaacaccacgugggaggaccacugccaguucagccgccccucccccaucggcuaccucggccugcugagccagcggacccgcgacaucuacaucucccggcgccuccuggggaccuucaccuggacgcugagcgacagcgagggcaaggacacccccgggggcuacugccucacccgguggaugcugaucgaggccgagcugaagugcuucgggaacaccgccguggccaagugcaacgagaagcacgacgaggaguucugcgacaugcuccgccuguucgacuucaacaagcaggccauccagcggcugaaggcggaggcccagauguccauccagcucaucaacaaggccgucaacgcccugaucaacgaccagcuggugaugaagaaccaccuccgcgacaucaugggcauccccuacugcaacuacagccgguacugguaccugaaccacacgaccaccggccgcaccucccugcccaagugcuggcucgugagcaacggguccuaccugaacgagacgcacuucagcgacgacaucgagcagcaggccgacaacaugaucaccgagaugcugcagaaggaguacauggagcggcagggcaagaccccgcucgggcuggucgaccuguucguguucuccaccagcuucuaccugaucuccaucuuccuccaccuggugaagaucccgacgcaccgccacaucgucggcaagagcugccccaagccccaccggcugaaccacauggggaucugcuccugcggccucuacaagcagcccggcgugccggugaaguggaagcgcugaggacuagucccuguucccagagcccacuuuuuuuucuuuuuuugaaauaaaauagccugucuuucagaucuaaaaaaaaaaaaaaaaaaaaaaaaaaaaaaaaaaaaaaaaaaaaaaaaaaaaaaaaaaaaaaaaaaaaaaaaaaaaaaaaaaaaaaaaaaaaaaaaaaaa

SEQ ID NO: 14274 - RNA, 1724 nt, Artificial Sequence
  mRNA product Design a-1 (A100) comprising derived and/or modified sequence from LASV(G733-SLE-2010;Clade IV)__AIT17154__GPC (opt1)
aggagagucccgcagucggcguccagcggcucugcuuguucgugugugugucguugcaggccuuauucaagcuuaccaugggccagaucgugaccuucuuccaggaggucccccacgugaucgaggaggugaugaacaucguccugaucgcccucagcauccuggccgugcugaaggggcucuacaacuucgcgaccugcggcaucguggggcuggucuccuuccugcuccugugcggccgcagcugcacgaccucccuguacaaggggguguacgagcuccagacccuggagcugaacauggagacccucaacaugacgaugccgcugagcugcaccaagaacaacucccaccacuacaucauggugggcaacgagaccggccuggagcucacccugacgaacaccagcaucaucaaccacaaguucugcaaccuguccgacgcccacaagaagaaccucuacgaccacgcccugaugagcaucaucuccaccuuccaccugagcauccccaacuucaaccaguacgaggccauguccugcgacuucaacgggggcaagaucagcguccaguacaaccucucccacagcuacgccggggacgcggccaaccacugcggcaccaucgccaacggggugcugcagacguucaugcggauggccuggggcggcuccuacaucgcgcuggacagcgggcgcgaccggugggacugcaucaugaccuccuaccaguaccucaucauccagaacaccaccugggaggaccacugccaguucagccgccccucccccaucggcuaccuggggcugcucagccagcggacgcgcgacaucuacaucagccggcgccugcugggcaccuucaccuggacccucuccgacagcgagggcaaggacacgcccgggggcuacugccugacccgguggaugcugaucgaggccgagcucaagugcuucgggaacaccgccguggccaagugcaacgagaagcacgacgaggaguucugcgacaugcugcgccuguucgacuucaacaagcaggccauccagcggcucaaggcggaggcccagauguccauccagcugaucaacaaggccgucaacgcccugaucaacgaccagcucaucaugaagaaccaccuccgcgacaucaugggcauccccuacugcaacuacagcaaguacugguaccugaaccacaccacgaccgggaagaccucccugcccaagugcuggcuggugagcaacggcuccuaccugaacgagacccacuucagcgacgacaucgagcagcaggccgacaacaugaucacggagaugcuccagaaggaguacauggagcggcagggcaagaccccgcuggggcugguggaccucuucgucuucuccaccagcuucuaccugaucuccaucuuccugcaccuggugaagaucccgacccaccgccacguggucggcaagagcugccccaagccccaccggcucaaccacauggggaucugcuccugcggccuguacgggcagcccggcgugccggugaaguggaagcgcugaggacuagucccuguucccagagcccacuuuuuuuucuuuuuuugaaauaaaauagccugucuuucagaucuaaaaaaaaaaaaaaaaaaaaaaaaaaaaaaaaaaaaaaaaaaaaaaaaaaaaaaaaaaaaaaaaaaaaaaaaaaaaaaaaaaaaaaaaaaaaaaaaaaaa

SEQ ID NO: 14275 - RNA, 1724 nt, Artificial Sequence
  mRNA product Design a-1 (A100) comprising derived and/or modified sequence from MOPV/LASV reassortant(IGS-1;Clade IV)__AFY05576__GPC (opt1)
aggagagucccgcagucggcguccagcggcucugcuuguucgugugugugucguugcaggccuuauucaagcuuaccaugggccagaucgugaccuucuuccaggaggucccccacgugaucgaggaggugaugaacaucguccugaucgcccucagcgugcuggccgugcugaaggggcucuacaacuucgcgaccugcggccuggucgggcuggugacguuccuccugcugugcggccgcuccugcaccaccagccucuacaaggggguguacgagcugcagacccuggagcucaacauggagacgcugaacaugaccaugccgcuguccugcaccaagaacaacagccaccacuacaucauggucggcaacgagaccggccucgagcugacgcugaccaacaccuccaucaucaaccacaaguucugcaaccucagcgacgcccacaagaagaaccuguacgaccacgcccugauguccaucaucagcaccuuccaccucuccauccccaacuucaaccaguacgaggccaugagcugcgacuucaacgggggcaagaucuccgugcaguacaaccugagccacuccuacgccggggacgcggccaaccacugcggcacgguggccaacgggguccugcagaccuucaugcggauggccuggggcggcagcuacaucgcgcucgacuccgggcgcggcaacugggacugcaucaugaccagcuaccaguaccugaucauccagaacaccacgugggaggaccacugccaguucucccggcccagccccaucggguaccugggccuccugucccagcgcacccgggacaucuacaucagccgccggcugcucggcaccuucaccuggacgcugagcgacuccgagggggaggacaccccgggcggguacugccugacccgcuggaugcucaucgaggccgagcugaagugcuucggcaacaccgccguggccaagugcaacgagaagcacgacgaggaguucugcgacaugcugcggcuguucgacuucaacaagcaggccauccagcgccugaaggcggaggcccagaugagcauccagcugaucaacaaggccgugaacgcccucaucaacgaccagcugaucaugaagaaccaccuccgggacaucauggggauccccuacugcaacuacuccaaguacugguaccucaaccacacgaccaccggccgcaccagccugcccaagugcuggcuggucuccaacggcagcuaccucaacgagacgcacuucuccgacgacaucgagcagcaggccgacaacaugaucaccgagaugcugcagaaggaguacauggagcggcaggggaagacgccccugggccucguggaccuguucguguucagcaccuccuucuaccugaucagcaucuuccugcaccucgucaagaucccgacccaccgccacaucguggggaaguccugccccaagccccaccggcugaaccacaugggcaucugcagcugcgggcuguacaagcagcccggcgugccggucaaguggaagcgcugaggacuagucccuguucccagagcccacuuuuuuuucuuuuuuugaaauaaaauagccugucuuucagaucuaaaaaaaaaaaaaaaaaaaaaaaaaaaaaaaaaaaaaaaaaaaaaaaaaaaaaaaaaaaaaaaaaaaaaaaaaaaaaaaaaaaaaaaaaaaaaaaaaaaa

SEQ ID NO: 14276 - RNA, 1724 nt, Artificial Sequence
  mRNA product Design a-1 (A100) comprising derived and/or modified sequence from LASV(LM765-SLE-2012;Clade IV)__AIT17814__GPC (opt1)
aggagagucccgcagucggcguccagcggcucugcuuguucgugugugugucguugcaggccuuauucaagcuuaccaugggccagaucgugaccuucuuccaggaggucccccacgugaucgaggaggugaugaacaucguccugaucgcccucagcauccuggccgugcugaaggggcucuacaacuucgcgaccugcggccugguggggcuggucacguuccuccugcugugcggccgcuccugcaccaccagccucuacaaggggguguacgagcugcagacccuggagcucaacauggagacgcugaacaugaccaugccgcuguccugcaccaagaacaacagccaccacuacaucauggugggcaacgagaccggccucgagcugacgcugaccaacaccuccaucaucgaccacaaguucugcaaccucagcgacgcccaccggaagaaccuguacgaccacgcccugauguccaucaucagcaccuuccaccucuccauccccaacuucaaccaguacgaggccaugagcugcgacuucaacgggggcaagaucuccguccaguacaaccugagccacuccuacgccaaggacgcggccgaccacugcgggacgguggccaacggcgugcugcagaccuucaugcgcauggccuggggcgggagcuacaucgcgcucgacuccggccgggggcgcugggacugcaucaugaccagcuaccaguaccugaucauccagaacaccacgugggaggaccacugccaguucucccggcccagccccaucggcuaccuggggcuccugucccagcgcacccgggacaucuacaucagccgccggcugcucggcaccuucaccuggacgcugagcgacuccgagggcaaggacacccccgggggcuacugccugacccgcuggaugcucaucgaggccgagcugaagugcuucgggaacaccgccgucgccaagugcaacgagaagcacgacgaggaguucugcgacaugcugcggcuguucgacuucaacaagcaggccauccagcgccugaaggcggaggcccagaugagcauccagcugaucaacaaggccgugaacgcccucaucaacgaccagcugaucaugaagaaccaccuccgggacaucaugggcauccccuacugcaacuacuccaaguacugguaccucaaccacacgaccaccgggaagaccagccugcccaagugcuggcugguguccaacggcagcuaccucaacgagacgcacuucuccgacgacaucgagcagcaggccgacaacaugaucaccgagaugcugcagaaggaguacauggagcgccagggcaagaccccgcuggggcucgucgaccuguucguguucagcaccuccuucuaccugaucagcaucuuccugcaccucgugaagaucccgacgcaccggcacaucgucggcaagcccugccccaagccccaccgccugaaccacauggggaucugcuccugcggccuguacaagcagccgggggugcccgugaaguggaagcggugaggacuagucccuguucccagagcccacuuuuuuuucuuuuuuugaaauaaaauagccugucuuucagaucuaaaaaaaaaaaaaaaaaaaaaaaaaaaaaaaaaaaaaaaaaaaaaaaaaaaaaaaaaaaaaaaaaaaaaaaaaaaaaaaaaaaaaaaaaaaaaaaaaaaa

SEQ ID NO: 14277 - RNA, 1724 nt, Artificial Sequence
  mRNA product Design a-1 (A100) comprising derived and/or modified sequence from LASV(LM776-SLE-2012;Clade IV)__AIT17824__GPC (opt1)
aggagagucccgcagucggcguccagcggcucugcuuguucgugugugugucguugcaggccuuauucaagcuuaccaugggccagaucgugaccuucuuccaggaggucccccacgugaucgaggaggugaugaacaucguccugaucgcccucagcauccuggccgugcugaaggggcucuacaacuucgcgaccugcggccugguggggcuggucacguuccuccugcugugcggccgcuccugcaccaccagcguguacaaggggguguacgagcuccagacccuggagcugaacauggagacgcucaacaugaccaugccgcuguccugcaccaagaacaacagccaccacuacaucauggucggcaacgagaccggccuggagcucacgcugaccaacaccuccaucaucaaccacaaguucugcaaccugagcgacgcccacaagaagaaccucuacgaccacgcccugauguccaucaucagcaccuuccaccuguccauccccaacuucaaccaguacgaggccaugagcugcgacuucaacgggggcaagaucuccgugcaguacaaccucagccacuccuacgccggggacgcggccaaccacugcggcacgguggccaacgggguccugcagaccuucaugcggauggccuggggcggcagcuacaucgcgcuggacuccgggcacggcaagugggacugcaucaugaccagcuaccaguaccucaucauccagaacaccacgugggaggaccacugccaguucucccgccccagccccaucggguaccugggccugcucucccagcggacccgcgacaucuacaucagccggcgccugcugggcaccuucaccuggacgcucagcgacuccgaggggaaggacaccccgggcggguacugccugacccgguggaugcugaucgaggccgagcucaagugcuucggcaacaccgccguggccaagugcaacgagaagcacgacgaggaguucugcgacaugcugcgccuguucgacuucaacaagcaggccauccagcggcucaaggcggaggcccagaugagcauccagcugaucaacaaggccgugaacgcccugaucaacgaccagcucaucaugaagaaccaccuccgcgacaucauggggauccccuacugcaacuacuccaaguacugguaccugaaccacacgaccaccggcaagaccagccugcccaagugcuggcuggucuccaacggcagcuaccugaacgagacgcacuucuccgacgacaucgagcagcaggccgacaacaugaucaccgagaugcuccagaaggaguacauggagcggcaggggaagacgccccugggccugguggaccucuucguguucagcaccuccuucuaccugaucagcaucuuccugcaccuggucaagaucccgacccaccgccacaucguggggaaguccugccccaagccccaccggcucaaccacaugggcaucugcagcugcgggcuguacaagcagcccggcgugccgguccgcuggaagcggugaggacuagucccuguucccagagcccacuuuuuuuucuuuuuuugaaauaaaauagccugucuuucagaucuaaaaaaaaaaaaaaaaaaaaaaaaaaaaaaaaaaaaaaaaaaaaaaaaaaaaaaaaaaaaaaaaaaaaaaaaaaaaaaaaaaaaaaaaaaaaaaaaaaaa

SEQ ID NO: 14278 - RNA, 1724 nt, Artificial Sequence
  mRNA product Design a-1 (A100) comprising derived and/or modified sequence from LASV(Mad39;Clade IV)__ANH09722__GPC (opt1)
aggagagucccgcagucggcguccagcggcucugcuuguucgugugugugucguugcaggccuuauucaagcuuaccaugggccagaucgugaccuucuuccaggaggucccccacgugaucgaggaggugaugaacaucguccugaucgcccucagcauccuggccgugcugaaggggcucuacaacguggcgaccugcggccugaucgggcuggucacguuccuccugcugugcggccgcuccugcaccaccacccucuacaaggggguguacgagcugcaggcccuggagcucaacauggagacgcugaacaugaccaugccgcugagcugcaccaagaacaacucccaccacuacauccgggugggcaacgagaccggccucgagcugacgcugaccaacaccagccucaucaaccacaaguucugcaaccuguccgacgcccacaagaagaaccuguacgaccacgcccucaugagcaucaucuccaccuuccaccugagcauccccaacuucaaccaguacgaggccauguccugcgacuucaacgacgggaagaucagcguccaguacaaccugucccacacguacgcgggcgacaccgccaaccacugcgggaccguggccaacggcgugcuccagaccuucaugcgcauggccuggggcgggagcuacaucgcgcuggacuccggccgcgggggcugggacugcaucaugacgagcuaccaguaccugaucauccagaacaccaccugggaggaccacugccaguucucccggcccagccccaucggguaccucggccugcugucccagcggacccgcgacaucuacaucagccggcgccuccugggcacguucaccuggacccuguccgacagcgaggggaaggacaccccgggcggguacugccucacgcgguggaugcugaucgaggccgagcugaagugcuucggcaacaccgccgucgccaagugcaacgagaagcacgacgaggaguucugcgacaugcuccgccuguucgacuucaacaagcaggccauccagcggcugaaggcggaggcccagaugagcauccagcucaucaacaaggccgugaacgcccugaucaacgaccagcugaucaugaagaaccaccuccgcgacaucauggggauccccuacugcaacuacuccaaguacugguaccugaaccacaccgugaccggcaagacgagccugcccaagugcuggcucgucuccaacggcagcuaccugaacgagacccacuucuccgacgacaucgagcagcaggccgacaacaugaucaccgagaugcugcagaaggaguacauggagcggcaggggaagacgccccucggccugguggaccuguucguguucagcaccuccuucuaccugaucagcaucuuccuccaccuggucaagaucccgacccaccgccacgugguggggaagcccugccccaagccccaccggcugaaccacaugggcaucugcuccugcggguucuacaagcagccgggcguccccgugcgcuggaagcggugaggacuagucccuguucccagagcccacuuuuuuuucuuuuuuugaaauaaaauagccugucuuucagaucuaaaaaaaaaaaaaaaaaaaaaaaaaaaaaaaaaaaaaaaaaaaaaaaaaaaaaaaaaaaaaaaaaaaaaaaaaaaaaaaaaaaaaaaaaaaaaaaaaaaa

SEQ ID NO: 14279 - RNA, 1724 nt, Artificial Sequence
  mRNA product Design a-1 (A100) comprising derived and/or modified sequence from LASV(Z0947-SLE-2011;Clade IV)__AIT17840__GPC (opt1)
aggagagucccgcagucggcguccagcggcucugcuuguucgugugugugucguugcaggccuuauucaagcuuaccaugggccagaucgugaccuucuuccaggaggucccccacgugaucgaggaggugaugaacaucguccugaucgcccucagcauccuggccgugcugaaggggcucuacaacuucgcgaccugcggccugguggggcuggucacguuccuccugcugugcggccgcuccugcaccaucagccucuacaaggggguguacgagcugcagacccuggagcucaacauggagacccugaacaugacgaugccgcuguccugcaccaagaacaacagccaccacuacaucauggugggcaacgagaccggccucgagcugacccugacgaacaccuccaucaucaaccacaaguucugcaaccucagcgacgcccacaagaagaaccuguacgaccacgcccugauguccaucaucagcaccuuccaccucuccauccccaacuucaaccaguacgaggccaugagcugcgacuucaacgggggcaagaucuccguccaguacaaccugagccacuccuacgccggggacgcggccaaccacugcggcaccguggccaacggggugcugcagacguucaugcggauggccuggggcggcagcuacaucgcgcucgacuccgggcgcgaccggugggacugcaucaugaccagcuaccaguaccugaucauccagaacaccaccugggaggaccacugccaguucucccgccccagccccaucggcuaccuggggcuccugucccagcggacgcgcgacaucuacaucagccggcgccugcucggcaccuucaccuggacccugagcgacuccgagggcaaggacacgcccgggggcuacugccugacccgguggaugcucaucgaggccgagcugaagugcuucgggaacaccgccgucgccaagugcaacgagaagcacgacgaggaguucugcgacaugcugcgccucuucgacuucaacaagcaggccauccagcggcugaaggcggaggcccagaugagcauccagcugaucaacaaggccgugaacgcccucaucaacgaccagcugaucaugaagaaccaccuccgcgacaucaugggcauccccuacugcaacuacuccaaguacugguaccugaaccacaccacgaccgggaagaccagccugcccaagugcuggcugguguccaacggcagcuaccucaacgagacccacuucuccgacgacaucgagcagcaggccgacaacaugaucacggagaugcugcagaaggaguacauggagcggcagggcaagaccccgcuggggcucgucgaccuguucguguucagcaccuccuucuaccugaucagcaucuuccugcaccucgugaagaucccgacccaccgccacaucgucggcaagcccugccccaagccccaccggcugaaccacauggggaucugcuccugcggccuguacaagcagccgggggugcccgugaaguggaagcgcugaggacuagucccuguucccagagcccacuuuuuuuucuuuuuuugaaauaaaauagccugucuuucagaucuaaaaaaaaaaaaaaaaaaaaaaaaaaaaaaaaaaaaaaaaaaaaaaaaaaaaaaaaaaaaaaaaaaaaaaaaaaaaaaaaaaaaaaaaaaaaaaaaaaaa

SEQ ID NO: 14280 - RNA, 1724 nt, Artificial Sequence
  mRNA product Design a-1 (A100) comprising derived and/or modified sequence from LASV(Josiah;Clade IV)__NP_694870__GPC (opt4)
aggagagucccgcagucggcguccagcggcucugcuuguucgugugugugucguugcaggccuuauucaagcuuaccaugggccagaucgugaccuucuuccaggaggugccccacgugaucgaggaggugaugaacaucgugcugaucgcccugagcgugcuggccgugcugaagggccuguacaacuucgccaccugcggccuggugggccuggugaccuuccugcugcugugcggcagaagcugcaccaccagccuguacaagggcguguacgagcugcagacccuggagcugaacauggagacccugaacaugaccaugccccugagcugcaccaagaacaacagccaccacuacaucauggugggcaacgagaccggccuggagcugacccugaccaacaccagcaucaucaaccacaaguucugcaaccugagcgacgcccacaagaagaaccuguacgaccacgcccugaugagcaucaucagcaccuuccaccugagcauccccaacuucaaccaguacgaggccaugagcugcgacuucaacggcggcaagaucagcgugcaguacaaccugagccacagcuacgccggcgacgccgccaaccacugcggcaccguggccaacggcgugcugcagaccuucaugagaauggccuggggcggcagcuacaucgcccuggacagcggcagaggcaacugggacugcaucaugaccagcuaccaguaccugaucauccagaacaccaccugggaggaccacugccaguucagcagacccagccccaucggcuaccugggccugcugagccagagaaccagagacaucuacaucagcagaagacugcugggcaccuucaccuggacccugagcgacagcgagggcaaggacacccccggcggcuacugccugaccagauggaugcugaucgaggccgagcugaagugcuucggcaacaccgccguggccaagugcaacgagaagcacgacgaggaguucugcgacaugcugagacuguucgacuucaacaagcaggccauccagagacugaaggccgaggcccagaugagcauccagcugaucaacaaggccgugaacgcccugaucaacgaccagcugaucaugaagaaccaccugagagacaucaugggcauccccuacugcaacuacagcaaguacugguaccugaaccacaccaccaccggcagaaccagccugcccaagugcuggcuggugagcaacggcagcuaccugaacgagacccacuucagcgacgacaucgagcagcaggccgacaacaugaucaccgagaugcugcagaaggaguacauggagagacagggcaagaccccccugggccugguggaccuguucguguucagcaccagcuucuaccugaucagcaucuuccugcaccuggugaagauccccacccacagacacaucgugggcaagagcugccccaagccccacagacugaaccacaugggcaucugcagcugcggccuguacaagcagcccggcgugcccgugaaguggaagagaugaggacuagucccuguucccagagcccacuuuuuuuucuuuuuuugaaauaaaauagccugucuuucagaucuaaaaaaaaaaaaaaaaaaaaaaaaaaaaaaaaaaaaaaaaaaaaaaaaaaaaaaaaaaaaaaaaaaaaaaaaaaaaaaaaaaaaaaaaaaaaaaaaaaaa

SEQ ID NO: 14281 - RNA, 1721 nt, Artificial Sequence
  mRNA product Design a-1 (A100) comprising derived and/or modified sequence from LASV(LP;Clade I)__AAF86701__GPC (opt4)
aggagagucccgcagucggcguccagcggcucugcuuguucgugugugugucguugcaggccuuauucaagcuuaccaugggccagaucaucaccuucuuccaggaggugccccacgugaucgaggaggugaugaacaucgugcugaucgcccugagccugcuggccauccugaagggccuguacaacaucgccaccugcggcaucaucggccugguggccuuccuguuccugugcggcaagagcugcagccugacccugaagggcggcuacgagcugcagacccuggagcugaacauggagacccugaacaugaccaugccccugagcugcaccaagaacagcagccaccacuacaucagagugggcaacgagaccggccuggagcugacccugaccaacaccagcaucaucaaccacaaguucugcaaccugagcgacgcccacaagaagaaccuguacgaccacgcccugaugagcaucaucagcaccuuccaccugagcauccccaacuucaaccaguacgaggccaugagcugcgacuucaacggcggcaagaucagcgugcaguacaaccugagccacagcuacgccggcgacgccgccgagcacugcggcaccguggccaacggcgugcugcagaccuucaugagaauggccuggggcggcagauacaucgcccuggacagcggcaagggcaacugggacugcaucaugaccagcuaccaguaccugaucauccagaacaccaccugggaggaccacugccaguucagcagacccagccccaucggcuaccugggccugcugagccagagaaccagagacaucuacaucagcagaagacugcugggcaccuucaccuggacccugagcgacagcgagggcaacgagacccccggcggcuacugccugaccagauggaugcugaucgaggccgagcugaagugcuucggcaacaccgccguggccaagugcaacgagaagcacgacgaggaguucugcgacaugcugagacuguucgacuucaacaagcaggccaucagaagacugaaggccgaggcccagaugagcauccagcugaucaacaaggccgugaacgcccugaucaacgaccagcugaucaugaagaaccaccugagagacaucaugggcauccccuacugcaacuacagcaaguacugguaccugaaccacaccagcagcggcagaaccagccugcccaagugcuggcugaucagcaacggcagcuaccugaacgagacccaguucagcgacgacaucgagcagcaggccgacaacaugaucaccgagaugcugcagaaggaguacaucgagagacagggcaagaccccccugggccugguggacaucuucaucuucagcaccagcuucuaccugaucagcaucuuccugcaccugaucaagauccccacccacagacacaucgugggcaagcccugccccaagccccacagacugaaccacaugggcgugugcagcugcggccuguacaagcaccccggcgugcccaccaaguggaagagaugaggacuagucccuguucccagagcccacuuuuuuuucuuuuuuugaaauaaaauagccugucuuucagaucuaaaaaaaaaaaaaaaaaaaaaaaaaaaaaaaaaaaaaaaaaaaaaaaaaaaaaaaaaaaaaaaaaaaaaaaaaaaaaaaaaaaaaaaaaaaaaaaaaaaa

SEQ ID NO: 14282 - RNA, 1721 nt, Artificial Sequence
  mRNA product Design a-1 (A100) comprising derived and/or modified sequence from LASV(803213;Clade II)__AAF86703__GPC (opt4)
aggagagucccgcagucggcguccagcggcucugcuuguucgugugugugucguugcaggccuuauucaagcuuaccaugggccagaucaucaccuucuuccaggaggugccccacgugaucgaggaggugaugaacaucgugcugaucgcccugagccugcuggccauccugaagggcaucuacaacguggccaccugcggccuguucggccugaucagcuuccugcugcugugcggcagaagcugcagcgugaccuacaagggcguguacgagcugcagacccuggagcugaacauggccaaccugaacaugaccaugccccugagcugcaccaagaacaacagccaccacuacaucauggugggcaacgagaccggccuggagcugacccugaccaacaccagcaucaucaaccacaaguucugcaaccugagcgacgcccacaagaagaaccuguacgaccacgcccugaugagcaucaucagcaccuuccaccugagcauccccaacuucaaccaguacgaggccaugagcugcgacuucaacggcggcaagaucagcgugcaguacaaccugagccacagcuucgccguggacgccgccaaccacugcggcaccaucgccaacggcgugcugcagaccuucaugagaauggccuggggcggcagcuacaucgcccuggacagcggcaagggcaacugggacugcaucaugaccagcuaccaguaccugaucauccagaacaccaccugggaggaccacugccaguucagcagacccagccccaucggcuaccugggccugcugagccagagaaccagagacaucuacaucagcagaagacugcugggcaccuucaccuggacccugagcgacagcgagggcaacgaggcccccggcggcuacugccugaccagauggaugcugaucgaggccgagcugaagugcuucggcaacaccgccguggccaagugcaacgagaagcacgacgaggaguucugcgacaugcugagacuguucgacuucaacaagcaggccaucaagagacugaagaccgaggcccagaugagcauccagcugaucaacaaggccgugaacgcccugaucaacgaccagcugaucaugaagaaccaccugagagacaucaugggcauccccuacugcaacuacagcagauacugguaccugaaccacaccgugaccggcaagaccagccugcccagaugcuggcuggugagcaacggcagcuaccugaacgagacccacuucagcgacgacaucgagcagcaggccgacaacaugaucaccgagaugcugcagaaggaguacauggacagacagggcaagaccccccugggccugguggaccuguucguguucagcaccagcuucuaccugaucagcaucuuccugcaccuggugaagauccccacccacagacacaucgugggcaagcccugccccaagccccacagacugaaccacaugggcaucugcagcugcggccuguacaagcaccccggcgugcccgugaaguggaagagaugaggacuagucccuguucccagagcccacuuuuuuuucuuuuuuugaaauaaaauagccugucuuucagaucuaaaaaaaaaaaaaaaaaaaaaaaaaaaaaaaaaaaaaaaaaaaaaaaaaaaaaaaaaaaaaaaaaaaaaaaaaaaaaaaaaaaaaaaaaaaaaaaaaaaa

SEQ ID NO: 14283 - RNA, 1721 nt, Artificial Sequence
  mRNA product Design a-1 (A100) comprising derived and/or modified sequence from LASV(GA391;Clade III)__CAA36645__GPC (opt4)
aggagagucccgcagucggcguccagcggcucugcuuguucgugugugugucguugcaggccuuauucaagcuuaccaugggccagaucgugaccuucuuccaggaggugccccacgugaucgaggaggugaugaacaucgugcugaucgcccugagcauccuggccauccugaagggccuguacaacguggccaccugcggccugaucggccuggugaccuuccugcugcugagcggcagaagcugcagccugaucuacaagggcaccuacgagcugcagacccuggagcugaacauggagacccugaacaugaccaugccccugagcugcaccaagaacaacagccaccacuacaucagagugggcaacgagaccggccuggagcugacccugaccaacaccagcauccugaaccacaaguucugcaaccugagcgacgcccacaagagaaaccuguacgaccacagccugaugagcaucaucagcaccuuccaccugagcauccccaacuucaaccaguacgaggccaugagcugcgacuucaacggcggcaagaucaccgugcaguacaaccugagccacagcuucgccguggacgccgccggccacugcggcacccuggccaacggcgugcugcagaccuucaugagaauggccuggggcggcagcuacaucgcccuggacagcggcagaggcaacugggacugcaucaugaccagcuaccaguaccugaucauccagaacaccaccugggacgaccacugccaguucagcagacccagccccaucggcuaccugggccugcugagccagagaaccagagacaucuacaucagcagaagacugcugggcaccuucaccuggacccugagcgacagcgagggcaacgagacccccggcggcuacugccugaccagauggaugcugaucgaggccgagcugaagugcuucggcaacaccgccguggccaagugcaacgagaagcacgacgaggaguucugcgacaugcugagacuguucgacuucaacaagcaggccaucagaagacugaagaccgaggcccagaugagcauccagcugaucaacaaggccgugaacgcccugaucaacgaccagcugaucaugaagaaccaccugagagacaucaugggcauccccuacugcaacuacagcagauacugguaccugaaccacaccagcaccggcaagaccagccugcccagaugcuggcugaucagcaacggcagcuaccugaacgagaccaaguucagcgacgacaucgagcagcaggccgacaacaugaucaccgagaugcugcagaaggaguacaucgacagacagggcaagaccccccugggccugguggaccuguucguguucagcaccagcuucuaccugaucagcaucuuccugcaccuggugaagauccccacccacagacacaucgugggcaagcccugccccaagccccacagacugaaccacaugggcaucugcagcugcggccuguacaagcagcccggcgugcccgugagauggaagagaugaggacuagucccuguucccagagcccacuuuuuuuucuuuuuuugaaauaaaauagccugucuuucagaucuaaaaaaaaaaaaaaaaaaaaaaaaaaaaaaaaaaaaaaaaaaaaaaaaaaaaaaaaaaaaaaaaaaaaaaaaaaaaaaaaaaaaaaaaaaaaaaaaaaaa

SEQ ID NO: 14284 - RNA, 1724 nt, Artificial Sequence
  mRNA product Design a-1 (A100) comprising derived and/or modified sequence from LASV(AV;Clade V)__CCA30314__GPC (opt4)
aggagagucccgcagucggcguccagcggcucugcuuguucgugugugugucguugcaggccuuauucaagcuuaccaugggccagaucgugaccuucuuccaggaggugccccacgugaucgaggaggugaugaacaucgugcugaucgcccugagcauccuggccgugcugaagggccuguacaacaucgccaccugcggccugaucggccugaucaccuuccugcugcugugcggcagaagcugcagcagcaaccuguacaagggcguguacgagcugcagagccuggaccugaacauggagacccugaacaugaccaugccccugagcugcaccaagaacaacagccaccacuacaucagagugggcaacgacaccggccuggagcugacccugaccaacaccagcauccugaaccacaaguucugcaaccugagcgacgcccacaagaaggaccuguacgaccacgcccugaugagcaucaucagcaccuuccaccugagcauccccaacuucaaccaguacgaggccaugagcugcgacuucaacggcggcaagaucagcgugcaguacaaccugagccacagcuacgccaucgacgccgccaaccacugcggcaccguggccaacggcauccugcagaccuucaugagaauggccuggggcggcagcuacaucgcccuggacagcggcagaggcaacugggacugcaucaugaccagcuaccaguaccugaucauccagaacaccaccugggagaaccacugccaguucagcagacccagccccaucggcuaccugggccugcugagccagagaaccagagacaucuacaucagcagaagacugcugggcaccuucaccuggacccugagcgacagcgagggcaacgccacccccggcggcuacugccugaccagauggaugcugaucgaggccgagcugaagugcuucggcaacaccgccguggccaagugcaacgagaagcacgacgaggaguucugcgacaugcugagacuguucgacuucaacaagcaggccaucagcagacugaagagcgaggcccagaugagcauccagcugaucaacaaggccgugaacgcccugaucaacgaccagcugaucaugaagaaccaccugagagacaucaugggcauccccuacugcaacuacagcaaguacugguaccugaaccacaccaucaccggcaagaccagccugcccaagugcuggcuggugagcaacggcagcuaccugaacgagacccacuucagcgacgacaucgagcagcaggccgacaacaugaucaccgagaugcugcagaaggaguacauggagagacagggcaagaccccccugggccugguggaccuguucguguucagcaccagcuucuaccugaucagcaucuuccugagacuggugaagauccccacccacagacacaucgugggcaagcccugccccaagccccacagacugaaccacaugggcaucugcagcugcggccuguacaagcagcccggcgugcccgugagauggaagagaugaggacuagucccuguucccagagcccacuuuuuuuucuuuuuuugaaauaaaauagccugucuuucagaucuaaaaaaaaaaaaaaaaaaaaaaaaaaaaaaaaaaaaaaaaaaaaaaaaaaaaaaaaaaaaaaaaaaaaaaaaaaaaaaaaaaaaaaaaaaaaaaaaaaaa

SEQ ID NO: 14285 - RNA, 1721 nt, Artificial Sequence
  mRNA product Design a-1 (A100) comprising derived and/or modified sequence from LASV(Togo/2016/7082;Clade VI)__AMR44577__GPC (opt4)
aggagagucccgcagucggcguccagcggcucugcuuguucgugugugugucguugcaggccuuauucaagcuuaccaugggccagaucaucaccuucuuccaggaggugccccacgugaucgaggaggugaugaacaucgugcugaucgcccugagccugcuggccauccugaagggcguguacaacguggccaccugcggcaucaucggccuggugaccuuccuguuccugugcggcagaagcugcagccugaucuacaagggcagcuacgagcugcagacccuggagcugaacauggagacccugaacaugaccaugccccugagcugcaccaagaacagcagccaccacuacaucagagugggcaacgagaccggccuggagcugacccugaccaacaccagcaucaucaaccacaaguucugcaaccugagcgacgcccacaagagaaaccuguacgaccacgcccugaugagcauccugagcaccuuccaccugagcauccccaacuucaaccaguacgaggccaugagcugcgacuucaacggcggcaagaucagcgugcaguacaaccugagccacgccuacgccguggacgccgccgagcacugcggcaccguggccaacggcgugcugcagaccuucaugagaauggccuggggcggcagcuacaucgcccuggacagcggcagaggcaacugggacugcaucaugaccagcuaccaguaccugaucauccagaacaccaccugggaggaccacugccaguucagcagacccagccccaucggcuaccugggccugcugagccagagaaccagagacaucuacaucagcagaagacugcugggcaccuucaccuggacccugagcgacagcgagggcaacgagacccccggcggcuacugccugaccagauggaugcugaucgaggccgagcugaagugcuucggcaacaccgccguggccaagugcaacgagaagcacgacgaggaguucugcgacaugcugagacuguucgacuucaacaagcaggccauccagagacugaagagcgaggcccagaugagcauccagcugaucaacaaggccgugaacgcccugaucaacgaccagcugaucaugaagaaccaccugagagacaugaugggcauccccuacugcaacuacagcaaguacugguaccugaaccacaccagcagcggcagaaccagccugcccaagugcuggcuggugagcaacggcagcuaccugaacgagacccacuucagcgacgacaucgagcagcaggccgacaacaugaucaccgagaugcugcagaaggaguacaucgacagacagggcaagaccccccugggccugguggaccuguucguguucagcaccagcuucuaccugaucagcaucuuccugcaccugaucaagauccccacccacagacacaucgugggcaagcccugccccaagccccacagacugaaccacaugggcaucugcagcugcggccuguacaagcagcccggcgugcccaccagauggaagagaugaggacuagucccuguucccagagcccacuuuuuuuucuuuuuuugaaauaaaauagccugucuuucagaucuaaaaaaaaaaaaaaaaaaaaaaaaaaaaaaaaaaaaaaaaaaaaaaaaaaaaaaaaaaaaaaaaaaaaaaaaaaaaaaaaaaaaaaaaaaaaaaaaaaaa

SEQ ID NO: 14286 - RNA, 1721 nt, Artificial Sequence
  mRNA product Design a-1 (A100) comprising derived and/or modified sequence from LASV(KAK-428;Clade n.d. (VII))__ANH09740__GPC (opt4)
aggagagucccgcagucggcguccagcggcucugcuuguucgugugugugucguugcaggccuuauucaagcuuaccaugggccagaucgugaccuucuuccaggaggugccccacgugaucgaggaggugaugaacaucgugcugaucgcccugagccugcuggccauccugaagggccuguacaacuucgccaccugcggcgugaucggccugaucaccuuccugcugcugugcggcagaagcugcagcgccaccuacaagggccaguacgagcugcagacccuggagcugaacauggagagccugaacaugaccaugccccugagcugcaccaagaacaacagccaccacuacaucagagccggcaacaacaccggccuggagcugacccugaccaacaccagcaucaucagccacaaguucugcaaccugagcgacgcccacaagaagaaccuguacgaccacacccugaugagcaucaucaccaccuuccaccugagcauccccaacuucaaccaguacgaggccaugagcugcgacuucaacggcggcaagaucagcauccaguacaaccugagccacagcuacgccggcgacgccgcccagcacugcggcaccguggccaacggcgugcugcagaccuucaugagaauggccuggggcggcagcuaccuggcccuggacagcggcagaagaggcugggacugcaucaucagcagcuaccaguaccugaucauccagaacaccaccugggacgaccacugccaguucagcagacccagccccaucggcuaccugggcuucgugagccagaagaccagagacaucuacaucagcagaagacugcugggcaccuucaccuggacccugagcgacagcgagggccacgacaugcccggcggcuacugccugaccagauggaugcugaucgaggccgaccugaagugcuucggcaacaccgccguggccaagugcaacgagaagcacgacgaggaguucugcgacauguggagacuguucgacuucaacaagcaggccauccagagacugaaggccgaggcccagaugaacauccagcugaucaacaaggccgugaacgcccugaucaacgaccagcugaugaugaagaaccaccugagagacaucaugggcauccccuacugcaacuacagcaaguucugguaccugaacaacaccaccaccggcagaaccagccugcccagaugcuggcugaucagcaacggcagcuaccugaacgagacccacuucagcgacgacaucgagcagcaggccgacaacaugaucaccgagaugcugcagaaggaguacauggacagacagggcaagaccccccugggccugguggaccuguucguguucagcaccagcuucuaccugaucaccaucuuccugcaccuggugaagauccccacccacagacacaucgugggcaagcccugccccaagccccacagacugaaccacaugggcaucugcagcugcggccuguacaagcagcccggcgugcccgugagauggaagagaugaggacuagucccuguucccagagcccacuuuuuuuucuuuuuuugaaauaaaauagccugucuuucagaucuaaaaaaaaaaaaaaaaaaaaaaaaaaaaaaaaaaaaaaaaaaaaaaaaaaaaaaaaaaaaaaaaaaaaaaaaaaaaaaaaaaaaaaaaaaaaaaaaaaaa

SEQ ID NO: 14287 - RNA, 1721 nt, Artificial Sequence; identical to SEQ ID NO: 14281
  mRNA product Design a-1 (A100) comprising derived and/or modified sequence from LASV(Pinneo-NIG-1969;Clade I)__AIT17836__GPC (opt4)

SEQ ID NO: 14288 - RNA, 1721 nt, Artificial Sequence
  mRNA product Design a-1 (A100) comprising derived and/or modified sequence from LASV(ISTH0009-NIG-2011;Clade II)__AIT17404__GPC (opt4)
aggagagucccgcagucggcguccagcggcucugcuuguucgugugugugucguugcaggccuuauucaagcuuaccaugggccagaucaucaccuucuuccaggaggugccccacgugaucgaggaggugaugaacaucgugcugaucgcccugagccugcuggccauccugaagggcaucuacaacguggccaccugcggccuguucggccuggugagcuuccugcugcugugcggcagaagcugcagcaccaccuacaagggcguguacgagcugcagacccuggagcuggacauggccagccugaacaugaccaugccccugagcugcaccaagaacaacagccaccacuacaucauggugggcaacgagaccggccuggagcugacccugaccaacaccagcaucaucaaccacaaguucugcaaccugagcgacgcccacaagaagaaccuguacgaccacgcccugaugagcaucaucagcaccuuccaccugagcauccccaacuucaaccaguacgaggccaugagcugcgacuucaacggcggcaagaucagcgugcaguacaaccugagccacgccuacgccguggacgccgccaaccacugcggcaccaucgccaacggcgugcugcagaccuucaugagaauggccuggggcggcagcuacaucgcccuggacagcggcaagggcagcugggacugcaucaugaccagcuaccaguaccugaucauccagaacaccaccugggaggaccacugccaguucagcagacccagccccaucggcuaccugggccugcugagccagagaaccagagacaucuacaucagcagaagacugcugggcaccuucaccuggacccugagcgacagcgagggcaacgagacccccggcggcuacugccugaccagauggaugcugaucgaggccgagcugaagugcuucggcaacaccgccguggccaagugcaacgagaagcacgacgaggaguucugcgacaugcugagacuguucgacuucaacaagcaggccaucagaagacugaagaccgaggcccagaugagcauccagcugaucaacaaggccgugaacgcccugaucaacgaccagcugaucaugaagaaccaccugagagacaucaugggcauccccuacugcaacuacagcaaguacugguaccugaaccacaccgugaccggcaagaccagccugcccagaugcuggcuggugagcaacggcagcuaccugaacgagacccacuucagcgacgacaucgagcagcaggccgacaacaugaucaccgagcugcugcagaaggaguacauggacagacagggcaagaccccccugggccugguggaccuguucguguucagcaccagcuucuaccugaucagcaucuuccugcaccugaucaagauccccacccacagacacaucaccggcaagcccugccccaagccccacagacugaaccacaugggcaucugcagcugcggccuguacaagcaccccggcgugcccgugaaguggaagagaugaggacuagucccuguucccagagcccacuuuuuuuucuuuuuuugaaauaaaauagccugucuuucagaucuaaaaaaaaaaaaaaaaaaaaaaaaaaaaaaaaaaaaaaaaaaaaaaaaaaaaaaaaaaaaaaaaaaaaaaaaaaaaaaaaaaaaaaaaaaaaaaaaaaaa

SEQ ID NO: 14289 - RNA, 1721 nt, Artificial Sequence
  mRNA product Design a-1 (A100) comprising derived and/or modified sequence from LASV(ISTH2010-NIG-2012;Clade II)__AIT17482__GPC (opt4)
aggagagucccgcagucggcguccagcggcucugcuuguucgugugugugucguugcaggccuuauucaagcuuaccaugggccagaucaucaccuucuuccaggaggugccccacgugaucgaggaggugaugaacaucgugcugaucgcccugagccugcuggccauccugaagggcaucuacaacguggccaccugcggccuguucggccuggugagcuuccugcugcugugcggcagaagcugcagcaccaccuacaagggcguguacgagcugcagacccuggagcuggacauggccagccugaacaugaccaugccccugagcugcaccaagaacaacagccaccacuacaucauggugggcaacgagaccggccuggagcugacccugaccaacaccagcaucaucaaccacaaguucugcaaccugagcgacgcccacaagaagaaccuguacgaccacgcccugaugagcaucaucagcaccuuccaccugagcauccccaacuucaaccaguacgaggccaugagcugcgacuucaacggcggcaagaucagcgugcaguacaaccugagccacgccuacgccguggacgccgccaaccacugcggcaccaucgccaacggcgugcugcagaccuucaugagaauggccuggggcggcagcuacaucgcccuggacagcggcaagggcagcugggacugcaucaugaccagcuaccaguaccugaucauccagaacaucaccugggaggaccacugccaguucagcagacccagccccaucggcuaccugggccugcugagccagagaaccagagacaucuacaucagcagaagacugcugggcaccuucaccuggacccugagcgacagcgagggcaacgagacccccggcggcuacugccugaccagauggaugcugaucgaggccgagcugaagugcuucggcaacaccgccguggccaagugcaacgagaagcacgacgaggaguucugcgacaugcugagacuguucgacuucaacaagcaggccaucagaagacugaagaccgaggcccagaugagcauccagcugaucaacaaggccgugaacgcccugaucaacgaccagcugaucaugaagaaccaccugagagacaucaugggcauccccuacugcaacuacagcaaguacugguaccugaaccacaccgugaccggcaagaccagccugcccagaugcuggcuggugagcaacggcagcuaccugaacgagacccacuucagcgacgacaucgagcagcaggccgacaacaugaucaccgagcugcugcagaaggaguacaucgacagacagggcaagaccccccugggccugguggaccuguucguguucagcaccagcuucuaccugaucagcaucuuccugcaccuggugaagauccccacccacagacacguggugggcaagcccugccccaagccccacagacugaaccacaugggcaucugcagcugcggccuguacaagcaccccggcgugcccgugaaguggaagagaugaggacuagucccuguucccagagcccacuuuuuuuucuuuuuuugaaauaaaauagccugucuuucagaucuaaaaaaaaaaaaaaaaaaaaaaaaaaaaaaaaaaaaaaaaaaaaaaaaaaaaaaaaaaaaaaaaaaaaaaaaaaaaaaaaaaaaaaaaaaaaaaaaaaaa

SEQ ID NO: 14290 - RNA, 1721 nt, Artificial Sequence
  mRNA product Design a-1 (A100) comprising derived and/or modified sequence from LASV(Lassa virus/H.sapiens-wt/NGA/2015/ISTH_0543;Clade II)__AVO03639__GPC (opt4)
aggagagucccgcagucggcguccagcggcucugcuuguucgugugugugucguugcaggccuuauucaagcuuaccaugggccagaucaucaccuucuuccaggaggugccccacgugaucgaggaggugaugaacaucgugcugaucgcccugagccugcuggccauccugaagggcaucuacaacguggccaccugcggccuguucggccuggugagcuuccugcugcugugcggcagaagcugcagcaccaccuacaagggcguguacgagcugcagacccuggagcuggacauggccaaccugaacaugaccaugccccugagcugcaccaagaacaacagccaccacuacaucauggugggcaacgagaccggccuggagcugacccugaccaacaccagcaucaucaaccacaaguucugcaaccugagcgacgcccacaagaagaaccuguacgaccacgcccugaugagcaucaucagcaccuuccaccugagcauccccaacuucaaccaguacgaggccaugagcugcgacuucaacggcggcaagaucagcgugcaguacaaccugagccacaccuacgccguggacgccgccaaccacugcggcaccaucgccaacggcgugcugcagaccuucaugagaauggccuggggcggcagcuacaucgcccuggacagcggcaagggcagcugggacugcaucaugaccagcuaccaguaccuggugauccagaacaccaccugggaggaccacugccaguucagcagacccagccccaucggcuaccugggccugcugagccagagaaccagagacaucuacaucagcagaagacugcugggcaccuucaccuggacccugagcgacagcgagggcaacgagacccccggcggcuacugccugaccagauggaugcugaucgaggccgagcugaagugcuucggcaacaccgccguggccaagugcaacgagaagcacgacgaggaguucugcgacaugcugagacuguucgacuucaacaagcaggccaucagaagacugaagaccgaggcccagaugagcauccagcugaucaacaaggccgugaacgcccugaucaacgaccagcugaucaugaagaaccaccugagagacaucaugggcauccccuacugcaacuacagcaaguacugguaccugaaccacaccgugaccggcaagaccagccugcccagaugcuggcuggugagcaacggcagcuaccugaacgagacccacuucagcgacgacaucgagcagcaggccgacaacaugaucaccgagcugcugcagaaggaguacaucgacagacagggcaagaccccccugggccugguggaccuguucguguucagcaccagcuucuaccugaucagcaucuuccugcaccuggugaagauccccacccacagacacaucaccggcaagcccugccccaagccccacagacugaaccacaugggcaucugcagcugcggccuguacaagcaccccggcgugcccgugaaguggaagagaugaggacuagucccuguucccagagcccacuuuuuuuucuuuuuuugaaauaaaauagccugucuuucagaucuaaaaaaaaaaaaaaaaaaaaaaaaaaaaaaaaaaaaaaaaaaaaaaaaaaaaaaaaaaaaaaaaaaaaaaaaaaaaaaaaaaaaaaaaaaaaaaaaaaaa

SEQ ID NO: 14291 - RNA, 1721 nt, Artificial Sequence
  mRNA product Design a-1 (A100) comprising derived and/or modified sequence from LASV(Lassa virus/H.sapiens-wt/NGA/2016/ISTH_0009;Clade II)__AVO03571__GPC (opt4)
aggagagucccgcagucggcguccagcggcucugcuuguucgugugugugucguugcaggccuuauucaagcuuaccaugggccagaucaucaccuucuuccaggaggugccccacgugaucgaggaggugaugaacaucgugcugaucgcccugagccugcuggccauccugaagggcaucuacaacguggccaccugcggccugcugggccuggugagcuuccugcugcugugcggcagaagcugcagcaccaccuacaagggcguguacgagcugcagacccuggagcuggacauggccagccugaacaugaccaugccccugagcugcaccaagaacaacagccaccacuacaucauggugggcaacgagaccggccuggagcugacccugaccaacaccagcaucaucaaccacaaguucugcaaccugagcgacgcccacaagaagaaccuguacgaccacgcccugaugagcaucaucagcaccuuccaccugagcauccccaacuucaaccaguacgaggccaugagcugcgacuucaacggcggcagaaucagcgugcaguacaaccugagccacagcuacgccguggacgccgccaaccacugcggcaccaucgccaacggcgugcugcagaccuucaugagaauggccuggggcggcagcuacaucgcccuggacagcggcaagggcagcugggacugcaucaugaccagcuaccaguaccugaucauccagaacaccaccugggaggaccacugccaguucagcagacccagccccaucggcuaccugggccugcugagccagagaaccagagacaucuacaucagcagaagacugcugggcaccuucaccuggacccugagcgacagcgagggcaacgagacccccggcggcuacugccugaccagauggaugcugaucgaggccgagcugaagugcuucggcaacaccgccguggccaagugcaacgagaagcacgacgaggaguucugcgacaugcugagacuguucgacuucaacaagcaggccaucagaagacugaagaccgaggcccagaugagcauccagcugaucaacaaggccgugaacgcccugaucaacgaccagcugaucaugaagaaccaccugagagacaucaugggcauccccuacugcaacuacagcaaguacugguaccugaaccacaccgugaccggcaagaccagccugcccagaugcuggcuggugagcaacggcagcuaccugaacgagacccacuucagcgacgacaucgagcagcaggccgacaacaugaucaccgagcugcugcagaaggaguacaucgacagacagggcaagaccccccugggccugguggaccuguucguguucagcaccagcuucuaccugaucagcaucuuccugcaccuggugaagauccccacccacagacacaucaccggcaagcccugccccaagccccacagacugaaccacaugggcaucugcagcugcggccuguacaaccaccccggcgugcccgugaaguggaagagaugaggacuagucccuguucccagagcccacuuuuuuuucuuuuuuugaaauaaaauagccugucuuucagaucuaaaaaaaaaaaaaaaaaaaaaaaaaaaaaaaaaaaaaaaaaaaaaaaaaaaaaaaaaaaaaaaaaaaaaaaaaaaaaaaaaaaaaaaaaaaaaaaaaaaa

SEQ ID NO: 14292 - RNA, 1721 nt, Artificial Sequence
  mRNA product Design a-1 (A100) comprising derived and/or modified sequence from LASV(Lassa virus/H.sapiens-wt/NGA/2016/ISTH_0017;Clade II)__AVO03567__GPC (opt4)
aggagagucccgcagucggcguccagcggcucugcuuguucgugugugugucguugcaggccuuauucaagcuuaccaugggccagaucaucaccuucuuccaggaggugccccacgugaucgaggaggugaugaacaucgugcugaucgcccugagccugcuggccauccugaagggcaucuacaacguggccaccugcggccuguucggccuggugagcuuccugcugcugugcggcagaagcugcagcaccaccuacaagggcguguacgagcugcagacccuggagcuggacauggccagccugaacaugaccaugccccugagcugcaccaagaacaacagccaccacuacaucauggugggcaacgagaccggccuggagcugacccugaccaacaccagcaucaucaaccacaaguucugcaaccugagcgacgcccacaagaagaaccuguacgaccacgcccugaugagcaucaucagcaccuuccaccugagcauccccaacuucaaccaguacgaggccaugagcugcgacuucaacggcggcaagaucagcgugcaguacaaccugagccacaccuacgccaucgacgccgccaaccacugcggcaccaucgccaacggcgugcugcagaccuucaugagaauggccuggggcggcagcuacaucgcccuggacagcggcaagggcagcugggacugcaucaugaccagcuaccaguaccugaucauccagaacaccaccugggaggaccacugccaguucagcagacccagccccaucggcuaccugggccugcugagccagagaaccagagacaucuacaucagcagaagacugcugggcaccuucaccuggacccugagcgacagcgagggcaacgagacccccggcggcuacugccugaccagauggaugcugaucgaggccgagcugaagugcuucggcaacaccgccguggccaagugcaacgagaagcacgacgaggaguucugcgacaugcugagacuguucgacuucaacaagcaggccaucagaagacugaagaccgaggcccagaugagcauccagcugaucaacaaggccgugaacgcccugaucaacgaccagcugaucaugaagaaccaccugagagacaucaugggcauccccuacugcaacuacagcaaguacugguaccugaaccacaccgugaccggcaagaccagccugcccagaugcuggcuggugagcaacggcagcuaccugaacgagacccacuucagcgacgacaucgagcagcaggccgacaacaugaucaccgagcugcugcagaaggaguacauggacagacagggcaagaccccccugggccugguggaccuguucguguucagcaccagcuucuaccugaucagcaucuuccugcaccuggugagaauccccacccacagacacgugaucggcaagcccugccccaagccccacagacugaaccacaugggcaucugcagcugcggccuguacaagcaccccggcgugcccgugaaguggaagagaugaggacuagucccuguucccagagcccacuuuuuuuucuuuuuuugaaauaaaauagccugucuuucagaucuaaaaaaaaaaaaaaaaaaaaaaaaaaaaaaaaaaaaaaaaaaaaaaaaaaaaaaaaaaaaaaaaaaaaaaaaaaaaaaaaaaaaaaaaaaaaaaaaaaaa

SEQ ID NO: 14293 - RNA, 1721 nt, Artificial Sequence
  mRNA product Design a-1 (A100) comprising derived and/or modified sequence from LASV(Lassa virus/H.sapiens-wt/NGA/2018/ISTH_0959;Clade II)__AVV65099__GPC (opt4)
aggagagucccgcagucggcguccagcggcucugcuuguucgugugugugucguugcaggccuuauucaagcuuaccaugggccagaucaucaccuucuuccaggaggugccccacgugaucgaggaggugaugaacaucgugcugaucgcccugagccugcuggccauccugaagggcaucuacaacguggugaccugcggccuguucggccuggugagcuuccugcugcugugcggcagaagcugcagcaccaccuacaagggcguguacgagcugcagacccuggagcuggacauggccagccugaacaugaccaugccccugagcugcaccaagaacaacagccaccacuacaucauggugggcaacgagaccggccuggagcugacccugaccaacaccagcaucaucaaccacaaguucugcaaccugagcgacgcccacaagaagaaccuguacgaccacgcccugaugagcaucaucagcaccuuccaccugagcauccccaacuucaaccaguacgaggccaugagcugcgacuucaacggcggcaagaucagcgugcaguacaaccugagccacgccuacgccaucgacgccgccaaccacugcggcaccaucgccaacggcgugcugcagaccuucaugagaauggccuggggcggcagcuacaucgcccuggacagcggcaagggcagcugggacugcaucaugaccagcuaccaguaccugaucauccagaacaccaccugggaggaccacugccaguucagcagacccagccccaucggcuaccugggccugcugagccagagaaccagagacaucuacaucagcagaagacugcugggcaccuucaccuggacccugagcgacagcgagggcaacgagacccccggcggcuacugccugaccagauggaugcugaucgaggccgagcugaagugcuucggcaacaccgccguggccaagugcaacgagaagcacgacgaggaguucugcgacaugcugagacuguucgacuucaacaagcaggccaucagaagacugaagaccgaggcccagaugagcauccagcugaucaacaaggccgugaacgcccugaucaacgaccagcugaucaugaagaaccaccugagagacaucaugggcauccccuacugcaacuacagcaaguacugguaccugaaccacaccgugaccggcaagaccagccugcccagaugcuggcuggugagcaacggcagcuaccugaacgagacccacuucagcgacgacaucgagcagcaggccgacaacaugaucaccgagcugcugcagaaggaguacaucgacagacagggcaagaccccccugggccugguggaccuguucguguucagcaccagcuucuaccugaucagcaucuuccugcaccuggugaagauccccacccacagacacgugaucggcaagcccugccccaagccccacagacugaaccacaugggcaucugcagcugcggccuguacaagcaccccggcgugcccgugaaguggaagagaugaggacuagucccuguucccagagcccacuuuuuuuucuuuuuuugaaauaaaauagccugucuuucagaucuaaaaaaaaaaaaaaaaaaaaaaaaaaaaaaaaaaaaaaaaaaaaaaaaaaaaaaaaaaaaaaaaaaaaaaaaaaaaaaaaaaaaaaaaaaaaaaaaaaaa

SEQ ID NO: 14294 - RNA, 1721 nt, Artificial Sequence
  mRNA product Design a-1 (A100) comprising derived and/or modified sequence from LASV(LASV003-NIG-2008;Clade II)__AIT17580__GPC (opt4)
aggagagucccgcagucggcguccagcggcucugcuuguucgugugugugucguugcaggccuuauucaagcuuaccaugggccagaucaucaccuucuuccaggaggugccccacgugaucgaggaggugaugaacaucgugcugaucgcccugagccugcuggccauccugaagggcaucuacaacguggccaccugcggccuguucggccuggugagcuuccugcugcugugcggcagaagcugcagcaccaccuacaagggcguguacgagcugcagacccuggagcuggacauggccagccugaacaugaccaugccccugagcugcaccaagaacaacagccaccacuacaucauggugggcaacgagaccggccuggagcugacccugaccaacaccagcaucaucaaccacaaguucugcaaccugagcgacgcccacaagaagaaccuguacgaccacgcccugaugagcaucaucagcaccuuccaccugagcauccccaacuucaaccaguacgaggccaugagcugcgacuucaacggcggcaagaucagcgugcaguacaaccugagccacaccuacgccguggacgccgccaaccacugcggcaccaucgccaacggcgugcugcagaccuucaugagaauggccuggggcggcagcuacaucgcccuggacagcggcaagggcagcugggacugcaucaugaccagcuaccaguaccugaucauccagaacaccaccugggaggaccacugccaguucagcagacccagccccaucggcuaccugggccugcugagccagagaaccagagacaucuacaucagcagaagacugcugggcaccuucaccuggacccugagcgacagcgagagcaacgagacccccggcggcuacugccugaccagauggaugcugaucgaggccgagcugaagugcuucggcaacaccgccguggccaagugcaacgagaagcacgacgaggaguucugcgacaugcugagacuguucgacuucaacaagcaggccaucagaagacugaaggccgaggcccagaugagcauccagcugaucaacaaggccgugaacgcccugaucaacgaccagcugaucaugaagaaccaccugagagacaucaugggcauccccuacugcaacuacagcaaguacugguaccugaaccacaccgugaccggcagaaccagccugcccagaugcuggcuggugagcaacggcagcuaccugaacgagacccacuucagcgacgacaucgagcagcaggccgacaacaugaucaccgagcugcugcagaaggaguacauggacagacagggcaagaccccccugggccugguggaccuguucguguucagcaccagcuucuaccugaucagcaucuuccugcaccuggugaagauccccacccacagacacgugaucggcaagcccugccccaagccccacagacugaaccacaugggcaucugcagcugcggccuguacaagcaccccggcgugcccgugaaguggaagagaugaggacuagucccuguucccagagcccacuuuuuuuucuuuuuuugaaauaaaauagccugucuuucagaucuaaaaaaaaaaaaaaaaaaaaaaaaaaaaaaaaaaaaaaaaaaaaaaaaaaaaaaaaaaaaaaaaaaaaaaaaaaaaaaaaaaaaaaaaaaaaaaaaaaaa

SEQ ID NO: 14295 - RNA, 1721 nt, Artificial Sequence
  mRNA product Design a-1 (A100) comprising derived and/or modified sequence from LASV(LASV035-NIG-2009;Clade II)__AIT17588__GPC (opt4)
aggagagucccgcagucggcguccagcggcucugcuuguucgugugugugucguugcaggccuuauucaagcuuaccaugggccagaucaucaccuucuuccaggaggugccccacgugaucgaggaggugaugaacaucgugcugaucgcccugagccugcuggccauccugaagggcaucuacaacguggccaccugcggccuguucggccuggugagcuuccugcugcugugcggcagaagcugcagcaccaccuacaagggcguguacgagcugcagacccuggagcuggacauggccagccugaacaugaccaugccccugagcugcaccaagaacaacagccaccacuacaucauggugggcaacgagaccggccuggagcugacccugaccaacaccagcaucaucaaccacaaguucugcaaccugagcgacgcccacaagaagaaccuguacgaccacgcccugaugagcaucaucagcaccuuccaccugagcauccccaacuucaaccaguacgaggccaugagcugcgacuucaacggcggcaagaucagcgugcaguacaaccugagccacgccuacgccguggacgccgccaaccacugcggcaccaucgccaacggcgugcugcagaccuucaugagaauggccuggggcggcagcuacaucgcccuggacagcggcaagggcagcugggacugcaucaugaccagcuaccaguaccugaucauccagaacaccaccugggaggaccacugccaguucagcagacccagccccaucggcuaccugggccugcugagccagagaaccagagacaucuacaucagcagaagacugcugggcaccuucaccuggacccugagcgacagcgagggcaacgagacccccggcggcuacugccugaccagauggaugcugaucgaggccgagcugaagugcuucggcaacaccgccguggccaagugcaacgagaagcacgacgaggaguucugcgacaugcugagacuguucgacuucaacaagcaggccaucagaagacugaaggccgaggcccagaugagcauccagcugaucaacaaggccgugaacgcccugaucaacgaccagcugaucaugaagaaccaccugagagacaucaugggcauccccuacugcaacuacagcaaguacugguaccugaaccacaccgugaccggcaagaccagccugcccagaugcuggcuggugagcaacggcagcuaccugaacgagacccacuucagcgacgacaucgagcagcaggccgacaacaugaucaccgagcugcugcagaaggaguacaucgacagacagggcaagaccccccugggccugguggaccuguucguguucagcaccagcuucuaccugaucagcaucuuccugcaccuggugaagauccccacccacagacacgugaucggcaagcccugccccaagccccacagacugaaccacaugggcaucugcagcugcggccuguacaagcaccccggcgugcccgugaaguggaagagaugaggacuagucccuguucccagagcccacuuuuuuuucuuuuuuugaaauaaaauagccugucuuucagaucuaaaaaaaaaaaaaaaaaaaaaaaaaaaaaaaaaaaaaaaaaaaaaaaaaaaaaaaaaaaaaaaaaaaaaaaaaaaaaaaaaaaaaaaaaaaaaaaaaaaa

SEQ ID NO: 14296 - RNA, 1721 nt, Artificial Sequence
  mRNA product Design a-1 (A100) comprising derived and/or modified sequence from LASV(LASV1000-NIG-2009;Clade II)__AIT17782__GPC (opt4)
aggagagucccgcagucggcguccagcggcucugcuuguucgugugugugucguugcaggccuuauucaagcuuaccaugggccagaucaucaccuucuuccaggaggugccccacgugaucgaggaggugaugaacaucgugcugaucgcccugagccugcuggccauccugaagggcaucuacaacguggccaccugcggccuguucggccuggugagcuuccugcugcugugcggcagaagcugcagcaccaccuacaagggcguguacgagcugcagacccuggagcuggacauggccagccugaacaugaccaugccccugagcugcaccaagaacaacagccaccacuacaucauggugggcaacgagaccggccuggagcugacccugaccaacaccagcaucaucaaccacaaguucugcaaccugagcgacgcccacaagaagaaccuguacgaccacgcccugaugagcaucaucagcaccuuccaccugagcauccccaacuucaaccaguacgaggccaugagcugcgacuucaacggcggcaagaucagcgugcaguacaaccugagccacaccuacgccguggacgccgccaaccacugcggcaccaucgccaacggcgugcugcagaccuucaugagaauggccuggggcggcagcuacaucgcccuggacagcggcaagggcagcugggacugcaucaugaccagcuaccaguaccugaucauccagaacaccaccugggaggaccacugccaguucagcagacccagccccaucggcuaccugggccugcugagccagagaaccagagacaucuacaucagcagaagacugcugggcaccuucaccuggacccugagcgacagcgagggcaacgagacccccggcggcuacugccugaccagauggaugcugaucgaggccgagcugaagugcuucggcaacaccgccguggccaagugcaacgagaagcacgacgaggaguucugcgacaugcugagacuguucgacuucaacaagcaggccaucaagagacugaagaccgaggcccagaugagcauccagcugaucaacaaggccgugaacgcccugaucaacgaccagcugaucaugaagaaccaccugagagacaucaugggcauccccuacugcaacuacagcaaguacugguaccugaaccacaccgugaccggcaagaccagccugcccagaugcuggcuggugagcaacggcagcuaccugaacgagacccacuucagcgacgacaucgagcagcaggccgacaacaugaucaccgagcugcugcagaaggaguacaucgacagacagggcaagaccccccugggccugguggaccuguucguguucagcaccagcuucuaccugaucagcaucuuccugcaccuggugaagauccccacccacagacacguggugggcaagcccugccccaagccccacagacugaaccacaugggcaucugcagcugcggccuguacaagcaccccggcgugcccgugaaguggaagagaugaggacuagucccuguucccagagcccacuuuuuuuucuuuuuuugaaauaaaauagccugucuuucagaucuaaaaaaaaaaaaaaaaaaaaaaaaaaaaaaaaaaaaaaaaaaaaaaaaaaaaaaaaaaaaaaaaaaaaaaaaaaaaaaaaaaaaaaaaaaaaaaaaaaaa

SEQ ID NO: 14297 - RNA, 1721 nt, Artificial Sequence
  mRNA product Design a-1 (A100) comprising derived and/or modified sequence from LASV(LASV221-NIG-2010;Clade II)__AIT17624__GPC (opt4)
aggagagucccgcagucggcguccagcggcucugcuuguucgugugugugucguugcaggccuuauucaagcuuaccaugggccagaucaucaccuucuuccaggaggugccccacgugaucgaggaggugaugaacaucgugcugaucgcccugagccugcuggccauccugaagggcaucuacaacguggccaccugcggccuguucggccuggugagcuuccugcugcugugcggcagaagcugcagcaccaccuacaagggcguguacgagcugcagacccuggagcuggacauggccagccugaacaugaccaugccccugagcugcaccaagaacaacagccaccacuacaucauggugggcaacgagaccggccuggagcugacccugaccaacaccagcaucaucaaccacaaguucugcaaccugagcgacgcccacaagaagaaccuguacgaccacgcccugaugagcaucaucagcaccuuccaccugagcauccccaacuucaaccaguacgaggccaugagcugcgacuucaacggcggcaagaucagcgugcaguacaaccugagccacaccuacgccaucgacgccgccaaccacugcggcaccaucgccaacggcgugcugcagaccuucaugagaauggccuggggcggcagcuacaucgcccuggacagcggcaagggcagcugggacugcaucaugaccagcuaccaguaccugaucauccagaacaccaccugggaggaccacugccaguucagcagacccagccccaucggcuaccugggccugcugagccagagaaccagagacaucuacaucagcagaagacugcugggcaccuucaccuggacccugagcgacagcgagggcaacgagacccccggcggcuacugccugaccagauggaugcugaucgaggccgagcugaagugcuucggcaacaccgccguggccaagugcaacgagaagcacgacgaggaguucugcgacaugcugagacuguucgacuucaacaagcaggccaucagaagacugaagaccgaggcccagaugagcauccagcugaucaacaaggccgugaacgcccugaucaacgaccagcugaucaugaagaaccaccugagagacaucaugggcauccccuacugcaacuacagcaaguacugguaccugaaccacaccgugaccggcaagaccagccugcccagaugcuggcuggugagcaacggcagcuaccugaacgagacccacuucagcgacgacaucgagcagcaggccgacaacaugaucaccgagaugcugcagaaggaguacauggacagacagggcaagaccccccugggccugguggaccuguucguguucagcaccagcuucuaccugaucagcaucuuccugcaccuggugaagauccccacccacagacacgugaucggcaagcccugccccaagccccacagacugaaccacaugggcaucugcagcugcggccuguacaagcaccccggcgugcccgugaaguggaagagaugaggacuagucccuguucccagagcccacuuuuuuuucuuuuuuugaaauaaaauagccugucuuucagaucuaaaaaaaaaaaaaaaaaaaaaaaaaaaaaaaaaaaaaaaaaaaaaaaaaaaaaaaaaaaaaaaaaaaaaaaaaaaaaaaaaaaaaaaaaaaaaaaaaaaa

SEQ ID NO: 14298 - RNA, 1721 nt, Artificial Sequence
  mRNA product Design a-1 (A100) comprising derived and/or modified sequence from LASV(LASV237-NIG-2010;Clade II)__AIT17638__GPC (opt4)
aggagagucccgcagucggcguccagcggcucugcuuguucgugugugugucguugcaggccuuauucaagcuuaccaugggccagaucaucaccuucuuccaggaggugccccacgugaucgaggaggugaugaacaucgugcugaucgcccugagccugcuggccauccugaagggcaucuacaacguggccaccugcggccuguucggccuggugagcuuccugcugcugugcggcagaagcugcagcaccaccuacaagggcguguacgagcugcagacccuggagcuggacauggccagccugaacaugaccaugccccugagcugcaccaagaacaacagccaccacuacaucauggugggcaacgagaccggccuggagcugacccugaccaacaccagcaucaucaaccacaaguucugcaaccugagcgacgcccacaagaaggaccuguacgaccacgcccugaugagcaucaucagcaccuuccaccugagcauccccaacuucaaccaguacgaggccaugagcugcgacuucaacggcggcaagaucagcgugcaguacaaccugagccacaccuacgccguggacgccgccaaccacugcggcaccaucgccaacggcgugcugcagaccuucaugagaauggccuggggcggcagcuacaucgcccuggacagcggcaagggcagcugggacugcaucaugaccagcuaccaguaccugaucauccagaacaccaccugggaggaccacugccaguucagcagacccagccccaucggcuaccugggccugcugagccagagaaccagagacaucuacaucagcagaagacugcugggcaccuucaccuggacccugagcgacagcgagggcaacgagacccccggcggcuacugccugaccagauggaugcugaucgaggccgagcugaagugcuucggcaacaccgccguggccaagugcaacgagaagcacgacgaggaguucugcgacaugcugagacuguucgacuucaacaagcaggccaucagaagacugaagaccgaggcccagaugagcauccagcugaucaacaaggccgugaacgcccugaucaacgaccagcugaucaugaagaaccaccugagagacaucaugggcauccccuacugcaacuacagcaaguacugguaccugaaccacaccgugaccggcaagaccagccugcccagaugcuggcuggugagcaacggcagcuaccugaacgagacccacuucagcgacgacaucgagcagcaggccgacaacaugaucaccgagcugcugcagaaggaguacauggacagacagggcaagaccccccugggccugguggaccuguucguguucagcaccagcuucuaccugaucagcaucuuccugcaccugaucaagauccccacccacagacacaucaccggcaagcccugccccaagccccacagacugaaccacaugggcaucugcagcugcggccuguacaagcaccccggcgugcccgugaaguggaagagaugaggacuagucccuguucccagagcccacuuuuuuuucuuuuuuugaaauaaaauagccugucuuucagaucuaaaaaaaaaaaaaaaaaaaaaaaaaaaaaaaaaaaaaaaaaaaaaaaaaaaaaaaaaaaaaaaaaaaaaaaaaaaaaaaaaaaaaaaaaaaaaaaaaaaa

SEQ ID NO: 14299 - RNA, 1721 nt, Artificial Sequence
  mRNA product Design a-1 (A100) comprising derived and/or modified sequence from LASV(LASV253-NIG-2011;Clade II)__AIT17670__GPC (opt4)
aggagagucccgcagucggcguccagcggcucugcuuguucgugugugugucguugcaggccuuauucaagcuuaccaugggccagaucaucaccuucuuccaggaggugccccacgugaucgaggaggugaugaacaucgugcugaucgcccugagccugcuggccauccugaagggcaucuacaacguggccaccugcggccuguucggccuggugagcuuccugcugcugugcggcagaagcugcagcaccaccuacaagggcguguacgagcugcagacccuggagcuggacauggccagccugaacaugaccaugccccugagcugcaccaagaacaacagccaccacuacaucauggugggcaacgagaccggccuggagcugacccugaccaacaccagcaucaucaaccacaaguucugcaaccugagcgacgcccacaagaagaaccuguacgaccacgcccugaugagcaucaucagcaccuuccaccugagcauccccaacuucaaccaguacgaggccaugagcugcgacuucaacggcggcaagaucagcgugcaguacaaccugagccacaccuacgccguggacgccgccaaccacugcggcaccaucgccaacggcgugcugcagaccuucaugagaauggccuggggcggcagcuacaucgcccuggacagcggcaagggcagcugggacugcaucaugaccagcuaccaguaccugaucauccagaacaccaccugggaggaccacugccaguucagcagacccagccccaucggcuaccugggccugcugagccagagaaccagagacaucuacaucagcagaagacugcugggcaccuucaccuggacccugagcgacagcgagggcaacgagacccccggcggcuacugccugaccagauggaugcugaucgaggccgagcugaagugcuucggcaacaccgccguggccaagugcaacgagaagcacgacgaggaguucugcgacaugcugagacuguucgacuucaacaagcaggccaucagaagacugaaggccgaggcccagaugagcauccagcugaucaacaaggccgugaacgcccugaucaacgaccagcugaucaugaagaaccaccugagagacaucaugggcauccccuacugcaacuacagcaaguacugguaccugaaccacaccgugaccggcagaaccagccugcccagaugcuggcuggugagcaacggcagcuaccugaacgagacccacuucagcgacgacaucgagcagcaggccgacaacaugaucaccgagcugcugcagaaggaguacaucgacagacagggcaagaccccccugggccugguggaccuguucguguucagcaccagcuucuaccugaucagcaucuuccugcaccuggugaagauccccacccacagacacaucaucggcaagcccugccccaagccccacagacugaaccacaugggcaucugcagcugcggccuguacaagcaccccggcgugcccgugaaguggaagagaugaggacuagucccuguucccagagcccacuuuuuuuucuuuuuuugaaauaaaauagccugucuuucagaucuaaaaaaaaaaaaaaaaaaaaaaaaaaaaaaaaaaaaaaaaaaaaaaaaaaaaaaaaaaaaaaaaaaaaaaaaaaaaaaaaaaaaaaaaaaaaaaaaaaaa

SEQ ID NO: 14300 - RNA, 1721 nt, Artificial Sequence
  mRNA product Design a-1 (A100) comprising derived and/or modified sequence from LASV(LASV254-NIG-2011;Clade II)__AIT17674__GPC (opt4)
aggagagucccgcagucggcguccagcggcucugcuuguucgugugugugucguugcaggccuuauucaagcuuaccaugggccagaucaucaccuucuuccaggaggugccccacgugaucgaggaggugaugaacaucgugcugaucgcccugagccugcuggccauccugaagggcaucuacaacguggccaccugcggccuguucggccuggugagcuuccugcugcugugcggcagaagcugcagcaccaccuacaagggcguguacgagcugcagacccuggagcuggacaugaccaaccugaacaugaccaugccccugagcugcaccaagaacaacagccaccacuacaucauggugggcaacgagaccggccuggagcugacccugaccaacaccagcaucaucaaccacaaguucugcaaccugagcgacgcccacaagaagaaccuguacaaccacgcccugaugagcaucaucagcaccuuccaccugagcauccccaacuucaaccaguacgaggccaugagcugcgacuucaacggcggcaagaucagcgugcaguacaaccugagccacagcuacgccguggacgccgccaaccacugcggcaccaucgccaacggcgugcugcagaccuucaugagaauggccuggggcggcagcuacaucgcccuggacagcggcaagggcaacugggacugcaucaugaccagcuaccaguaccugaucauccagaacaccaccugggaggaccacugccaguucagcagacccagccccaucggcuaccugggccugcugagccagagaaccagagacaucuacaucagcagaagacugcugggcaccuucaccuggacccugagcgacagcgagggcaacgagacccccggcggcuacugccugaccagauggaugcugaucgaggccgagcugaagugcuucggcaacaccgccguggccaagugcaacgagaagcacgacgaggaguucugcgacaugcugagacuguucgacuucaacaagcaggccaucagaagacugaagaccgaggcccaggccaacauccagcugaucaacaaggccgugaacgcccugaucaacgaccagcugaucaugaagaaccaccugagagacaucaugggcauccccuacugcaacuacagcaaguacugguaccugaaccacaccgugaccggcaagaccagccugcccagaugcuggcuggugagcaacggcagcuaccugaacgagacccacuucagcgacgacaucgagcagcaggccgacaacaugaucaccgagcugcugcagaaggaguacauggacagacagggcaagaccccccugggccugguggaccuguucguguucagcaccagcuucuaccugaucagcaucuuccugcaccuggugaagauccccacccacagacacgugaucggcaagcccugccccaagccccacagacugaaccacaugggcaucugcagcugcggccuguacaagcaccccggcgugcccgugaaguggaagagaugaggacuagucccuguucccagagcccacuuuuuuuucuuuuuuugaaauaaaauagccugucuuucagaucuaaaaaaaaaaaaaaaaaaaaaaaaaaaaaaaaaaaaaaaaaaaaaaaaaaaaaaaaaaaaaaaaaaaaaaaaaaaaaaaaaaaaaaaaaaaaaaaaaaaa

SEQ ID NO: 14301 - RNA, 1721 nt, Artificial Sequence
  mRNA product Design a-1 (A100) comprising derived and/or modified sequence from LASV(Nig08-A19;Clade III)__ADU56618__GPC (opt4)
aggagagucccgcagucggcguccagcggcucugcuuguucgugugugugucguugcaggccuuauucaagcuuaccaugggccagaucgugaccuucuuccaggaggugccccacgugaucgaggaggugaugaacaucgugcugaucgcccugagcauccuggccauccugaagggccuguacaacaucgccaccugcggccugaucggccuggugaccuuccugcugcugagcggcagaagcugcagcaugaccuacaagggcguguacgagcugcagacccuggagcugaacaugaacacccugaacaugaccaugccccugagcugcaccaagaacaacagccaccacuacaucauggugggcaacgagaccggccuggagcugacccugaccaacaccagccugcugcaccacaaguucugcaaccugagcgacgcccacaagaagaaccuguacgaccacacccugaugagcaucaucagcaccuuccaccugagcauccccaacuucaaccaguacgaggccaugagcugcgacuucaacggcggcaagaucaccgugcaguacaaccugagccacagcuacgccaucgacgccgccaaccacugcggcaccguggccaacggcgugcugcagaccuucaugagaauggccuggggcggcagcuacaucgcccuggacagcggcagaggcaagugggacugcaucaugaccagcuaccaguaccugaucauccagaacaccaccugggaggaccacugccaguucagcagacccagccccaucggcuaccugggccugcugagccagagaaccagagacaucuacaucagcagaagacugcugggcaccuucaccuggacccugagcgacagcgagggcaacgagacccccggcggcuacugccugaccagauggaugcugaucgaggccgagcugaagugcuucggcaacaccgccguggccaagugcaacgagaagcacgacgaggaguucugcgacaugcugagacuguucgacuucaacaagcaggccaucagaagacugaaggccgaggcccagaugagcauccagcugaucaacaaggccgugaacgcccugaucaacgaccagcugaucaugaagaaccaccugagagacaucaugggcauccccuacugcaacuacagcaaguacugguaccugaaccacaccagcaccggcagaaccagccugcccagaugcuggcuggugagcaacggcagcuaccugaacgagacccacuucagcgacgacaucgagcagcaggccgacaacaugaucaccgagaugcugcagaaggaguaccuggacagacagggcaagaccccccugggccugguggaccuguucguguucagcaccagcuucuaccugaucagcaucuuccugcaccuggugaagauccccacccacagacacaucgugggcaagcccugccccaagccccacagacugaaccacaugggcaucugcagcugcggccuguacaagcagcccggcgugcccgugagauggaagagaugaggacuagucccuguucccagagcccacuuuuuuuucuuuuuuugaaauaaaauagccugucuuucagaucuaaaaaaaaaaaaaaaaaaaaaaaaaaaaaaaaaaaaaaaaaaaaaaaaaaaaaaaaaaaaaaaaaaaaaaaaaaaaaaaaaaaaaaaaaaaaaaaaaaaa

SEQ ID NO: 14302 - RNA, 1724 nt, Artificial Sequence
  mRNA product Design a-1 (A100) comprising derived and/or modified sequence from LASV(G1180-SLE-2010;Clade IV)__AIT17168__GPC (opt4)
aggagagucccgcagucggcguccagcggcucugcuuguucgugugugugucguugcaggccuuauucaagcuuaccaugggccagaucgugaccuucuuccaggaggugccccacgugaucgaggaggugaugaacaucgugcugaucgcccugagcauccuggccgugcugaagggccuguacaacuucgccaccugcggccuggugggccugcugaccuuccugcugcugugcggcagaagcugcaccgccagcagauacaagggcguguacgagcugcagacccuggagcugaacauggagacccugaacaugaccaugccccugagcugcaccaagaacaacagccaccacuacaucauggugggcaacgagaccggccuggagcugacccugaccaacaccagcaucaucaaccacaaguucugcaaccugagcgacgcccacaagaagaaccuguacgaccacgcccugaugagcaucaucagcaccuuccaccugagcauccccaacuucaaccaguacgaggccaugagcugcgacuucaacggcggcaagaucagcgugcaguacaaccugagccacagcuacgccggcgacgccgccaaccacugcggcaccguggccaacggcgugcugcagaccuucaugagaauggccuggggcggcagcuacaucgcccuggacagcggccacggcagcugggacugcaucaugaccagcuaccaguaccugaucauccagaacaccaccugggaggaccacugccaguucagcagacccagccccaucggcuaccugggccugcugagccagagaaccagagacaucuacaucagcagaagacugcugggcaccuucaccuggacccugagcgacagcgagggcaaggacacccccggcggcuacugccugaccagauggaugcugaucgaggccgagcugaagugcuucggcaacaccgccguggccaagugcaacgagaagcacgacgaggaguucugcgacaugcugagacuguucgacuucaacaagcaggccauccagagacugaaggccgaggcccagaugagcauccagcugaucaacaaggccgugaacgcccugaucaacgaccagcugaucaugaagaaccaccugagagacaucaugggcauccccuacugcaacuacagcaaguacugguaccugaaccacaccaccaccggcaagaccagccugcccaagugcuggcuggugagcaacggcagcuaccugaacgagacccacuucagcgacgacaucgagcagcaggccgacaacaugaucaccgagaugcugcagaaggaguacauggagagacagggcaagaccccccugggccugguggaccuguucguguucagcaccagcuucuaccugaucagcaucuuccugcaccuggugaagauccccacccacagacacaucgugggcaagagcugccccaagccccacagacugaaccacaugggcaucugcagcugcggccuguacaagcagcccggcgugcccgugaaguggaagagaugaggacuagucccuguucccagagcccacuuuuuuuucuuuuuuugaaauaaaauagccugucuuucagaucuaaaaaaaaaaaaaaaaaaaaaaaaaaaaaaaaaaaaaaaaaaaaaaaaaaaaaaaaaaaaaaaaaaaaaaaaaaaaaaaaaaaaaaaaaaaaaaaaaaaa

SEQ ID NO: 14303 - RNA, 1724 nt, Artificial Sequence
  mRNA product Design a-1 (A100) comprising derived and/or modified sequence from LASV(G1442-SLE-2011;Clade IV)__AIT17180__GPC (opt4)
aggagagucccgcagucggcguccagcggcucugcuuguucgugugugugucguugcaggccuuauucaagcuuaccaugggccagaucgugaccuucuuccaggaggugccccacgugaucgaggaggugaugaacaucgugcugaucgcccugagcauccuggccgugcugaagggccuguacaacguggccaccugcggccugaucggccuggugaccuuccugcugcugugcggcagaagcugcaccaccacccuguacaagggcguguacgagcugcagacccuggagcugaacauggagacccugaacaugaccaugccccugagcugcaccaagaacaacagccaccacuacaucagagugggcaacgagaccggccuggagcugacccugaccaacaccagcaucaucaaccacaaguucugcaaccugagcgacgcccacaagaagaaccuguacgaccacgcccugaugagcaucaucagcaccuuccaccugagcauccccaacuucaaccaguacgaggccaugagcugcgacuucaacggcggcaagaucagcgugcaguacaaccugagccacagcuacgccggcgacgccgccaaccacugcggcaccguggccaacggcgugcugcagaccuucaugagaauggccuggggcggcagcuacaucgcccuggacagcggcagaggcaacugggacugcaucaugaccagcuaccaguaccugaucauccagaacaccaccugggacgaccacugccaguucagcagacccagccccaucggcuaccugggccugcugagccagagaaccagagacguguacaucagcagaagacugcugggcaccuucaccuggacccugagcgacagcgagggcaaggacacccccggcggcuacugccugaccagauggaugcugaucgaggccgagcugaagugcuucggcaacaccgccguggccaagugcaacgagaagcacgacgaggaguucugcgacaugcugagacuguucgacuucaacaagcaggccauccagagacugaaggccgaggcccagaugagcauccagcugaucaacaaggccgugaacgcccugaucaacgaccagcugaucaugaagaaccaccugagagacaucaugggcauccccuacugcaacuacagcaaguacugguaccugaacaacaccgccaccggcaagaccagccugcccaagugcuggcugaucagcaacggcagcuaccugaacgagacccacuucagcgacgacaucgagcaggaggccgacaacaugaucaccgagaugcugcagaaggaguacauggagagacagggcaagaccccccugggccugguggaccuguucguguucagcaccagcuucuaccugaucagcaucuuccugcaccuggugaagauccccacccacagacacaucgugggcaagagcugccccaagccccacagacugaaccacaugggcaucugcagcugcggccuguacaagcagcccggcgugcccgugagauggaagagaugaggacuagucccuguucccagagcccacuuuuuuuucuuuuuuugaaauaaaauagccugucuuucagaucuaaaaaaaaaaaaaaaaaaaaaaaaaaaaaaaaaaaaaaaaaaaaaaaaaaaaaaaaaaaaaaaaaaaaaaaaaaaaaaaaaaaaaaaaaaaaaaaaaaaa

SEQ ID NO: 14304 - RNA, 1724 nt, Artificial Sequence
  mRNA product Design a-1 (A100) comprising derived and/or modified sequence from LASV(G3010-SLE-2013;Clade IV)__AIT17344__GPC (opt4)
aggagagucccgcagucggcguccagcggcucugcuuguucgugugugugucguugcaggccuuauucaagcuuaccaugggccagaucgugaccuucuuccaggaggugccccacgugaucgaggaggugaugaacaucgugcugaucgcccugagcauccuggccgugcugaagggccuguacaacuucgccaccugcggccuggugggccuggugaccuuccugcugcugugcggcagaagcugcaccaccagccuguacaagggcguguacgagcugcagacccuggagcugaacauggagacccugaacaugaccaugccccugagcugcaccaagaacaacagccaccacuacaucauggugggcaacgagaccggccuggagcugacccugaccaacaccagcaucaucaaccacaaguucugcaaccugagcgacgcccacaagaagaaccuguacaaccacgcccugaugagcaucaucagcaccuuccaccugagcauccccaacuucaaccaguacgaggccaugagcugcgacuucaacggcggcaagaucagcgugcaguacaaccugagccacagcuacgccggcgacgccgccagccacugcggcaccguggccaacggcgugcugcagaccuucaugagaauggccuggggcggcagcuacaucgcccuggacagcggcuacggcaagugggacugcaucaugaccagcuaccaguaccugaucauccagaacaccaccugggaggaccacugccaguucagcagacccagccccaucggcuaccugggccugcugagccagagaaccagagacaucuacaucagcagaagacugcugggcaccuucaccuggacccugagcgacagcgagggcaaggacacccccggcggcuacugccugaccagauggaugcugaucgaggccgagcugaagugcuucggcaacaccgccguggccaagugcaacgagaagcacgacgaggaguucugcgacaugcugagacuguucgacuucaacaagcaggccauccagagacugaagaccgaggcccagaugagcauccagcugaucaacaaggccgugaacgcccugaucaacgaccagcugaucaugaagaaccaccugagagacaucaugggcauccccuacugcaacuacagcaaguacugguaccugaaccacaccaccaccggcaagaccagccugcccaagugcuggcuggugagcaacggcagcuaccugaacgagacccacuucagcgacgacaucgagcagcaggccgacaacaugaucaccgagaugcugcagaaggaguacauggagagacagggcaagaccccccugggccugguggaccuguucguguucagcaccagcuucuaccugaucagcaucuuccugcaccuggugaagauccccacccacagacacaucgugggcaagagcugccccaagccccacagacugaaccacaugggcaucugcagcugcggccuguacaagcagcccggcgugcccgugagauggaagagaugaggacuagucccuguucccagagcccacuuuuuuuucuuuuuuugaaauaaaauagccugucuuucagaucuaaaaaaaaaaaaaaaaaaaaaaaaaaaaaaaaaaaaaaaaaaaaaaaaaaaaaaaaaaaaaaaaaaaaaaaaaaaaaaaaaaaaaaaaaaaaaaaaaaaa

SEQ ID NO: 14305 - RNA, 1724 nt, Artificial Sequence
  mRNA product Design a-1 (A100) comprising derived and/or modified sequence from LASV(G502-SLE-2009;Clade IV)__AIT17126__GPC (opt4)
aggagagucccgcagucggcguccagcggcucugcuuguucgugugugugucguugcaggccuuauucaagcuuaccaugggccagaucgugaccuucuuccaggaggugccccacgugaucgaggaggugaugaacaucgugcugaucgcccugagcauccuggccgugcugaagggccuguacaacuucgccaccugcggccuggugggccugcugaccuuccugcugcugugcggcagaagcugcaccaccggccuguacaagggcguguacgagcugcagacccuggagcugaacauggagacccugaacaugaccaugccccugagcugcaccaagaacaacagccaccacuacaucauggugggcaacgagaccggccuggagcugacccugaccaacaccagcaucaucaaccacaaguucugcaaccugagcgacgcccacaagaagaaccuguacgaccacgcccugaugagcaucaucagcaccuuccaccugagcauccccaacuucaaccaguacgaggccaugagcugcgacuucaacggcggcaagaucagcgugcaguacaaccugagccacagcuacgccggcgacgccgccgaccacugcggcaccguggccaacggcgugcugcagaccuucaugagaauggccuggggcggcagcuacaucgcccuggacagcggcagaggcagaugggacugcaucaugaccagcuaccaguaccugaucauccagaacaccaccugggaggaccacugccaguucagcagacccagccccaucggcuaccugggccugcugagccagagaaccagagacaucuacaucagcagaagacugcugggcaccuucaccuggacccugagcgacagcgagggcaaggacacccccggcggcuacugccugaccagauggaugcugaucgaggccgagcugaagugcuucggcaacaccgccguggccaagugcaacgagaagcacgacgaggaguucugcgacaugcugagacuguucgacuucaacaagcaggccauccagagacugaaggccgaggcccagaugagcauccagcugaucaacaaggccgugaacgcccugaucaacgaccagcuggugaugaagaaccaccugagagacaucaugggcauccccuacugcaacuacagcagauacugguaccugaaccacaccaccaccggcagaaccagccugcccaagugcuggcuggugagcaacggcagcuaccugaacgagacccacuucagcgacgacaucgagcagcaggccgacaacaugaucaccgagaugcugcagaaggaguacauggagagacagggcaagaccccccugggccugguggaccuguucguguucagcaccagcuucuaccugaucagcaucuuccugcaccuggugaagauccccacccacagacacaucgugggcaagagcugccccaagccccacagacugaaccacaugggcaucugcagcugcggccuguacaagcagcccggcgugcccgugaaguggaagagaugaggacuagucccuguucccagagcccacuuuuuuuucuuuuuuugaaauaaaauagccugucuuucagaucuaaaaaaaaaaaaaaaaaaaaaaaaaaaaaaaaaaaaaaaaaaaaaaaaaaaaaaaaaaaaaaaaaaaaaaaaaaaaaaaaaaaaaaaaaaaaaaaaaaaa

SEQ ID NO: 14306 - RNA, 1724 nt, Artificial Sequence
  mRNA product Design a-1 (A100) comprising derived and/or modified sequence from LASV(G733-SLE-2010;Clade IV)__AIT17154__GPC (opt4)
aggagagucccgcagucggcguccagcggcucugcuuguucgugugugugucguugcaggccuuauucaagcuuaccaugggccagaucgugaccuucuuccaggaggugccccacgugaucgaggaggugaugaacaucgugcugaucgcccugagcauccuggccgugcugaagggccuguacaacuucgccaccugcggcaucgugggccuggugagcuuccugcugcugugcggcagaagcugcaccaccagccuguacaagggcguguacgagcugcagacccuggagcugaacauggagacccugaacaugaccaugccccugagcugcaccaagaacaacagccaccacuacaucauggugggcaacgagaccggccuggagcugacccugaccaacaccagcaucaucaaccacaaguucugcaaccugagcgacgcccacaagaagaaccuguacgaccacgcccugaugagcaucaucagcaccuuccaccugagcauccccaacuucaaccaguacgaggccaugagcugcgacuucaacggcggcaagaucagcgugcaguacaaccugagccacagcuacgccggcgacgccgccaaccacugcggcaccaucgccaacggcgugcugcagaccuucaugagaauggccuggggcggcagcuacaucgcccuggacagcggcagagacagaugggacugcaucaugaccagcuaccaguaccugaucauccagaacaccaccugggaggaccacugccaguucagcagacccagccccaucggcuaccugggccugcugagccagagaaccagagacaucuacaucagcagaagacugcugggcaccuucaccuggacccugagcgacagcgagggcaaggacacccccggcggcuacugccugaccagauggaugcugaucgaggccgagcugaagugcuucggcaacaccgccguggccaagugcaacgagaagcacgacgaggaguucugcgacaugcugagacuguucgacuucaacaagcaggccauccagagacugaaggccgaggcccagaugagcauccagcugaucaacaaggccgugaacgcccugaucaacgaccagcugaucaugaagaaccaccugagagacaucaugggcauccccuacugcaacuacagcaaguacugguaccugaaccacaccaccaccggcaagaccagccugcccaagugcuggcuggugagcaacggcagcuaccugaacgagacccacuucagcgacgacaucgagcagcaggccgacaacaugaucaccgagaugcugcagaaggaguacauggagagacagggcaagaccccccugggccugguggaccuguucguguucagcaccagcuucuaccugaucagcaucuuccugcaccuggugaagauccccacccacagacacguggugggcaagagcugccccaagccccacagacugaaccacaugggcaucugcagcugcggccuguacggccagcccggcgugcccgugaaguggaagagaugaggacuagucccuguucccagagcccacuuuuuuuucuuuuuuugaaauaaaauagccugucuuucagaucuaaaaaaaaaaaaaaaaaaaaaaaaaaaaaaaaaaaaaaaaaaaaaaaaaaaaaaaaaaaaaaaaaaaaaaaaaaaaaaaaaaaaaaaaaaaaaaaaaaaa

SEQ ID NO: 14307 - RNA, 1724 nt, Artificial Sequence
  mRNA product Design a-1 (A100) comprising derived and/or modified sequence from MOPV/LASV reassortant(IGS-1;Clade IV)__AFY05576__GPC (opt4)
aggagagucccgcagucggcguccagcggcucugcuuguucgugugugugucguugcaggccuuauucaagcuuaccaugggccagaucgugaccuucuuccaggaggugccccacgugaucgaggaggugaugaacaucgugcugaucgcccugagcgugcuggccgugcugaagggccuguacaacuucgccaccugcggccuggugggccuggugaccuuccugcugcugugcggcagaagcugcaccaccagccuguacaagggcguguacgagcugcagacccuggagcugaacauggagacccugaacaugaccaugccccugagcugcaccaagaacaacagccaccacuacaucauggugggcaacgagaccggccuggagcugacccugaccaacaccagcaucaucaaccacaaguucugcaaccugagcgacgcccacaagaagaaccuguacgaccacgcccugaugagcaucaucagcaccuuccaccugagcauccccaacuucaaccaguacgaggccaugagcugcgacuucaacggcggcaagaucagcgugcaguacaaccugagccacagcuacgccggcgacgccgccaaccacugcggcaccguggccaacggcgugcugcagaccuucaugagaauggccuggggcggcagcuacaucgcccuggacagcggcagaggcaacugggacugcaucaugaccagcuaccaguaccugaucauccagaacaccaccugggaggaccacugccaguucagcagacccagccccaucggcuaccugggccugcugagccagagaaccagagacaucuacaucagcagaagacugcugggcaccuucaccuggacccugagcgacagcgagggcgaggacacccccggcggcuacugccugaccagauggaugcugaucgaggccgagcugaagugcuucggcaacaccgccguggccaagugcaacgagaagcacgacgaggaguucugcgacaugcugagacuguucgacuucaacaagcaggccauccagagacugaaggccgaggcccagaugagcauccagcugaucaacaaggccgugaacgcccugaucaacgaccagcugaucaugaagaaccaccugagagacaucaugggcauccccuacugcaacuacagcaaguacugguaccugaaccacaccaccaccggcagaaccagccugcccaagugcuggcuggugagcaacggcagcuaccugaacgagacccacuucagcgacgacaucgagcagcaggccgacaacaugaucaccgagaugcugcagaaggaguacauggagagacagggcaagaccccccugggccugguggaccuguucguguucagcaccagcuucuaccugaucagcaucuuccugcaccuggugaagauccccacccacagacacaucgugggcaagagcugccccaagccccacagacugaaccacaugggcaucugcagcugcggccuguacaagcagcccggcgugcccgugaaguggaagagaugaggacuagucccuguucccagagcccacuuuuuuuucuuuuuuugaaauaaaauagccugucuuucagaucuaaaaaaaaaaaaaaaaaaaaaaaaaaaaaaaaaaaaaaaaaaaaaaaaaaaaaaaaaaaaaaaaaaaaaaaaaaaaaaaaaaaaaaaaaaaaaaaaaaaa

SEQ ID NO: 14308 - RNA, 1724 nt, Artificial Sequence
  mRNA product Design a-1 (A100) comprising derived and/or modified sequence from LASV(LM765-SLE-2012;Clade IV)__AIT17814__GPC (opt4)
aggagagucccgcagucggcguccagcggcucugcuuguucgugugugugucguugcaggccuuauucaagcuuaccaugggccagaucgugaccuucuuccaggaggugccccacgugaucgaggaggugaugaacaucgugcugaucgcccugagcauccuggccgugcugaagggccuguacaacuucgccaccugcggccuggugggccuggugaccuuccugcugcugugcggcagaagcugcaccaccagccuguacaagggcguguacgagcugcagacccuggagcugaacauggagacccugaacaugaccaugccccugagcugcaccaagaacaacagccaccacuacaucauggugggcaacgagaccggccuggagcugacccugaccaacaccagcaucaucgaccacaaguucugcaaccugagcgacgcccacagaaagaaccuguacgaccacgcccugaugagcaucaucagcaccuuccaccugagcauccccaacuucaaccaguacgaggccaugagcugcgacuucaacggcggcaagaucagcgugcaguacaaccugagccacagcuacgccaaggacgccgccgaccacugcggcaccguggccaacggcgugcugcagaccuucaugagaauggccuggggcggcagcuacaucgcccuggacagcggcagaggcagaugggacugcaucaugaccagcuaccaguaccugaucauccagaacaccaccugggaggaccacugccaguucagcagacccagccccaucggcuaccugggccugcugagccagagaaccagagacaucuacaucagcagaagacugcugggcaccuucaccuggacccugagcgacagcgagggcaaggacacccccggcggcuacugccugaccagauggaugcugaucgaggccgagcugaagugcuucggcaacaccgccguggccaagugcaacgagaagcacgacgaggaguucugcgacaugcugagacuguucgacuucaacaagcaggccauccagagacugaaggccgaggcccagaugagcauccagcugaucaacaaggccgugaacgcccugaucaacgaccagcugaucaugaagaaccaccugagagacaucaugggcauccccuacugcaacuacagcaaguacugguaccugaaccacaccaccaccggcaagaccagccugcccaagugcuggcuggugagcaacggcagcuaccugaacgagacccacuucagcgacgacaucgagcagcaggccgacaacaugaucaccgagaugcugcagaaggaguacauggagagacagggcaagaccccccugggccugguggaccuguucguguucagcaccagcuucuaccugaucagcaucuuccugcaccuggugaagauccccacccacagacacaucgugggcaagcccugccccaagccccacagacugaaccacaugggcaucugcagcugcggccuguacaagcagcccggcgugcccgugaaguggaagagaugaggacuagucccuguucccagagcccacuuuuuuuucuuuuuuugaaauaaaauagccugucuuucagaucuaaaaaaaaaaaaaaaaaaaaaaaaaaaaaaaaaaaaaaaaaaaaaaaaaaaaaaaaaaaaaaaaaaaaaaaaaaaaaaaaaaaaaaaaaaaaaaaaaaaa

SEQ ID NO: 14309 - RNA, 1724 nt, Artificial Sequence
  mRNA product Design a-1 (A100) comprising derived and/or modified sequence from LASV(LM776-SLE-2012;Clade IV)__AIT17824__GPC (opt4)
aggagagucccgcagucggcguccagcggcucugcuuguucgugugugugucguugcaggccuuauucaagcuuaccaugggccagaucgugaccuucuuccaggaggugccccacgugaucgaggaggugaugaacaucgugcugaucgcccugagcauccuggccgugcugaagggccuguacaacuucgccaccugcggccuggugggccuggugaccuuccugcugcugugcggcagaagcugcaccaccagcguguacaagggcguguacgagcugcagacccuggagcugaacauggagacccugaacaugaccaugccccugagcugcaccaagaacaacagccaccacuacaucauggugggcaacgagaccggccuggagcugacccugaccaacaccagcaucaucaaccacaaguucugcaaccugagcgacgcccacaagaagaaccuguacgaccacgcccugaugagcaucaucagcaccuuccaccugagcauccccaacuucaaccaguacgaggccaugagcugcgacuucaacggcggcaagaucagcgugcaguacaaccugagccacagcuacgccggcgacgccgccaaccacugcggcaccguggccaacggcgugcugcagaccuucaugagaauggccuggggcggcagcuacaucgcccuggacagcggccacggcaagugggacugcaucaugaccagcuaccaguaccugaucauccagaacaccaccugggaggaccacugccaguucagcagacccagccccaucggcuaccugggccugcugagccagagaaccagagacaucuacaucagcagaagacugcugggcaccuucaccuggacccugagcgacagcgagggcaaggacacccccggcggcuacugccugaccagauggaugcugaucgaggccgagcugaagugcuucggcaacaccgccguggccaagugcaacgagaagcacgacgaggaguucugcgacaugcugagacuguucgacuucaacaagcaggccauccagagacugaaggccgaggcccagaugagcauccagcugaucaacaaggccgugaacgcccugaucaacgaccagcugaucaugaagaaccaccugagagacaucaugggcauccccuacugcaacuacagcaaguacugguaccugaaccacaccaccaccggcaagaccagccugcccaagugcuggcuggugagcaacggcagcuaccugaacgagacccacuucagcgacgacaucgagcagcaggccgacaacaugaucaccgagaugcugcagaaggaguacauggagagacagggcaagaccccccugggccugguggaccuguucguguucagcaccagcuucuaccugaucagcaucuuccugcaccuggugaagauccccacccacagacacaucgugggcaagagcugccccaagccccacagacugaaccacaugggcaucugcagcugcggccuguacaagcagcccggcgugcccgugagauggaagagaugaggacuagucccuguucccagagcccacuuuuuuuucuuuuuuugaaauaaaauagccugucuuucagaucuaaaaaaaaaaaaaaaaaaaaaaaaaaaaaaaaaaaaaaaaaaaaaaaaaaaaaaaaaaaaaaaaaaaaaaaaaaaaaaaaaaaaaaaaaaaaaaaaaaaa

SEQ ID NO: 14310 - RNA, 1724 nt, Artificial Sequence
  mRNA product Design a-1 (A100) comprising derived and/or modified sequence from LASV(Mad39;Clade IV)__ANH09722__GPC (opt4)
aggagagucccgcagucggcguccagcggcucugcuuguucgugugugugucguugcaggccuuauucaagcuuaccaugggccagaucgugaccuucuuccaggaggugccccacgugaucgaggaggugaugaacaucgugcugaucgcccugagcauccuggccgugcugaagggccuguacaacguggccaccugcggccugaucggccuggugaccuuccugcugcugugcggcagaagcugcaccaccacccuguacaagggcguguacgagcugcaggcccuggagcugaacauggagacccugaacaugaccaugccccugagcugcaccaagaacaacagccaccacuacaucagagugggcaacgagaccggccuggagcugacccugaccaacaccagccugaucaaccacaaguucugcaaccugagcgacgcccacaagaagaaccuguacgaccacgcccugaugagcaucaucagcaccuuccaccugagcauccccaacuucaaccaguacgaggccaugagcugcgacuucaacgacggcaagaucagcgugcaguacaaccugagccacaccuacgccggcgacaccgccaaccacugcggcaccguggccaacggcgugcugcagaccuucaugagaauggccuggggcggcagcuacaucgcccuggacagcggcagaggcggcugggacugcaucaugaccagcuaccaguaccugaucauccagaacaccaccugggaggaccacugccaguucagcagacccagccccaucggcuaccugggccugcugagccagagaaccagagacaucuacaucagcagaagacugcugggcaccuucaccuggacccugagcgacagcgagggcaaggacacccccggcggcuacugccugaccagauggaugcugaucgaggccgagcugaagugcuucggcaacaccgccguggccaagugcaacgagaagcacgacgaggaguucugcgacaugcugagacuguucgacuucaacaagcaggccauccagagacugaaggccgaggcccagaugagcauccagcugaucaacaaggccgugaacgcccugaucaacgaccagcugaucaugaagaaccaccugagagacaucaugggcauccccuacugcaacuacagcaaguacugguaccugaaccacaccgugaccggcaagaccagccugcccaagugcuggcuggugagcaacggcagcuaccugaacgagacccacuucagcgacgacaucgagcagcaggccgacaacaugaucaccgagaugcugcagaaggaguacauggagagacagggcaagaccccccugggccugguggaccuguucguguucagcaccagcuucuaccugaucagcaucuuccugcaccuggugaagauccccacccacagacacguggugggcaagcccugccccaagccccacagacugaaccacaugggcaucugcagcugcggcuucuacaagcagcccggcgugcccgugagauggaagagaugaggacuagucccuguucccagagcccacuuuuuuuucuuuuuuugaaauaaaauagccugucuuucagaucuaaaaaaaaaaaaaaaaaaaaaaaaaaaaaaaaaaaaaaaaaaaaaaaaaaaaaaaaaaaaaaaaaaaaaaaaaaaaaaaaaaaaaaaaaaaaaaaaaaaa

SEQ ID NO: 14311 - RNA, 1724 nt, Artificial Sequence
  mRNA product Design a-1 (A100) comprising derived and/or modified sequence from LASV(Z0947-SLE-2011;Clade IV)__AIT17840__GPC (opt4)
aggagagucccgcagucggcguccagcggcucugcuuguucgugugugugucguugcaggccuuauucaagcuuaccaugggccagaucgugaccuucuuccaggaggugccccacgugaucgaggaggugaugaacaucgugcugaucgcccugagcauccuggccgugcugaagggccuguacaacuucgccaccugcggccuggugggccuggugaccuuccugcugcugugcggcagaagcugcaccaucagccuguacaagggcguguacgagcugcagacccuggagcugaacauggagacccugaacaugaccaugccccugagcugcaccaagaacaacagccaccacuacaucauggugggcaacgagaccggccuggagcugacccugaccaacaccagcaucaucaaccacaaguucugcaaccugagcgacgcccacaagaagaaccuguacgaccacgcccugaugagcaucaucagcaccuuccaccugagcauccccaacuucaaccaguacgaggccaugagcugcgacuucaacggcggcaagaucagcgugcaguacaaccugagccacagcuacgccggcgacgccgccaaccacugcggcaccguggccaacggcgugcugcagaccuucaugagaauggccuggggcggcagcuacaucgcccuggacagcggcagagacagaugggacugcaucaugaccagcuaccaguaccugaucauccagaacaccaccugggaggaccacugccaguucagcagacccagccccaucggcuaccugggccugcugagccagagaaccagagacaucuacaucagcagaagacugcugggcaccuucaccuggacccugagcgacagcgagggcaaggacacccccggcggcuacugccugaccagauggaugcugaucgaggccgagcugaagugcuucggcaacaccgccguggccaagugcaacgagaagcacgacgaggaguucugcgacaugcugagacuguucgacuucaacaagcaggccauccagagacugaaggccgaggcccagaugagcauccagcugaucaacaaggccgugaacgcccugaucaacgaccagcugaucaugaagaaccaccugagagacaucaugggcauccccuacugcaacuacagcaaguacugguaccugaaccacaccaccaccggcaagaccagccugcccaagugcuggcuggugagcaacggcagcuaccugaacgagacccacuucagcgacgacaucgagcagcaggccgacaacaugaucaccgagaugcugcagaaggaguacauggagagacagggcaagaccccccugggccugguggaccuguucguguucagcaccagcuucuaccugaucagcaucuuccugcaccuggugaagauccccacccacagacacaucgugggcaagcccugccccaagccccacagacugaaccacaugggcaucugcagcugcggccuguacaagcagcccggcgugcccgugaaguggaagagaugaggacuagucccuguucccagagcccacuuuuuuuucuuuuuuugaaauaaaauagccugucuuucagaucuaaaaaaaaaaaaaaaaaaaaaaaaaaaaaaaaaaaaaaaaaaaaaaaaaaaaaaaaaaaaaaaaaaaaaaaaaaaaaaaaaaaaaaaaaaaaaaaaaaaa

SEQ ID NO: 14312 - RNA, 1724 nt, Artificial Sequence
  mRNA product Design a-1 (A100) comprising derived and/or modified sequence from LASV(Josiah;Clade IV)__NP_694870__GPC (opt5)
aggagagucccgcagucggcguccagcggcucugcuuguucgugugugugucguugcaggccuuauucaagcuuaccaugggccagaucgugaccuucuuucaagaggucccccacguuauugaagaggugaugaacaucgugcugauugcccucagcguccuggcugugcuuaaggggcuguacaauuucgccacaugcggacucguuggccuggugacguuucuucugcucugugggagauccugcaccacaucucuguauaaaggagucuacgaacugcagacccucgagcugaacauggaaacacuuaauaugaccaugccucugagcuguacaaagaacaauucccaucacuauaucauggugggcaacgagaccgggcucgagcugacgcuuaccaauacaucuauuaucaaccauaaauucugcaaucugagcgacgcgcacaagaaaaaccucuacgaucaugcucugauguccaucauuucuaccuuucaccugagcaucccgaauuucaaccaguaugaagccauguccugugacuuuaauggaggcaagauuagcguucaguacaaccucucucacuccuaugccggcgaugcugccaaucauugcgggacaguggcuaacggaguccugcaaaccuucaugcggauggccuggggcgggagcuacaucgcgcuugacucuggacgcggcaacugggauuguauuaugacguccuaccaguaucugaucauucagaauacaaccugggaggaccacugccaguuuagcagacccucuccuaucggguaccucggacugcuuucccaacggacacgcgauaucuauauuagcagacggcugcucggcaccuucaccuggacacuguccgacucugaaggcaaggauacgcccgggggauacugucugacccgcuggaugcucaucgaggccgagcugaaaugcuuuggcaacacagcuguggccaaguguaaugaaaaacaugacgaggaguucugcgauaugcuuagacuguuugacuucaacaagcaggcuauucagcggcucaaagccgaagcgcagaugagcauccaacugauuaauaaggccgugaacgcucuuaucaaugaucagcugaucaugaagaaccaccuccgcgacauuauggggaucccuuauugcaauuacuccaaauauugguaccugaaccacaccacaaccggaagaacgagccugcccaaguguuggcucgucucuaauggcuccuaccugaacgaaacacauuucagcgacgauauugagcagcaagccgacaauaugaucaccgagaugcuucagaaagaauauauggagcggcaggggaagaccccucugggacucguugaucuguuuguguucucuaccagcuuuuaccugauuuccaucuuccuucaccucgugaaaaucccgacacaucgccacauugucggcaagucuugccccaaaccucauagacugaaccacaugggcaucuguagcugcgggcuguauaagcagcccggagugccuguuaaguggaaacggugaggacuagucccuguucccagagcccacuuuuuuuucuuuuuuugaaauaaaauagccugucuuucagaucuaaaaaaaaaaaaaaaaaaaaaaaaaaaaaaaaaaaaaaaaaaaaaaaaaaaaaaaaaaaaaaaaaaaaaaaaaaaaaaaaaaaaaaaaaaaaaaaaaaaa

SEQ ID NO: 14313 - RNA, 1721 nt, Artificial Sequence
  mRNA product Design a-1 (A100) comprising derived and/or modified sequence from LASV(LP;Clade I)__AAF86701__GPC (opt5)
aggagagucccgcagucggcguccagcggcucugcuuguucgugugugugucguugcaggccuuauucaagcuuaccaugggccagaucauuaccuucuuucaagaggugccccacgucaucgaagagguuaugaacauugugcugaucgcccucagccugcuugcuauucugaaggggcucuacaauaucgccacaugcggaaucauuggccugguggcguuccuuuuucugugugggaaauccugcucucucacgcugaagggaggcuaugaacugcagacccucgagcugaacauggaaacacuuaauaugaccaugccucugagcuguaccaaaaacuccucucaucacuacaucagagucgggaaugagacaggacucgagcugacacuuaccaacacgagcauuaucaaucauaaguucugcaaccuguccgacgcucacaaaaagaaucucuaugaucaugcccugaugucuauuaucagcaccuuucaccuguccauuccgaacuucaaucaguacgaagccaugagcugugacuuuaacggcggcaagaucucugugcaguauaaucucucccacagcuacgcuggggaugccgcugagcauugcggaacaguugccaacggcgugcugcaaaccuucaugcggauggcguggggagggcgcuauaucgcccuugacucuggcaaagggaauugggauuguauuaugacauccuaccaguaccugaucauucagaacaccacgugggaagaccacugccaguuuagcagacccucuccuaucggauaucucggccugcuuucccaacggacacgcgauauuuacaucagcagacggcugcucggcaccuucacauggacccuguccgacucugaggggaacgagacccccggaggcuauugucugacacgcuggaugcucaucgaagcugagcugaagugcuuugggaauacggccgucgcuaaauguaacgaaaagcaugaugaggaguucugcgacaugcuuagacuguuugauuucaauaaacaggccauucggcgccucaaggcggaagcccagaugagcauccagcugauuaacaaggcugugaaugcccuuaucaacgaccaacugauuaugaaaaaucaccucagagauaucaugggaaucccuuacugcaacuauuccaaguacugguaucugaaucacaccagcucuggccggacaucccugcccaaauguuggcucauuagcaacgggucuuaccugaaugagacccaguucagcgacgacaucgaacagcaagcugauaacaugauuacagagaugcuucagaaggaauacaucgagcgccagggaaaaaccccucugggccucguugacauuuuuaucuucuccacgucuuuuuaucugauuagcaucuuccugcaucuuaucaagauuccgacacacagacauaucgugggcaaacccugcccuaagccccaccggcucaaucauaugggggucuguuccugcggacuguacaagcacccuggcgugcccaccaaauggaagcgcugaggacuagucccuguucccagagcccacuuuuuuuucuuuuuuugaaauaaaauagccugucuuucagaucuaaaaaaaaaaaaaaaaaaaaaaaaaaaaaaaaaaaaaaaaaaaaaaaaaaaaaaaaaaaaaaaaaaaaaaaaaaaaaaaaaaaaaaaaaaaaaaaaaaaa

SEQ ID NO: 14314 - RNA, 1721 nt, Artificial Sequence
  mRNA product Design a-1 (A100) comprising derived and/or modified sequence from LASV(803213;Clade II)__AAF86703__GPC (opt5)
aggagagucccgcagucggcguccagcggcucugcuuguucgugugugugucguugcaggccuuauucaagcuuaccaugggccagaucauuaccuucuuucaagaggugccccacgucaucgaagagguuaugaacauugugcugaucgcccucagccugcuugcuauucugaaggggaucuacaauguggccacaugcggacucuucggccugaucuccuuucuucugcucugugggagaucuugcagcgucacguauaaaggaguguacgaacugcagacccuggagcucaacauggcgaaucugaacaugacaaugccucuuuccuguaccaagaauaacucucaucacuauauuaugguuggcaaugaaacagggcuggagcucacccugacaaacaccagcaucauuaaucauaaauucugcaaccuuuccgacgcucacaagaaaaaucuguacgaucaugcccucaugucuaucauuagcacguuucaccuguccaucccgaacuucaaucaguaugaggccaugagcugugacuuuaacggaggcaagauuucugugcaguacaaucugucccacagcuucgcugucgaugccgcuaaccauugcggcaccaucgccaacggggugcuccaaacauuuaugcggauggcguggggaggcucuuauaucgcccuggacuccgggaagggaaauugggauuguauuaugaccagcuaccaguaccuuaucauucagaacacaaccugggaagaccacugccaguucucucgccccuccccuaucggcuaucuggggcuccugagccaaagaacgcgggauauuuacaucucccgcagacuucugggaacauuuaccuggacacucucugacagcgagggcaaugaagcucccggcggguauugucugacccgguggaugcugaucgaggccgagcucaaaugcuucggaaacaccgcuguugccaaguguaaugaaaaacaugaugaggaauuuugcgacaugcugcgccuuuucgauuucaacaagcaggcgauuaaaagacugaagacagaggcccagauguccauccagcucauuaauaaggcugugaacgcccugaucaaugaccaacuuauuaugaaaaaccaucugcgggauaucaugggcaucccuuacugcaauuauagccgcuacugguaucucaaccacacggucaccgggaagacaucucugcccagauguuggcugguguccaauggaagcuaccucaacgaaacccacuuuucugacgacauugagcagcaggcugauaauaugaucacagagaugcugcaaaaagaauacauggaccggcagggcaagaccccucuugggcugguggaucucuucgucuuuagcacguccuucuaucugauuucuaucuuucugcaccuuguuaaaauuccgacacaucgccacaucgugggaaagcccugcccuaaaccccauagacucaaccacaugggcauuuguagcugcggccuguacaagcacccuggggugcccgucaaguggaaacggugaggacuagucccuguucccagagcccacuuuuuuuucuuuuuuugaaauaaaauagccugucuuucagaucuaaaaaaaaaaaaaaaaaaaaaaaaaaaaaaaaaaaaaaaaaaaaaaaaaaaaaaaaaaaaaaaaaaaaaaaaaaaaaaaaaaaaaaaaaaaaaaaaaaaa

SEQ ID NO: 14315 - RNA, 1721 nt, Artificial Sequence
  mRNA product Design a-1 (A100) comprising derived and/or modified sequence from LASV(GA391;Clade III)__CAA36645__GPC (opt5)
aggagagucccgcagucggcguccagcggcucugcuuguucgugugugugucguugcaggccuuauucaagcuuaccaugggccagaucgugaccuucuuucaagaggucccccacguuauugaagaggugaugaacaucgugcugauugcccucagcauccuggcuauucuuaaggggcuguacaaugucgccacaugcggacucaucggccuggugacguuccuucugcucuccgggagaucuuguagccugaucuauaaaggaaccuacgaacugcagacacucgagcugaacauggaaacccuuaauaugacaaugccucuguccugcaccaagaacaauucucaucacuauauucggguuggcaacgagacagggcucgagcugacccuuacgaauaccagcauccugaaccauaaauuuuguaaucucuccgacgcgcacaagcgcaaccuguacgaucauucucugaugagcauuaucuccacauuccaccucagcauuccgaauuuuaaccaguaugaagcuaugucuugcgacuucaauggaggcaaaaucaccgugcaguacaaccugucccacagcuuugccgucgaugccgcuggccauugugggacacuugccaauggagugcugcaaaccuucaugagaauggcuuggggcgggucuuauauugcccucgacuccggacggggcaacugggauugcaucaugacgagcuaccaguaccugaucauucagaacacaaccugggacgaucacugucaguuuucucgccccuccccuaucggguaucuuggacugcucagccaaagaacacgggacauuuacaucucccgcagacugcugggcaccuucaccuggacacucucugauagcgagggcaaugaaacgcccgggggauauugccugacccgguggaugcuuauugaggcggagcugaaguguuuuggcaacacagccguugcuaagugcaaugaaaaacaugacgaggaguucugugauaugcuccgccuguuugacuucaacaagcaggccaucagacggcuuaaaaccgaagcucagauguccauccagcugauuaauaaggccgugaacgcgcucaucaaugaucaacugauuaugaaaaaccaucugcgcgacaucauggggauuccuuacugcaauuauagcagauacugguaucucaaccacacaucuaccggaaagacgucccugccccggugcuggcuuaucagcaauggcucuuaccugaacgaaacaaaguucagcgacgauaucgagcagcaggccgacaauaugauuaccgagaugcuccaaaaagaauacaucgaucgccaggggaagaccccucugggacuggucgaccuuuuuguguucuccacaucuuuuuaucucauuagcaucuuccugcaccuggugaaaauuccgacccacagacauaucgucggcaagcccuguccuaaaccccaccggcucaaccauaugggcauuugcuccugugggcuguacaagcagccuggaguucccgugagauggaaacgcugaggacuagucccuguucccagagcccacuuuuuuuucuuuuuuugaaauaaaauagccugucuuucagaucuaaaaaaaaaaaaaaaaaaaaaaaaaaaaaaaaaaaaaaaaaaaaaaaaaaaaaaaaaaaaaaaaaaaaaaaaaaaaaaaaaaaaaaaaaaaaaaaaaaaa

SEQ ID NO: 14316 - RNA, 1724 nt, Artificial Sequence
  mRNA product Design a-1 (A100) comprising derived and/or modified sequence from LASV(AV;Clade V)__CCA30314__GPC (opt5)
aggagagucccgcagucggcguccagcggcucugcuuguucgugugugugucguugcaggccuuauucaagcuuaccaugggccagaucgugaccuucuuucaagaggucccccacguuauugaagaggugaugaacaucgugcugauugcccucagcauccuggcuguccuuaaggggcuguacaauauugccacaugcggacucaucggccugaucacguuccuucugcucugugggagauccugcucuagcaaccuguauaaaggaguguacgaacugcagucccucgaccugaauauggagacccuuaacaugacaaugccucugucuuguaccaagaauaacagccaucacuauauucggguuggcaaugauacagggcucgaacugacccuuacaaacaccuccauccugaaucauaaauuuugcaaccucucugacgcgcacaagaaagaucuguacgaccaugcucugaugagcauuaucuccacguuccaccucagcauuccgaauuuuaaccaguaugaggccaugucuugugauuucaauggaggcaagaucuccgugcaguacaaccugagccacucuuaugccauugacgcugccaaucauugcggcaccgucgcuaacgggauccuucaaacauuuaugcgcauggccuggggaggcuccuacaucgcgcuggauagcgggagaggaaacugggacuguauuaugaccucuuaccaguaucucaucauucagaauacaaccugggagaaccacugccaguucucccggcccagcccuaucggcuaccuggggcuucugucccaacgcacgagagauauuuauaucucucggcgccuccugggaacauuuaccuggacacugagcgacuccgaaggcaaugccacccccggcggguacugucucaccagauggaugcugaucgaggcugaacuuaagugcuucggaaacacagccguggcuaaauguaaugagaagcaugaugaggaauuuugcgacaugcugcgccucuucgauuuuaacaaacaggccauuagccggcugaagucugaggcgcagauguccauccagcuuauuaauaaagccguuaacgcucugaucaaugaccaacucauuaugaagaaccaccugagagacaucaugggcaucccuuauugcaauuacagcaaguauugguaccugaaccacacgauuaccgggaaaacaucucuccccaaguguuggcuggugagcaauggauccuaccuuaacgaaacccauuucucugaugacaucgagcagcaggccgauaauaugauuacagaaaugcugcaaaaagaguauauggagcggcagggcaagaccccucucgggcuggucgaccuguucguguuuagcacguccuucuaccuuaucagcauuuuucuccgccuggugaaaaucccgacacacagacauauugucggaaagcccugcccuaaaccccaccggcugaaccauaugggcaucuguucuugcggccucuauaagcagccugggguucccgugcgcuggaagagaugaggacuagucccuguucccagagcccacuuuuuuuucuuuuuuugaaauaaaauagccugucuuucagaucuaaaaaaaaaaaaaaaaaaaaaaaaaaaaaaaaaaaaaaaaaaaaaaaaaaaaaaaaaaaaaaaaaaaaaaaaaaaaaaaaaaaaaaaaaaaaaaaaaaaa

SEQ ID NO: 14317 - RNA, 1721 nt, Artificial Sequence
  mRNA product Design a-1 (A100) comprising derived and/or modified sequence from LASV(Togo/2016/7082;Clade VI)__AMR44577__GPC (opt5)
aggagagucccgcagucggcguccagcggcucugcuuguucgugugugugucguugcaggccuuauucaagcuuaccaugggccagaucauuaccuucuuucaagaggugccccacgucaucgaagagguuaugaacauugugcugaucgcccucagccugcuugcuauucugaaggggguguacaaugucgccacaugcggaaucaucggccucgugacguuccuguuucuuugugggagauccugcucucugauuuauaaaggaagcuacgaacuccagacccuggagcugaacauggaaacacucaauaugaccaugccucuguccuguacaaagaacucuagccaucacuauauccggguuggcaaugagaccgggcuugagcugacacucaccaacacguccauuaucaaucauaaauucugcaaccugucugacgcgcacaagcgcaaucuuuacgaucaugcucugaugagcauucucuccaccuuucaccugagcaucccgaacuucaaucaguaugaagccaugucuugugacuuuaacggaggcaaaauuuccgugcaguacaaucugagccacgccuaugcugucgaugccgcugagcauugcggcacaguggccaacgggguucuccaaaccuucaugagaauggcguggggaggcucuuacaucgcccuggacuccgggcggggaaauugggauuguaucaugacaagcuaccaguaucuuauuauccagaacaccacgugggaagaccacugccaguuuucucgccccuccccuauuggcuaccuggggcuccugagccaaagaacacgggauaucuauauuucccgcagacuucugggaaccuucacauggacccucucugacagcgagggcaacgagacccccggcggguacugucugacacgguggaugcugaucgaagcugagcucaagugcuuuggaaauacggccguggcuaaguguaacgaaaaacaugaugaggaguucugcgacaugcugcgccuuuuugauuucaauaagcaggccauccagagacugaaauccgaagcgcagaugagcauucaacucaucaacaaggccgucaaugcucugauuaacgaccagcuuaucaugaaaaaucaucugcgggauaugaugggcauuccuuauugcaacuacucuaaguauugguaccucaaucacaccuccagcgggcgcacaucucugcccaaguguuggcuggugagcaacggauccuaccucaaugagacccacuucucugacgacaucgaacagcaagccgauaacaugaucacagagaugcugcagaaagaauauauugacagacagggcaagaccccucuugggcugguggaucucuuugucuucagcacguccuuuuaccugaucagcauuuuccugcaccuuaucaaaauuccgacacaucggcacaucguuggaaagcccugcccuaaaccccaucgccucaaucacaugggcauuuguucuugcggccuguauaagcagccuggggugcccaccagauggaaacggugaggacuagucccuguucccagagcccacuuuuuuuucuuuuuuugaaauaaaauagccugucuuucagaucuaaaaaaaaaaaaaaaaaaaaaaaaaaaaaaaaaaaaaaaaaaaaaaaaaaaaaaaaaaaaaaaaaaaaaaaaaaaaaaaaaaaaaaaaaaaaaaaaaaaa

SEQ ID NO: 14318 - RNA, 1721 nt, Artificial Sequence
  mRNA product Design a-1 (A100) comprising derived and/or modified sequence from LASV(KAK-428;Clade n.d. (VII))__ANH09740__GPC (opt5)
aggagagucccgcagucggcguccagcggcucugcuuguucgugugugugucguugcaggccuuauucaagcuuaccaugggccagaucgugaccuucuuucaagaggucccccacguuauugaagaggugaugaacaucgugcugauugcccucagccugcuugcuauccugaaggggcucuacaauuucgccacaugcggagucauuggccugaucacguuucuucugcucugugggagauccugcucugcgaccuauaaaggacaguacgaacugcagacacuggagcucaacauggaaagccugaauaugaccaugccucuuuccuguacaaagaacaauucucaucacuauauccgggcuggcaacaauaccgggcuggagcucacacugaccaacacgagcauuaucucccauaaauucugcaaucuuucugacgcccacaagaaaaaccuguacgaucauacccucaugagcauuaucacaaccuuucaccuguccauuccgaauuucaaccaguaugaggccaugagcugugacuuuaauggaggcaagaucucuauucaauacaaccugucccacagcuaugcuggcgaugccgcucagcauugcgggacaguggccaauggaguucuccagaccuucaugcgcauggcguggggcgggucuuaccuggcccuugacuccggaagacggggcugggauuguaucaucagcucuuaccaguaucugauuauccaaaacacgacaugggacgaucacugccaguuuucccgccccagcccuauuggguaccucggauucgugucccagaagaccagagacaucuauauuucucggcgccugcuuggcacauuuaccuggacccugagcgauuccgaaggccaugacaugcccgggggauacugucucacaagauggaugcugaucgaggcugaucugaaaugcuucggcaacacggccgucgcuaaguguaaugaaaaacacgacgaggaguuuugcgauauguggcgccucuucgacuucaacaagcaggccauccaacggcugaaagcggaagcccagaugaauauucagcuuaucaacaaggcugugaaugcccugauuaacgaccaacucaugaugaagaaucaccugagagauaucauggggauuccuuauugcaacuacagcaaauuuugguaucuuaauaacaccacaaccggacggacaucucugccccgcuguuggcucaucuccaauggcagcuaccugaacgagacccauuucucugacgauaucgaacagcaggcugacaauaugauuacggagaugcugcagaaggaauacauggauagacaagggaaaacaccucucggacugguugaccuuuuuguguucagcaccuccuuuuaucugaucaccauuuuccuccaccuggucaagaucccgacacaucggcacauugugggcaaacccugcccuaagccccaucgccugaaccacaugggcaucuguucuugcgggcuuuacaaacagccuggagugcccgucagauggaagcggugaggacuagucccuguucccagagcccacuuuuuuuucuuuuuuugaaauaaaauagccugucuuucagaucuaaaaaaaaaaaaaaaaaaaaaaaaaaaaaaaaaaaaaaaaaaaaaaaaaaaaaaaaaaaaaaaaaaaaaaaaaaaaaaaaaaaaaaaaaaaaaaaaaaaa

SEQ ID NO: 14319 - RNA, 1721 nt, Artificial Sequence; identical to SEQ ID NO: 14313
  mRNA product Design a-1 (A100) comprising derived and/or modified sequence from LASV(Pinneo-NIG-1969;Clade I)__AIT17836__GPC (opt5)

SEQ ID NO: 14320 - RNA, 1721 nt, Artificial Sequence
  mRNA product Design a-1 (A100) comprising derived and/or modified sequence from LASV(ISTH0009-NIG-2011;Clade II)__AIT17404__GPC (opt5)
aggagagucccgcagucggcguccagcggcucugcuuguucgugugugugucguugcaggccuuauucaagcuuaccaugggccagaucauuaccuucuuucaagaggugccccacgucaucgaagagguuaugaacauugugcugaucgcccucagccugcuugcuauucugaaggggaucuacaauguggccacaugcggacucuucggccuggucuccuuucuucugcucugugggagaucuugcagcacgaccuauaaaggaguguacgaacugcagacacuggagcucgacauggcgucccugaacaugaccaugccucuuucuuguacaaagaauaacagccaucacuauaucaugguuggcaaugaaaccgggcuggagcucacacugaccaacacguccauuaucaaucauaaauucugcaaccuuucugaugcucacaagaaaaaucuguacgaccaugcccucaugagcauuaucuccaccuuucaccugagcauuccgaacuucaaucaguaugaggccaugucuugugauuuuaacggaggcaagaucuccgugcaguacaaucugagccacgcuuaugccgucgacgcugccaaccauugcggcacaauugcgaauggggugcuccaaaccuucaugcggauggccuggggaggcucuuacaucgcucuggauuccgggaagggaagcugggacuguaucaugacaucuuaccaguaucuuauuauccagaacaccacgugggaagaucacugccaguuuucccgccccagcccuauuggcuaccuggggcuccugucccaaagaacacgggacaucuauauuucucgcagacuucugggaaccuucacauggacccucagcgauuccgagggcaacgaaacccccggcggguacugucugacacgguggaugcugaucgaggccgagcucaaaugcuuuggaaauacggcuguugccaaguguaacgaaaaacaugacgaggaguucugcgauaugcugcgccuuuuugacuucaauaagcaggcgaucagacggcugaaaaccgaagcccagaugagcauucagcucaucaacaaggcugugaaugcccugauuaacgaucaacuuaucaugaagaaucaucugcgcgacauuaugggcaucccuuauugcaacuacucuaaauauugguaccucaaucacacagucaccgggaagacaucccugcccagauguuggcuggugagcaacggaucuuaccucaaugaaacccacuucagcgacgauaucgagcagcaggcugacaacaugauuacggagcugcuucaaaaagaauauauggaucggcagggcaagacaccucuggggcucguggaccuguuugucuucuccaccucuuuuuaccugaucagcauuuuccuucaccucaucaaaauuccgacccaucgccacaucacaggaaagcccugcccuaaaccccauagacugaaucacaugggcauuuguuccugcggccuguauaagcacccugggguucccgugaaguggaaacggugaggacuagucccuguucccagagcccacuuuuuuuucuuuuuuugaaauaaaauagccugucuuucagaucuaaaaaaaaaaaaaaaaaaaaaaaaaaaaaaaaaaaaaaaaaaaaaaaaaaaaaaaaaaaaaaaaaaaaaaaaaaaaaaaaaaaaaaaaaaaaaaaaaaaa

SEQ ID NO: 14321 - RNA, 1721 nt, Artificial Sequence
  mRNA product Design a-1 (A100) comprising derived and/or modified sequence from LASV(ISTH2010-NIG-2012;Clade II)__AIT17482__GPC (opt5)
aggagagucccgcagucggcguccagcggcucugcuuguucgugugugugucguugcaggccuuauucaagcuuaccaugggccagaucauuaccuucuuucaagaggugccccacgucaucgaagagguuaugaacauugugcugaucgcccucagccugcuugcuauucugaaggggaucuacaauguggccacaugcggacucuucggccuggucuccuuucuucugcucugugggagaucuugcagcacgaccuauaaaggaguguacgaacugcagacacuggagcucgacauggcgucccugaacaugaccaugccucuuucuuguacaaagaauaacagccaucacuauaucaugguuggcaaugaaaccgggcuggagcucacacugaccaacacguccauuaucaaucauaaauucugcaaccuuucugaugcucacaagaaaaaucuguacgaccaugcccucaugagcauuaucuccaccuuucaccugagcauuccgaacuucaaucaguaugaggccaugucuugugauuuuaacggaggcaagaucuccgugcaguacaaucugagccacgcuuaugccgucgacgcugccaaccauugcggcacaauugcgaauggggugcuccaaaccuucaugcggauggccuggggaggcucuuacaucgcucuggauuccgggaagggaagcugggacuguaucaugacaucuuaccaguaucuuauuauccagaacauuaccugggaagaucacugccaguuuucccgccccagcccuaucggcuaccuggggcuccugucccaaagaacgcgggacauuuauaucucucgcagacuucugggaacauucaccuggacacucagcgauuccgagggcaacgaaacccccggcggguacugucugacccgguggaugcugaucgaggccgagcucaaaugcuuuggaaauacagcuguugccaaguguaacgaaaaacaugacgaggaguucugcgauaugcugcgccuuuuugacuucaauaagcaggcgauuagacggcugaaaacggaagcccagaugagcauccagcucauuaacaaggcugugaaugcccugaucaacgaucaacuuauuaugaagaaucaucugcgcgacaucaugggcaucccuuauugcaacuacucuaaauauugguaccucaaucacaccgucacagggaagaccucccugcccagauguuggcuggugagcaacggaucuuaccucaaugaaacacacuucagcgacgauauugagcagcaggcugacaacaugaucaccgagcugcuucaaaaagaauauauugaucggcagggcaagacgccucuggggcucguggaccuguuugucuucuccacaucuuuuuaccugaucagcauuuuccuucaccucguuaaaaucccgacccaucgccacguggugggaaagcccugcccuaaaccccauagacugaaucacaugggcauuuguuccugcggccuguauaagcacccugggguccccgugaaguggaaacggugaggacuagucccuguucccagagcccacuuuuuuuucuuuuuuugaaauaaaauagccugucuuucagaucuaaaaaaaaaaaaaaaaaaaaaaaaaaaaaaaaaaaaaaaaaaaaaaaaaaaaaaaaaaaaaaaaaaaaaaaaaaaaaaaaaaaaaaaaaaaaaaaaaaaa

SEQ ID NO: 14322 - RNA, 1721 nt, Artificial Sequence
  mRNA product Design a-1 (A100) comprising derived and/or modified sequence from LASV(Lassa virus/H.sapiens-wt/NGA/2015/ISTH_0543;Clade II)__AVO03639__GPC (opt5)
aggagagucccgcagucggcguccagcggcucugcuuguucgugugugugucguugcaggccuuauucaagcuuaccaugggccagaucauuaccuucuuucaagaggugccccacgucaucgaagagguuaugaacauugugcugaucgcccucagccugcuugcuauucugaaggggaucuacaauguggccacaugcggacucuucggccuggucuccuuucuucugcucugugggagaucuugcagcacgaccuauaaaggaguguacgaacugcagacacuggagcucgacauggcgaaccugaauaugaccaugccucuuuccuguacaaagaacaauucucaucacuauaucaugguuggcaacgaaaccgggcuggagcucacacugaccaauacgagcauuaucaaccauaaauucugcaaucuuuccgaugcucacaagaaaaaccuguacgaccaugcccucaugucuauuaucagcaccuuucaccuguccauuccgaauuucaaccaguaugaggccaugagcugugauuuuaauggaggcaagaucucugugcaguacaaccugucccacacauaugcugucgacgccgcuaaucauugcggcaccauugccaacggggugcuccaaacauucaugcggauggcguggggaggcagcuacaucgcccuggauucugggaagggauccugggacuguaucaugaccagcuaccaguaucuuguuauucagaacacgacaugggaagaucacugccaguuuucucgccccuccccuaucggcuaccuggggcuccugagccaaagaacccgggacauuuauaucucccgcagacuucugggaacauucaccuggacccucucugauagcgagggcaaugaaacacccggcggguacugucugacgcgguggaugcugauugaggcugagcucaaaugcuuuggaaacaccgccguggcuaaguguaaugaaaaacaugacgaggaguucugcgauaugcugcgccuuuuugacuucaacaagcaggccaucagacggcugaaaacagaagcgcagauguccauccagcucauuaauaaggccgucaacgcucugaucaaugaucaacuuauuaugaagaaccaucugcgcgacaucaugggcauuccuuauugcaauuacagcaaauauugguaccucaaccacaccgugacagggaagaccucucugcccagauguuggcugguguccaauggaagcuaccucaacgaaacgcacuucucugacgauaucgagcagcaggccgacaauaugaucacagagcugcuucaaaaagaauauauugaucggcagggcaagaccccucuggggcucgucgaccuguuuguuuucagcaccuccuuuuaccugaucucuauuuuccuucaccucgugaaaaucccgacacaucgccacauuaccggaaagcccugcccuaaaccccauagacugaaccacaugggcaucuguagcugcggccuguauaagcacccuggggugcccgucaaguggaaacggugaggacuagucccuguucccagagcccacuuuuuuuucuuuuuuugaaauaaaauagccugucuuucagaucuaaaaaaaaaaaaaaaaaaaaaaaaaaaaaaaaaaaaaaaaaaaaaaaaaaaaaaaaaaaaaaaaaaaaaaaaaaaaaaaaaaaaaaaaaaaaaaaaaaaa

SEQ ID NO: 14323 - RNA, 1721 nt, Artificial Sequence
  mRNA product Design a-1 (A100) comprising derived and/or modified sequence from LASV(Lassa virus/H.sapiens-wt/NGA/2016/ISTH_0009;Clade II)__AVO03571__GPC (opt5)
aggagagucccgcagucggcguccagcggcucugcuuguucgugugugugucguugcaggccuuauucaagcuuaccaugggccagaucauuaccuucuuucaagaggugccccacgucaucgaagagguuaugaacauugugcugaucgcccucagccugcuugcuauucugaaggggaucuacaauguggccacaugcggacuccugggccuugucuccuuccugcuccugugugggagaucuugcagcacgaccuauaaaggaguguacgaacugcagacacucgagcuggacauggcgucccuuaacaugaccaugccucugucuuguacaaagaauaacagccaucacuauaucaugguuggcaaugaaaccgggcucgagcugacacuuaccaacacguccauuaucaaucauaaauuuugcaaccugucugaugcucacaagaaaaaucucuacgaccaugcccugaugagcauuaucuccaccuuccaccugagcauuccgaacuuuaaucaguaugaggccaugucuugugauuucaacggaggccggaucuccgugcaguacaaucucagccacucuuaugcugucgacgccgcuaaccauugcggcacaauugccaauggggugcugcaaaccuuuaugcgcauggcguggggaggcuccuacaucgcccuugauagcgggaagggaucuugggacuguaucaugacauccuaccaguaucugauuauccagaacaccacgugggaagaucacugccaguucagcagacccuccccuauuggcuaccucgggcugcuuucucaacggacacgcgacaucuauauuagcagacggcugcucggaaccuuuacauggacccuguccgauagcgagggcaacgaaacccccggcggguacugucugacacgcuggaugcucaucgaggcugagcugaagugcuucggaaauacggccguugcuaaauguaacgaaaagcaugacgaggaauuuugcgauaugcuuagacuguucgacuuuaauaaacaggccauccggcgccucaagaccgaggcgcagaugucuauucagcugaucaacaaagccgugaaugcucuuauuaacgaucaacugaucaugaagaaucaccucagagacauuaugggcaucccuuauugcaacuacuccaaguauugguaccugaaucacacagucaccgggaaaacaagccugccccgguguuggcucgugucuaacggaagcuaccugaaugaaacccauuucuccgacgauaucgagcagcaggccgacaacaugauuacggagcuucugcaaaaggaauauaucgaucgccagggcaaaacaccucucgggcugguggaccuguucgucuuuucuaccagcuucuaccuuauuuccaucuuucuccaccugguuaagauuccgacccauagacacaucacaggaaaacccugcccuaagccccaucggcugaaucacaugggcauuuguagcugcggccucuauaaccacccuggggugcccgugaaauggaagcgcugaggacuagucccuguucccagagcccacuuuuuuuucuuuuuuugaaauaaaauagccugucuuucagaucuaaaaaaaaaaaaaaaaaaaaaaaaaaaaaaaaaaaaaaaaaaaaaaaaaaaaaaaaaaaaaaaaaaaaaaaaaaaaaaaaaaaaaaaaaaaaaaaaaaaa

SEQ ID NO: 14324 - RNA, 1721 nt, Artificial Sequence
  mRNA product Design a-1 (A100) comprising derived and/or modified sequence from LASV(Lassa virus/H.sapiens-wt/NGA/2016/ISTH_0017;Clade II)__AVO03567__GPC (opt5)
aggagagucccgcagucggcguccagcggcucugcuuguucgugugugugucguugcaggccuuauucaagcuuaccaugggccagaucauuaccuucuuucaagaggugccccacgucaucgaagagguuaugaacauugugcugaucgcccucagccugcuugcuauucugaaggggaucuacaauguggccacaugcggacucuucggccuggucuccuuucuucugcucugugggagaucuugcagcacgaccuauaaaggaguguacgaacugcagacacuggagcucgacauggcgucccugaacaugaccaugccucuuucuuguacaaagaauaacagccaucacuauaucaugguuggcaaugaaaccgggcuggagcucacacugaccaacacguccauuaucaaucauaaauucugcaaccuuucugaugcucacaagaaaaaucuguacgaccaugcccucaugagcauuaucuccaccuuucaccugagcauuccgaacuucaaucaguaugaggccaugucuugugauuuuaacggaggcaagaucuccgugcaguacaaucugagccacacauaugcuauugacgccgcuaaccauugcggcaccaucgccaaugggguccuccaaacauucaugcggauggcguggggaggcucuuacaucgcccuggauuccgggaagggaagcugggacuguauuaugaccucuuaccaguaucuuaucauucagaacacgacaugggaagaucacugccaguuuucccgccccagcccuaucggcuaccuggggcuccugucccaaagaacccgggacauuuauaucucucgcagacuucugggaacauucaccuggacccucagcgauuccgagggcaacgaaacacccggcggguacugucugacgcgguggaugcugaucgaggcugagcucaaaugcuuuggaaauaccgccguggcuaaguguaacgaaaaacaugacgaggaguucugcgauaugcugcgccuuuuugacuucaauaagcaggccauuagacggcugaaaacagaagcgcagaugagcauccagcucauuaacaaggccguuaaugcucugaucaacgaucaacuuauuaugaagaaucaucugcgcgacaucaugggcaucccuuauugcaacuacucuaaauauugguaccucaaucacaccgugacagggaagaccucccugcccagauguuggcuggucagcaacggaucuuaccucaaugaaacgcacuucagcgacgauauugagcagcaggccgacaacaugaucacagagcugcuucaaaaagaauauauggaucggcagggcaagaccccucuggggcucguggaccuguuuguguucuccaccucuuuuuaccugauuagcaucuuccuucaccucguccgcauuccgacacauagacacguuaucggaaaacccugcccuaagccccaucggcugaaucacaugggcauuuguuccugcggccuguauaaacacccuggggugcccgugaaguggaagcgcugaggacuagucccuguucccagagcccacuuuuuuuucuuuuuuugaaauaaaauagccugucuuucagaucuaaaaaaaaaaaaaaaaaaaaaaaaaaaaaaaaaaaaaaaaaaaaaaaaaaaaaaaaaaaaaaaaaaaaaaaaaaaaaaaaaaaaaaaaaaaaaaaaaaaa

SEQ ID NO: 14325 - RNA, 1721 nt, Artificial Sequence
  mRNA product Design a-1 (A100) comprising derived and/or modified sequence from LASV(Lassa virus/H.sapiens-wt/NGA/2018/ISTH_0959;Clade II)__AVV65099__GPC (opt5)
aggagagucccgcagucggcguccagcggcucugcuuguucgugugugugucguugcaggccuuauucaagcuuaccaugggccagaucauuaccuucuuucaagaggugccccacgucaucgaagagguuaugaacauugugcugaucgcccucagccugcuugcuauucugaaggggaucuacaauguggucacaugcggacucuucggccugguguccuuucuucugcucugugggagaucuugcagcacgaccuauaaaggaguuuacgaacugcagacacuggagcucgacauggccucccugaacaugaccaugccucuuucuuguacaaagaauaacagccaucacuauaucauggugggcaaugaaaccgggcuggagcucacacugaccaacacguccauuaucaaucauaaauucugcaaccuuucugaugcgcacaagaaaaaucuguacgaccaugcucucaugagcauuaucuccaccuuucaccugagcauuccgaacuucaaucaguaugaggccaugucuugugauuuuaacggaggcaagaucuccguccaguacaaucugagccacgccuaugcuauugacgccgcuaaccauugcggcacaaucgccaauggggugcuccaaaccuucaugcggauggcguggggaggcucuuacaucgcccuggauuccgggaagggaagcugggacuguauuaugacaucuuaccaguaucuuaucauucagaacaccacgugggaagaucacugccaguuuucccgccccagcccuaucggcuaccuggggcuccugucccaaagaacacgggacauuuauaucucucgcagacuucugggaaccuucacauggacccucagcgauuccgagggcaacgaaacccccggcggguacugucugacacgguggaugcugaucgaggcugagcucaaaugcuuuggaaauacggccguugcuaaguguaacgaaaaacaugacgaggaguucugcgauaugcugcgccuuuuugacuucaauaagcaggccauuagacggcugaaaaccgaagcgcagaugagcauccagcucauuaacaaggccgugaaugcucugaucaacgaucaacuuauuaugaagaaucaucugcgcgacaucaugggcaucccuuauugcaacuacucuaaauauugguaccucaaucacacagucaccgggaagacaucccugcccagauguuggcuggugagcaacggaucuuaccucaaugaaacccacuucagcgacgauauugagcagcaggccgacaacaugaucacggagcugcuucaaaaagaauauauugaucggcagggcaagacaccucuggggcucguggaccuguuugucuucuccaccucuuuuuaccugaucagcauuuuccuucaccucguuaaaaucccgacccaucgccacgugauuggaaagcccugcccuaaaccccauagacugaaucacaugggcaucuguuccugcggccuguauaagcacccuggggugcccgucaaguggaaacggugaggacuagucccuguucccagagcccacuuuuuuuucuuuuuuugaaauaaaauagccugucuuucagaucuaaaaaaaaaaaaaaaaaaaaaaaaaaaaaaaaaaaaaaaaaaaaaaaaaaaaaaaaaaaaaaaaaaaaaaaaaaaaaaaaaaaaaaaaaaaaaaaaaaaa

SEQ ID NO: 14326 - RNA, 1721 nt, Artificial Sequence
  mRNA product Design a-1 (A100) comprising derived and/or modified sequence from LASV(LASV003-NIG-2008;Clade II)__AIT17580__GPC (opt5)
aggagagucccgcagucggcguccagcggcucugcuuguucgugugugugucguugcaggccuuauucaagcuuaccaugggccagaucauuaccuucuuucaagaggugccccacgucaucgaagagguuaugaacauugugcugaucgcccucagccugcuugcuauucugaaggggaucuacaauguggccacaugcggacucuucggccuggucuccuuucuucugcucugugggagaucuugcagcacgaccuauaaaggaguguacgaacugcagacacuggagcucgacauggcgucccugaacaugaccaugccucuuucuuguacaaagaauaacagccaucacuauaucaugguuggcaaugaaaccgggcuggagcucacacugaccaacacguccauuaucaaucauaaauucugcaaccuuucugaugcucacaagaaaaaucuguacgaccaugcccucaugagcauuaucuccaccuuucaccugagcauuccgaacuucaaucaguaugaggccaugucuugugauuuuaacggaggcaagaucuccgugcaguacaaucugagccacacauaugcugucgacgccgcuaaccauugcggcaccauugccaauggggugcuccaaacauucaugcggauggcguggggaggcucuuacaucgcccuggauuccgggaagggaagcugggacuguaucaugaccucuuaccaguaucuuauuauccagaacacgacaugggaagaucacugccaguuuucccgccccagcccuauuggcuaccuggggcuccugucccaaagaacccgggacaucuauauuucucgcagacuucugggaacauucaccuggacccucagcgauuccgagagcaacgaaacacccggcggcuacugucugacgcgguggaugcugaucgaggcugagcucaaaugcuuugggaauaccgccguugcuaaguguaacgaaaaacaugacgaggaguucugcgauaugcugcgccuuuuugacuucaauaagcaggccaucagacggcugaaagcggaagcccagaugucuauucagcucaucaacaaggcugugaaugcccugauuaacgaucaacuuaucaugaagaaucaucugcgcgacauuaugggaaucccuuauugcaacuacuccaaauauugguaccucaaucacacagucaccggcagaacaagccugccccgguguuggcuggugucuaacgggagcuaccucaaugaaacccacuucuccgacgauaucgagcagcaggcugacaacaugauuacggagcugcuucaaaaggaauauauggaucgccagggaaaaacaccucugggccucguggaccuguuugucuucucuaccagcuuuuaccugaucuccauuuuccuucaccucguuaagaucccgacccauagacacgugauugggaaacccugcccuaagccccaucggcugaaucacaugggaaucuguagcugcggccuguauaaacacccuggcgugcccgucaaguggaagcgcugaggacuagucccuguucccagagcccacuuuuuuuucuuuuuuugaaauaaaauagccugucuuucagaucuaaaaaaaaaaaaaaaaaaaaaaaaaaaaaaaaaaaaaaaaaaaaaaaaaaaaaaaaaaaaaaaaaaaaaaaaaaaaaaaaaaaaaaaaaaaaaaaaaaaa

SEQ ID NO: 14327 - RNA, 1721 nt, Artificial Sequence
  mRNA product Design a-1 (A100) comprising derived and/or modified sequence from LASV(LASV035-NIG-2009;Clade II)__AIT17588__GPC (opt5)
aggagagucccgcagucggcguccagcggcucugcuuguucgugugugugucguugcaggccuuauucaagcuuaccaugggccagaucauuaccuucuuucaagaggugccccacgucaucgaagagguuaugaacauugugcugaucgcccucagccugcuugcuauucugaaggggaucuacaauguggccacaugcggacucuucggccuggucuccuuucuucugcucugugggagaucuugcagcacgaccuauaaaggaguguacgaacugcagacacuggagcucgacauggcgucccugaacaugaccaugccucuuucuuguacaaagaauaacagccaucacuauaucaugguuggcaaugaaaccgggcuggagcucacacugaccaacacguccauuaucaaucauaaauucugcaaccuuucugaugcucacaagaaaaaucuguacgaccaugcccucaugagcauuaucuccaccuuucaccugagcauuccgaacuucaaucaguaugaggccaugucuugugauuuuaacggaggcaagaucuccgugcaguacaaucugagccacgcuuaugccgucgacgcugccaaccauugcggcacaauugcgaauggggugcuccaaaccuucaugcggauggccuggggaggcucuuacaucgcucuggauuccgggaagggaagcugggacuguaucaugacaucuuaccaguaucuuauuauccagaacaccacgugggaagaucacugccaguuuucccgccccagcccuauuggcuaccuggggcuccugucccaaagaacacgggacaucuauauuucucgcagacuucugggaaccuucacauggacccucagcgauuccgagggcaacgaaacccccggcggguacugucugacacgguggaugcugaucgaggccgagcucaaaugcuuuggaaauacggcuguugccaaguguaacgaaaaacaugacgaggaguucugcgauaugcugcgccuuuuugacuucaauaagcaggcgaucagacggcugaaagccgaagcucagaugagcauucagcucaucaacaaggccgugaaugcucugauuaacgaucaacuuaucaugaagaaucaucugcgcgacauuaugggcaucccuuauugcaacuacucuaaauauugguaccucaaucacaccgucacagggaagaccucccugcccagauguuggcuggugagcaacggaucuuaccucaaugaaacacacuucagcgacgauaucgagcagcaggccgacaacaugauuaccgagcugcuucaaaaagaauauaucgaucggcagggcaagacgccucuggggcucguggaccuguuugucuucuccacaucuuuuuaccugauuagcaucuuccuucaccucguuaaaauuccgacccaucgccacgugaucggaaagcccugcccuaaaccccauagacugaaucacaugggcauuuguuccugcggccuguauaagcacccuggggugcccgucaaguggaaacggugaggacuagucccuguucccagagcccacuuuuuuuucuuuuuuugaaauaaaauagccugucuuucagaucuaaaaaaaaaaaaaaaaaaaaaaaaaaaaaaaaaaaaaaaaaaaaaaaaaaaaaaaaaaaaaaaaaaaaaaaaaaaaaaaaaaaaaaaaaaaaaaaaaaaa

SEQ ID NO: 14328 - RNA, 1721 nt, Artificial Sequence
  mRNA product Design a-1 (A100) comprising derived and/or modified sequence from LASV(LASV1000-NIG-2009;Clade II)__AIT17782__GPC (opt5)
aggagagucccgcagucggcguccagcggcucugcuuguucgugugugugucguugcaggccuuauucaagcuuaccaugggccagaucauuaccuucuuucaagaggugccccacgucaucgaagagguuaugaacauugugcugaucgcccucagccugcuugcuauucugaaggggaucuacaauguggccacaugcggacucuucggccuggucuccuuucuucugcucugugggagaucuugcagcacgaccuauaaaggaguguacgaacugcagacacuggagcucgacauggcgucccugaacaugaccaugccucuuucuuguacaaagaauaacagccaucacuauaucaugguuggcaaugaaaccgggcuggagcucacacugaccaacacguccauuaucaaucauaaauucugcaaccuuucugaugcucacaagaaaaaucuguacgaccaugcccucaugagcauuaucuccaccuuucaccugagcauuccgaacuucaaucaguaugaggccaugucuugugauuuuaacggaggcaagaucuccgugcaguacaaucugagccacacauaugcugucgacgccgcuaaccauugcggcaccauugccaauggggugcuccaaacauucaugcggauggcguggggaggcucuuacaucgcccuggauuccgggaagggaagcugggacuguaucaugaccucuuaccaguaucuuauuauccagaacacgacaugggaagaucacugccaguuuucccgccccagcccuauuggcuaccuggggcuccugucccaaagaacccgggacaucuauauuucucgcagacuucugggaacauucaccuggacccucagcgauuccgagggcaacgaaacacccggcggguacugucugacgcgguggaugcugaucgaggcugagcucaaaugcuuuggaaauaccgccguugcuaaguguaacgaaaaacaugacgaggaguucugcgauaugcugcgccuuuuugacuucaauaagcaggccaucaaaagacugaagacagaagcgcagaugagcauucagcucaucaacaaggccgugaaugcucugauuaacgaucaacuuaucaugaaaaaucaucugcgggacauuaugggcaucccuuauugcaacuacucuaaguauugguaccucaaucacaccgucacagggaaaaccucccugccccgcuguuggcuggugagcaacggaucuuaccucaaugaaacgcacuucagcgacgauaucgagcagcaggccgacaacaugauuacagagcugcuucaaaaggaauauaucgauagacagggcaaaaccccucuggggcucguggaccuguuugucuucuccaccucuuuuuaccugauuagcaucuuccuucaccucguuaagauuccgacacaucggcacguggugggaaaacccugcccuaagccccaucgccugaaucacaugggcaucuguuccugcggccuguauaagcacccugggguccccgugaaauggaagagaugaggacuagucccuguucccagagcccacuuuuuuuucuuuuuuugaaauaaaauagccugucuuucagaucuaaaaaaaaaaaaaaaaaaaaaaaaaaaaaaaaaaaaaaaaaaaaaaaaaaaaaaaaaaaaaaaaaaaaaaaaaaaaaaaaaaaaaaaaaaaaaaaaaaaa

SEQ ID NO: 14329 - RNA, 1721 nt, Artificial Sequence
  mRNA product Design a-1 (A100) comprising derived and/or modified sequence from LASV(LASV221-NIG-2010;Clade II)__AIT17624__GPC (opt5)
aggagagucccgcagucggcguccagcggcucugcuuguucgugugugugucguugcaggccuuauucaagcuuaccaugggccagaucauuaccuucuuucaagaggugccccacgucaucgaagagguuaugaacauugugcugaucgcccucagccugcuugcuauucugaaggggaucuacaauguggccacaugcggacucuucggccuggucuccuuucuucugcucugugggagaucuugcagcacgaccuauaaaggaguguacgaacugcagacacuggagcucgacauggcgucccugaacaugaccaugccucuuucuuguacaaagaauaacagccaucacuauaucaugguuggcaaugaaaccgggcuggagcucacacugaccaacacguccauuaucaaucauaaauucugcaaccuuucugaugcucacaagaaaaaucuguacgaccaugcccucaugagcauuaucuccaccuuucaccugagcauuccgaacuucaaucaguaugaggccaugucuugugauuuuaacggaggcaagaucuccgugcaguacaaucugagccacacauaugcuauugacgccgcuaaccauugcggcaccaucgccaaugggguccuccaaacauucaugcggauggcguggggaggcucuuacaucgcccuggauuccgggaagggaagcugggacuguauuaugaccucuuaccaguaucuuaucauucagaacacgacaugggaagaucacugccaguuuucccgccccagcccuaucggcuaccuggggcuccugucccaaagaacccgggacauuuauaucucucgcagacuucugggaacauucaccuggacccucagcgauuccgagggcaacgaaacacccggcggguacugucugacgcgguggaugcugaucgaggcugagcucaaaugcuuuggaaauaccgccguggcuaaguguaacgaaaaacaugacgaggaguucugcgauaugcugcgccuuuuugacuucaauaagcaggccauuagacggcugaaaacagaagcgcagaugagcauccagcucauuaacaaggccguuaaugcucugaucaacgaucaacuuauuaugaagaaucaucugcgcgacaucaugggcaucccuuauugcaacuacucuaaauauugguaccucaaucacaccgugacagggaagaccucccugcccagauguuggcuggucagcaacggaucuuaccucaaugaaacgcacuucagcgacgauauugagcagcaggccgacaacaugaucacagagaugcugcaaaaagaauauauggaucggcagggcaagaccccucuugggcugguggaccucuuuguguucuccaccucuuuuuaccugauuagcaucuuccugcaccuugucaaaauuccgacacaucgccacguuaucggaaagcccugcccuaaaccccauagacucaaucacaugggcauuuguuccugcggccuguauaagcacccuggggugcccgugaaguggaaacggugaggacuagucccuguucccagagcccacuuuuuuuucuuuuuuugaaauaaaauagccugucuuucagaucuaaaaaaaaaaaaaaaaaaaaaaaaaaaaaaaaaaaaaaaaaaaaaaaaaaaaaaaaaaaaaaaaaaaaaaaaaaaaaaaaaaaaaaaaaaaaaaaaaaaa

SEQ ID NO: 14330 - RNA, 1721 nt, Artificial Sequence
  mRNA product Design a-1 (A100) comprising derived and/or modified sequence from LASV(LASV237-NIG-2010;Clade II)__AIT17638__GPC (opt5)
aggagagucccgcagucggcguccagcggcucugcuuguucgugugugugucguugcaggccuuauucaagcuuaccaugggccagaucauuaccuucuuucaagaggugccccacgucaucgaagagguuaugaacauugugcugaucgcccucagccugcuugcuauucugaaggggaucuacaauguggccacaugcggacucuucggccuggucuccuuucuucugcucugugggagaucuugcagcacgaccuauaaaggaguguacgaacugcagacacuggagcucgacauggcgucccugaacaugaccaugccucuuucuuguacaaagaauaacagccaucacuauaucaugguuggcaaugaaaccgggcuggagcucacacugaccaacacguccauuaucaaucauaaauucugcaaccuuucugaugcucacaagaaagaccuguacgaucaugcccucaugagcauuaucuccaccuuucaccugagcauuccgaauuucaaccaguaugaggccaugucuugugacuuuaauggaggcaagaucuccgugcaguacaaccugagccacacauaugcugucgaugccgcuaaucauugcggcaccauugccaacggggugcuccaaacauucaugcggauggcguggggaggcucuuacaucgcccuggacuccgggaagggaagcugggauuguaucaugaccucuuaccaguaucuuauuauccagaauacgacaugggaagaccacugccaguuuucccgccccagcccuauuggcuaccuggggcuccugucccaaagaacccgggauaucuauauuucucgcagacuucugggaacauucaccuggacccucagcgacuccgagggcaacgaaacacccggcggguacugucugacgcgguggaugcugaucgaggcugagcucaaaugcuuuggaaacaccgccguugcuaaguguaaugaaaaacaugaugaggaguucugcgacaugcugcgccuuuuugauuucaacaagcaggccaucagacggcugaaaacagaagcgcagaugagcauucagcucaucaauaaggccgugaacgcucugauuaaugaccaacuuaucaugaagaaccaucugcgcgacauuaugggcaucccuuauugcaauuacucuaaauauugguaccucaaccacaccgucacagggaagaccucccugcccagauguuggcuggugagcaauggaucuuaccucaacgaaacgcacuucagcgaugacaucgagcagcaggccgauaauaugauuacagagcugcuucaaaaagaauauauggaccggcagggcaagaccccucuggggcucguggaucuguuugucuucuccaccucuuuuuaccugaucagcauuuuccuucaccucaucaaaauuccgacacaucgccacaucaccggaaagcccugcccuaaaccccauagacugaaccacaugggcauuuguuccugcggccuguauaagcacccugggguucccgugaaguggaaacggugaggacuagucccuguucccagagcccacuuuuuuuucuuuuuuugaaauaaaauagccugucuuucagaucuaaaaaaaaaaaaaaaaaaaaaaaaaaaaaaaaaaaaaaaaaaaaaaaaaaaaaaaaaaaaaaaaaaaaaaaaaaaaaaaaaaaaaaaaaaaaaaaaaaaa

SEQ ID NO: 14331 - RNA, 1721 nt, Artificial Sequence
  mRNA product Design a-1 (A100) comprising derived and/or modified sequence from LASV(LASV253-NIG-2011;Clade II)__AIT17670__GPC (opt5)
aggagagucccgcagucggcguccagcggcucugcuuguucgugugugugucguugcaggccuuauucaagcuuaccaugggccagaucauuaccuucuuucaagaggugccccacgucaucgaagagguuaugaacauugugcugaucgcccucagccugcuugcuauucugaaggggaucuacaauguggccacaugcggacucuucggccuggucuccuuucuucugcucugugggagaucuugcagcacgaccuauaaaggaguguacgaacugcagacacuggagcucgacauggcgucccugaacaugaccaugccucuuucuuguacaaagaauaacagccaucacuauaucaugguuggcaaugaaaccgggcuggagcucacacugaccaacacguccauuaucaaucauaaauucugcaaccuuucugaugcucacaagaaaaaucuguacgaccaugcccucaugagcauuaucuccaccuuucaccugagcauuccgaacuucaaucaguaugaggccaugucuugugauuuuaacggaggcaagaucuccgugcaguacaaucugagccacacauaugcugucgacgccgcuaaccauugcggcaccauugccaauggggugcuccaaacauucaugcggauggcguggggaggcucuuacaucgcccuggauuccgggaagggaagcugggacuguaucaugaccucuuaccaguaucuuauuauccagaacacgacaugggaagaucacugccaguuuucccgccccagcccuauuggcuaccuggggcuccugucccaaagaacccgggacaucuauauuucucgcagacuucugggaacauucaccuggacccucagcgauuccgagggcaacgaaacacccggcggguacugucugacgcgguggaugcugaucgaggcugagcucaaaugcuuuggaaauaccgccguugcuaaguguaacgaaaaacaugacgaggaguucugcgauaugcugcgccuuuuugacuucaauaagcaggccaucagacggcugaaagcggaagcccagaugagcauucagcucaucaacaaggcugugaaugcccugauuaacgaucaacuuaucaugaagaaucaucugcgcgacauuaugggcaucccuuauugcaacuacucuaaauauugguaccucaaucacacagucaccgggagaacaucccugccccgguguuggcuggugagcaacggaucuuaccucaaugaaacccacuucagcgacgauaucgagcagcaggcugacaacaugauuacggagcugcuucaaaaggaauauaucgaucgccagggcaaaacaccucuggggcucguggaccuguuugucuucuccaccucuuuuuaccugauuagcaucuuccuucaccucguuaagauuccgacccauagacacaucauuggaaaacccugcccuaagccccaucggcugaaucacaugggcaucuguuccugcggccuguauaaacacccuggggugcccgugaaguggaagcgcugaggacuagucccuguucccagagcccacuuuuuuuucuuuuuuugaaauaaaauagccugucuuucagaucuaaaaaaaaaaaaaaaaaaaaaaaaaaaaaaaaaaaaaaaaaaaaaaaaaaaaaaaaaaaaaaaaaaaaaaaaaaaaaaaaaaaaaaaaaaaaaaaaaaaa

SEQ ID NO: 14332 - RNA, 1721 nt, Artificial Sequence
  mRNA product Design a-1 (A100) comprising derived and/or modified sequence from LASV(LASV254-NIG-2011;Clade II)__AIT17674__GPC (opt5)
aggagagucccgcagucggcguccagcggcucugcuuguucgugugugugucguugcaggccuuauucaagcuuaccaugggccagaucauuaccuucuuucaagaggugccccacgucaucgaagagguuaugaacauugugcugaucgcccucagccugcuugcuauucugaaggggaucuacaauguggccacaugcggacucuucggccuggucuccuuucuucugcucugugggagaucuugcagcacgaccuauaaaggaguguacgaacugcagacacuggagcucgacaugaccaaccugaauaugacaaugccucuuuccuguaccaagaacaauucucaucacuauaucaugguuggcaacgaaacagggcuggagcucacccugacgaauaccagcauuaucaaccauaaauucugcaaucuuuccgaugcgcacaagaaaaaccuguacaaucaugcucucaugucuauuaucagcacauuucaccuguccauuccgaacuucaaucaguaugaggccaugagcugugacuuuaacggaggcaagaucucugugcaguacaaucugucccacagcuaugccgucgaugcugccaaccauugcggcaccauugcuaacggggugcuccaaacauucaugcggauggccuggggaggcucuuacaucgcgcuggacuccgggaagggaaauugggauuguaucaugaccagcuaccaguaucuuauuauccagaacacgacaugggaagaccacugccaguuuucucgccccuccccuauuggcuaccuggggcuccugagccaaagaacccgggauaucuauauuucccgcagacuucugggaacauucaccuggacccucucugacagcgagggcaaugaaacacccggcggguacugucugacgcgguggaugcugaucgaggccgagcucaaaugcuuuggaaacaccgcuguugccaaguguaaugaaaaacaugaugaggaguucugcgacaugcugcgccuuuuugauuucaacaagcaggcuaucagacggcugaaaacagaagcccaggcgaauauucagcucaucaacaaggccgugaaugcucugauuaacgaccaacuuaucaugaagaaucaucugcgcgauauuaugggcaucccuuauugcaacuacuccaaauauugguaccucaaucacaccgucacagggaagaccagccugcccagauguuggcuggugucuaacggauccuaccucaaugaaacgcacuucagcgacgacaucgagcagcaggccgauaacaugauuacagagcugcuucaaaaagaauauauggaccggcagggcaagaccccucuggggcucguggaucuguuugucuucucuaccagcuuuuaccugaucuccauuuuccuucaccucguuaaaaucccgacacaucgccacgugauuggaaagcccugcccuaaaccccauagacugaaccacaugggcaucuguucuugcggccuguauaagcacccuggggugcccgucaaguggaaacggugaggacuagucccuguucccagagcccacuuuuuuuucuuuuuuugaaauaaaauagccugucuuucagaucuaaaaaaaaaaaaaaaaaaaaaaaaaaaaaaaaaaaaaaaaaaaaaaaaaaaaaaaaaaaaaaaaaaaaaaaaaaaaaaaaaaaaaaaaaaaaaaaaaaaa

SEQ ID NO: 14333 - RNA, 1721 nt, Artificial Sequence
  mRNA product Design a-1 (A100) comprising derived and/or modified sequence from LASV(Nig08-A19;Clade III)__ADU56618__GPC (opt5)
aggagagucccgcagucggcguccagcggcucugcuuguucgugugugugucguugcaggccuuauucaagcuuaccaugggccagaucgugaccuucuuucaagaggucccccacguuauugaagaggugaugaacaucgugcugauugcccucagcauccuggcuauucuuaaggggcuguacaauaucgccacaugcggacucaucggccuggucacguuccuucugcucuccgggagaucuuguagcaugaccuauaaaggaguguacgaacugcagacacuggagcucaacaugaauacccugaacaugacaaugccucuuuccugcaccaagaauaacucucaucacuauauuaugguuggcaaugaaacagggcuggagcucacccugacgaacaccagccuucugcaucacaaauuuuguaaucucuccgacgcgcauaagaaaaaccuguacgaucacacacugaugucuaucauuagcaccuuccaccucuccaucccgaauuuuaaccaguaugaggcuaugagcugcgacuucaauggaggcaagauuacagugcaguacaaccugucucauuccuaugccaucgaugccgcuaaucacuguggcaccgucgccaacggggugcuucaaacguuuaugcggauggcuuggggaggcagcuacauugcccuggacucugggcgcggaaagugggauugcaucaugacauccuaccaguaucucaucauucagaacaccacaugggaagaccauugucaguucagcagacccucuccuaucggcuaccuggggcuucugucccaacggacccgcgauauuuauaucagcagacggcuccugggaaccuuuacauggacgcuguccgacucugagggcaaugaaacccccggcggguacugccucacacgcuggaugcugauugaggcggagcuuaaauguuucggaaacaccgccguugcuaagugcaaugaaaaacacgaugaggaauuuugugacaugcugagacucuucgauuuuaacaagcaggccauccggcgccugaaagcugaggcccagaugagcauccagcuuauuaauaaggcggugaacgcccugaucaaugaccaacucauuaugaagaaccaccugagagauaucaugggcauuccuuauugcaauuacuccaaauauugguaccugaaccauacaagcaccgggcggacgucucucccccgcugcuggcuggucuccaauggaagcuaccuuaacgaaacacacuucucugacgacaucgagcagcaggcugauaauaugaucaccgagaugcugcaaaaggaauaucucgacagacagggcaaaaccccucuggggcugguggaucuuuucguguuuagcacauccuucuaccucauuucuaucuuucugcaucuggucaagauuccgacccaccggcauaucguuggaaaacccuguccuaagccccaccgccucaaccacaugggcauuugcagcuguggccuguauaaacagccuggggugcccgugagauggaagcggugaggacuagucccuguucccagagcccacuuuuuuuucuuuuuuugaaauaaaauagccugucuuucagaucuaaaaaaaaaaaaaaaaaaaaaaaaaaaaaaaaaaaaaaaaaaaaaaaaaaaaaaaaaaaaaaaaaaaaaaaaaaaaaaaaaaaaaaaaaaaaaaaaaaaa

SEQ ID NO: 14334 - RNA, 1724 nt, Artificial Sequence
  mRNA product Design a-1 (A100) comprising derived and/or modified sequence from LASV(G1180-SLE-2010;Clade IV)__AIT17168__GPC (opt5)
aggagagucccgcagucggcguccagcggcucugcuuguucgugugugugucguugcaggccuuauucaagcuuaccaugggccagaucgugaccuucuuucaagaggucccccacguuauugaagaggugaugaacaucgugcugauugcccucagcauccuggcuguccuuaaggggcuguacaauuucgccacaugcggacucgugggccugcuuacguuucugcuccugugugggagauccugcaccgcgucucgguauaaaggaguuuacgaacugcagacacucgagcugaacauggaaacccuuaauaugacaaugccucugagcuguaccaagaacaauucccaucacuauauuauggugggcaacgagacagggcucgagcugacccuuacgaauaccucuaucaucaaccauaaauucugcaaucugagcgacgcucacaagaaaaaccucuacgaucaugcccugauguccauuaucucuacauuucaccugagcauuccgaauuucaaccaguaugaagccauguccugugacuuuaauggaggcaagaucagcguccaguacaaccucucucacuccuaugcuggcgaugccgcuaaucauugcgggaccguggccaacggaguucugcaaacauucaugcgcauggcguggggcgggagcuacauugcccuugacucuggacacggcuccugggauuguaucaugaccagcuaccaguaucugauuauccagaacacgacaugggaggaccauugccaguuuucuagacccuccccuaucggguaccucggacugcuuagccaacggacccgcgauauuuauaucuccagacggcugcucggcacauucaccuggacccugucugacagcgaaggcaaggauacacccgggggauacugucugacgcgcuggaugcucauugaggcugagcugaaaugcuuuggcaauaccgccguggcuaaguguaacgaaaaacacgacgaggaguucugcgauaugcuuagacuguuugacuucaauaagcaggccauccagcggcucaaagcggaagcccagauguccauucaacugaucaacaaggcugucaaugcccuuaucaacgaucagcugauuaugaagaaucaccuccgcgacaucauggggauuccuuauugcaacuacagcaaauauugguaccugaaucauacaaccacaggaaagaccucucugcccaaauguuggcucguguccaacggcagcuaccugaaugaaacgcacuucucugacgauaucgagcagcaagcugacaacaugauuacagagaugcuucagaaggaauauauggagagacaggggaaaaccccucugggacucguggaucuguuugucuucagcaccuccuuuuaccugaucucuaucuuccuucaucucguuaagauuccgacacaccggcauaucgugggcaaaagcugccccaagccucaccgccugaaucacaugggcauuuguuccugcgggcuguauaagcagcccggagugccugucaaauggaagagaugaggacuagucccuguucccagagcccacuuuuuuuucuuuuuuugaaauaaaauagccugucuuucagaucuaaaaaaaaaaaaaaaaaaaaaaaaaaaaaaaaaaaaaaaaaaaaaaaaaaaaaaaaaaaaaaaaaaaaaaaaaaaaaaaaaaaaaaaaaaaaaaaaaaaa

SEQ ID NO: 14335 - RNA, 1724 nt, Artificial Sequence
  mRNA product Design a-1 (A100) comprising derived and/or modified sequence from LASV(G1442-SLE-2011;Clade IV)__AIT17180__GPC (opt5)
aggagagucccgcagucggcguccagcggcucugcuuguucgugugugugucguugcaggccuuauucaagcuuaccaugggccagaucgugaccuucuuucaagaggucccccacguuauugaagaggugaugaacaucgugcugauugcccucagcauccuggcuguccuuaaggggcuguacaauguggccacaugcggacucauuggccugguuacguuccuucugcucugugggagauccugcaccacaacccuguauaaaggaguguacgaacugcagacacucgagcugaacauggaaacccuuaauaugacaaugccucugucuuguaccaagaacaauagccaucacuauauccgggucggcaacgagacggggcucgagcugacccuuacaaauaccuccaucauuaaccauaaauuuugcaaucugucugacgcgcacaagaaaaaccucuacgaucaugcucugaugagcaucauuuccacauuccaccugucuaucccgaauuuuaaccaguaugaagccaugagcugugacuucaauggaggcaagauuuccgugcaguacaaccucagccacucuuaugccggcgaugcugccaaucauugcgggaccguugcuaacggagugcugcaaacguuuaugcgcauggccuggggcggguccuacaucgcgcuugacagcggaagaggcaacugggauuguauuaugacaucuuaccaguaucugaucauccagaauaccacaugggacgaucacugccaguucucccggcccagcccuauuggguaccucggacugcuuucucaacgcaccagagacgucuauaucucccggcgccugcucggcaccuuuacauggacgcugagcgauuccgagggcaaggacacccccgggggauacugucugacaagauggaugcucauugaagccgagcugaaaugcuucggcaacaccgcuguggccaaguguaaugagaaacaugaugaagaguuuugcgacaugcuucggcuguucgauuuuaacaagcaggcuauccagcgccucaaagccgaagcgcagaugucuauucaacugaucaauaaggccgugaacgcucuuaucaaugaccagcugauuaugaagaaccaccucagagacaucauggggauuccuuauugcaauuacagcaaauauugguaccugaacaauacagccaccggaaagacgucccugcccaaauguuggcucaucagcaacggcucuuaccugaaugagacacacuucuccgaugacauugaacaggaggcugauaacaugaucaccgagaugcuucaaaaggaauauauggagcggcaggggaaaaccccucugggacucgucgaccuguucguuuuuagcacaucuuucuaccugaucagcauuuuucuucaucucgugaagaucccgacccaccgccauauugugggcaaauccugccccaagccucacagacugaaucauaugggcaucuguucuugcgggcuguauaagcagcccggagucccugugcgguggaaacgcugaggacuagucccuguucccagagcccacuuuuuuuucuuuuuuugaaauaaaauagccugucuuucagaucuaaaaaaaaaaaaaaaaaaaaaaaaaaaaaaaaaaaaaaaaaaaaaaaaaaaaaaaaaaaaaaaaaaaaaaaaaaaaaaaaaaaaaaaaaaaaaaaaaaaa

SEQ ID NO: 14336 - RNA, 1724 nt, Artificial Sequence
  mRNA product Design a-1 (A100) comprising derived and/or modified sequence from LASV(G3010-SLE-2013;Clade IV)__AIT17344__GPC (opt5)
aggagagucccgcagucggcguccagcggcucugcuuguucgugugugugucguugcaggccuuauucaagcuuaccaugggccagaucgugaccuucuuucaagaggucccccacguuauugaagaggugaugaacaucgugcugauugcccucagcauccuggcuguccuuaaggggcuguacaauuucgccacaugcggacucgugggccugguuacguuucuucugcucugugggagauccugcaccacaucucuguauaaaggaguguacgaacugcagacccucgagcugaacauggaaacacuuaauaugaccaugccucugagcuguacaaagaacaauucccaucacuauauuauggucggcaacgagaccgggcucgagcugacgcuuaccaauacaucuaucaucaaccauaaauucugcaaucugagcgacgcgcacaagaaaaaccucuacaaucaugcucugauguccauuaucucuaccuuucaccugagcauuccgaacuucaaucaguaugaagccauguccugugauuuuaacggaggcaagaucagcgugcaguacaaucucucucacuccuaugccggcgacgcugccagccauugcgggacaguugcuaacggagugcugcaaaccuucaugcggauggccuggggcgggucuuacauugcgcuugauuccggauacggcaagugggacuguaucaugacgagcuaucaguaccugauuauccagaacacaaccugggaggaucacugccaguuuucucgccccuccccuaucggguaucucggacugcuuagccaaagaacacgggacauuuacaucucccgcagacugcucggcaccuucaccuggacacugucugauagcgaaggcaaagacacgcccgggggauauugucugacccgguggaugcucauugaggccgagcugaagugcuuuggcaauacagcugucgccaaauguaacgaaaagcaugaugaggaguucugcgacaugcuucgccuguuugauuucaauaaacaggcuauccagagacucaagaccgaagcccagauguccauucaacugaucaacaaggcggugaaugcccuuaucaacgaccagcugauuaugaaaaaucaccuccgggauaucauggggauuccuuacugcaacuauagcaaguacugguaccugaaucacacaaccacgggaaaaacaucucugcccaaguguuggcucguguccaacggcagcuaucugaaugaaacccauuucucugacgacaucgagcagcaagcugauaacaugauuaccgagaugcuucagaaagaauacauggagcgccaggggaagacaccucugggacucgucgaccuguuuguuuucagcaccuccuuuuaucugaucucuaucuuccuucaccucgugaaaauuccgacacauagacacaucgugggcaagagcugccccaagccucaucggcugaaucacaugggcauuuguuccugcgggcuguacaaacagcccggagucccugugcgcuggaagagaugaggacuagucccuguucccagagcccacuuuuuuuucuuuuuuugaaauaaaauagccugucuuucagaucuaaaaaaaaaaaaaaaaaaaaaaaaaaaaaaaaaaaaaaaaaaaaaaaaaaaaaaaaaaaaaaaaaaaaaaaaaaaaaaaaaaaaaaaaaaaaaaaaaaaa

SEQ ID NO: 14337 - RNA, 1724 nt, Artificial Sequence
  mRNA product Design a-1 (A100) comprising derived and/or modified sequence from LASV(G502-SLE-2009;Clade IV)__AIT17126__GPC (opt5)
aggagagucccgcagucggcguccagcggcucugcuuguucgugugugugucguugcaggccuuauucaagcuuaccaugggccagaucgugaccuucuuucaagaggucccccacguuauugaagaggugaugaacaucgugcugauugcccucagcauccuggcuguccuuaaggggcuguacaauuucgccacaugcggacucgugggccugcuuacguuucugcuccugugugggagauccugcaccacaggacuguauaaaggcguuuacgaacuccagacccuggagcuuaacauggaaacacugaauaugaccaugccucucucuuguacaaagaacaauagccaucacuauauuaugguggggaacgagaccggacuggagcuuacgcugaccaauacauccaucaucaaccauaaauucugcaaucucucugacgcgcacaagaaaaaccuguacgaucaugcucugaugagcauuaucuccaccuuucaccucucuauuccgaauuucaaccaguaugaagccaugagcugugacuuuaauggcggcaagaucuccguccaguacaaccugagccacucuuaugccggggaugcugccgaccauugcggaacaguggcuaauggcguucuucaaaccuucaugcggauggccuggggaggguccuacauugcgcuggauagcggccgcgggagaugggacuguaucaugacgucuuaccaguaucucauuauccagaacacaaccugggaggaucacugccaguuuucccggcccagcccuaucggauaccugggccuucugucucaacgcacaagagacauuuauaucucccggcgccuccugggcaccuucaccuggacacugagcgauuccgaagggaaggacacgcccggaggcuacugucucaccagauggaugcugauugaggccgagcuuaaaugcuuugggaacacagcuguggccaaguguaaugaaaaacaugaugaggaguucugcgacaugcugcggcucuuugauuucaacaagcaggcuauccagcgccugaaagccgaagcgcagaugucuauucaacuuaucaauaaggccgucaacgcucugaucaaugaccagcucgugaugaagaaccaccugagagacauuaugggaaucccuuauugcaauuacagccgguauugguaccugaaccacaccacaaccggccgcacgucccuccccaaauguuggcuggugagcaaugggucuuaccuuaacgaaacacauuucuccgaugacauugagcagcaagccgauaauaugaucaccgagaugcugcagaaggaauauauggagagacagggaaaaaccccucucggccuggucgaccuguuuguuuucagcacaucuuuuuaccuuauuagcaucuuccuccaccuggugaagaucccgacccaucggcacauugugggcaaauccugccccaagccucaucgccugaaccacauggggaucuguucuugcggacucuauaaacagcccggcgucccugugaaguggaagagaugaggacuagucccuguucccagagcccacuuuuuuuucuuuuuuugaaauaaaauagccugucuuucagaucuaaaaaaaaaaaaaaaaaaaaaaaaaaaaaaaaaaaaaaaaaaaaaaaaaaaaaaaaaaaaaaaaaaaaaaaaaaaaaaaaaaaaaaaaaaaaaaaaaaaa

SEQ ID NO: 14338 - RNA, 1724 nt, Artificial Sequence
  mRNA product Design a-1 (A100) comprising derived and/or modified sequence from LASV(G733-SLE-2010;Clade IV)__AIT17154__GPC (opt5)
aggagagucccgcagucggcguccagcggcucugcuuguucgugugugugucguugcaggccuuauucaagcuuaccaugggccagaucgugaccuucuuucaagaggucccccacguuauugaagaggugaugaacaucgugcugauugcccucagcauccuggcuguccuuaaggggcuguacaauuucgccacaugcggaauugugggccucguuuccuuucugcuucugugugggagaucuugcacgaccagccucuauaaaggaguguacgaacugcagacacuggagcucaacauggaaacccugaauaugacaaugccucuuuccuguaccaagaacaauucucaucacuauaucauggucggcaacgagacagggcuggagcucacccugacgaauaccagcaucauuaaccauaaauucugcaaucuuuccgacgcgcacaagaaaaaccuguacgaucaugcucucaugucuaucauuagcacauuucaccuguccaucccgaauuucaaccaguaugaagccaugagcugugacuuuaauggaggcaagauuucugugcaguacaaccugucccacagcuaugccggcgaugcugccaaucauugcgggaccaucgcuaacggaguucuccaaacauucaugcggauggccuggggcgggucuuacauugcgcuggacuccggacgcgauagaugggacuguaucaugaccagcuaccaguaucuuaucauucagaacacgacaugggaggaucacugccaguuuucucggcccuccccuaucggcuaccuggggcuccugagccaacgcaccagagacauuuauaucucccggcgccuucugggaacauucaccuggacccucucugauagcgaaggcaaggacacacccggcggguacugucugacgagauggaugcugauugaggccgagcucaaaugcuuuggaaauaccgcuguggccaaguguaacgaaaaacaugaugaggaguucugcgacaugcugcggcuuuuugauuucaauaagcaggcuauccagcgccugaaagccgaagcgcagauguccauccaacucauuaacaaggccgucaaugcucugaucaacgaccagcuuauuaugaagaaucaccugagagacaucaugggcauuccuuauugcaacuacagcaaauauugguaccucaaucacacaaccacagggaagaccucucugcccaaauguuggcugguguccaacggaagcuaccucaaugaaacgcauuucucugaugacaucgagcagcaagccgauaacaugaucacagagaugcugcagaaggaauauauggagcggcagggcaaaaccccucuugggcugguggaccucuuugucuucagcaccuccuuuuaccugauuucuaucuuccugcaccuuguuaagauuccgacacaucgccacguggugggaaaaagcugccccaagccucauagacucaaucacaugggcaucuguuccugcggccuguaugggcagcccggagucccugugaaguggaaacggugaggacuagucccuguucccagagcccacuuuuuuuucuuuuuuugaaauaaaauagccugucuuucagaucuaaaaaaaaaaaaaaaaaaaaaaaaaaaaaaaaaaaaaaaaaaaaaaaaaaaaaaaaaaaaaaaaaaaaaaaaaaaaaaaaaaaaaaaaaaaaaaaaaaaa

SEQ ID NO: 14339 - RNA, 1724 nt, Artificial Sequence
  mRNA product Design a-1 (A100) comprising derived and/or modified sequence from MOPV/LASV reassortant(IGS-1;Clade IV)__AFY05576__GPC (opt5)
aggagagucccgcagucggcguccagcggcucugcuuguucgugugugugucguugcaggccuuauucaagcuuaccaugggccagaucgugaccuucuuucaagaggucccccacguuauugaagaggugaugaacaucgugcugauugcccucagcguccuggcugugcuuaaggggcuguacaauuucgccacaugcggacucguuggccuggugacguuucuucugcucugugggagauccugcaccacaucucuguauaaaggagucuacgaacugcagacccucgagcugaacauggaaacacuuaauaugaccaugccucugagcuguacaaagaacaauucccaucacuauaucauggugggcaacgagaccgggcucgagcugacgcuuaccaauacaucuauuaucaaccauaaauucugcaaucugagcgacgcgcacaagaaaaaccucuacgaucaugcucugauguccaucauuucuaccuuucaccugagcaucccgaauuucaaccaguaugaagccauguccugugacuuuaauggaggcaagauuagcguucaguacaaccucucucacuccuaugccggcgaugcugccaaucauugcgggacaguggcuaacggaguccugcaaaccuucaugcggauggccuggggcgggagcuacaucgcgcuugacucuggacgcggcaacugggauuguauuaugacguccuaccaguaucugaucauucagaauacaaccugggaggaccacugccaguuuagcagacccucuccuaucggguaccucggacugcuuucccaacggacacgcgauaucuauauuagcagacggcugcucggcaccuucaccuggacacuguccgacucugaaggcgaggauacgcccgggggauacugucugacccgcuggaugcucaucgaggccgaacugaagugcuuuggcaacacagcuguggccaaauguaaugagaagcaugacgaagaguucugcgauaugcuuagacuguuugacuucaacaaacaggcuauucagcggcucaaggccgaagcgcagaugagcauccaacugauuaauaaagccgugaacgcucuuaucaaugaucagcugaucaugaagaaccaccuccgcgacauuauggggaucccuuauugcaauuacuccaaguauugguaccugaaccacaccacaaccggaagaacgagccugcccaaauguuggcucgucucuaauggcuccuaccugaacgagacacauuucagcgacgauauugagcagcaagccgacaauaugaucaccgaaaugcuucagaaggaguauauggaacggcaggggaaaaccccucugggacucguugaucuguuuguguucucuaccagcuuuuaccugauuuccaucuuccuucaccucgugaagaucccgacacaucgccacauugucggcaaaucuugccccaagccucauagacugaaccacaugggcaucuguagcugcgggcuguauaaacagcccggagugccuguuaaguggaagcggugaggacuagucccuguucccagagcccacuuuuuuuucuuuuuuugaaauaaaauagccugucuuucagaucuaaaaaaaaaaaaaaaaaaaaaaaaaaaaaaaaaaaaaaaaaaaaaaaaaaaaaaaaaaaaaaaaaaaaaaaaaaaaaaaaaaaaaaaaaaaaaaaaaaaa

SEQ ID NO: 14340 - RNA, 1724 nt, Artificial Sequence
  mRNA product Design a-1 (A100) comprising derived and/or modified sequence from LASV(LM765-SLE-2012;Clade IV)__AIT17814__GPC (opt5)
aggagagucccgcagucggcguccagcggcucugcuuguucgugugugugucguugcaggccuuauucaagcuuaccaugggccagaucgugaccuucuuucaagaggucccccacguuauugaagaggugaugaacaucgugcugauugcccucagcauccuggcuguccuuaaggggcuguacaauuucgccacaugcggacucgugggccugguuacguuucuucugcucugugggagauccugcaccacaucucuguauaaaggaguguacgaacugcagacccucgagcugaacauggaaacacuuaauaugaccaugccucugagcuguacaaagaacaauucccaucacuauauuauggucggcaacgagaccgggcucgagcugacgcuuaccaauacaucuaucaucgaccauaaauucugcaaccugagcgaugcgcaccggaagaaucucuacgaccaugcucugauguccauuaucucuaccuuucaccugagcauuccgaacuucaaucaguaugaagccauguccugugauuuuaacggaggcaaaaucagcgugcaguacaaucucucucacuccuaugccaaggacgcugccgaucauugcggcacaguugcuaacggggugcugcaaaccuucaugcgcauggccuggggaggcagcuacauugcgcuugacucugggagaggacggugggauuguaucaugacguccuaccaguaucugauuauccagaauacaaccugggaggaccacugccaguuuagccgccccucuccuaucggcuaccucgggcugcuuucccaaagaacacgggauauuuauaucagccgcagacugcucggaaccuucaccuggacacuguccgacucugaaggcaaggauacgcccggcggguacugucugacccgguggaugcucauugaggccgagcugaaaugcuuuggaaacacagcugucgccaaguguaacgaaaaacaugacgaggaguucugcgauaugcuucgccuguuugacuucaauaagcaggcuauccagagacucaaagccgaagcgcagaugagcauucaacugaucaacaaggccgugaaugcucuuaucaacgaccagcugauuaugaagaaucaccuccgggauaucaugggcauuccuuauugcaacuacuccaaauauugguaccugaaucacaccacaaccgggaagacgagccugcccaaauguuggcucgugucuaacggauccuaccugaaugaaacacauuucagcgacgauaucgagcagcaagccgacaacaugauuaccgagaugcuucagaaggaauauauggagcgccagggcaaaaccccucuggggcucgucgaucuguuuguuuucucuaccagcuuuuaccugaucuccaucuuccuucaccucgugaagauuccgacacauagacacaucgugggaaaacccugcccuaagccccaucggcugaaucacaugggcauuuguucuugcggccuguauaagcagccugggguccccgugaaauggaagcgcugaggacuagucccuguucccagagcccacuuuuuuuucuuuuuuugaaauaaaauagccugucuuucagaucuaaaaaaaaaaaaaaaaaaaaaaaaaaaaaaaaaaaaaaaaaaaaaaaaaaaaaaaaaaaaaaaaaaaaaaaaaaaaaaaaaaaaaaaaaaaaaaaaaaaa

SEQ ID NO: 14341 - RNA, 1724 nt, Artificial Sequence
  mRNA product Design a-1 (A100) comprising derived and/or modified sequence from LASV(LM776-SLE-2012;Clade IV)__AIT17824__GPC (opt5)
aggagagucccgcagucggcguccagcggcucugcuuguucgugugugugucguugcaggccuuauucaagcuuaccaugggccagaucgugaccuucuuucaagaggucccccacguuauugaagaggugaugaacaucgugcugauugcccucagcauccuggcuguccuuaaggggcuguacaauuucgccacaugcggacucgugggccugguuacguuucuucugcucugugggagauccugcaccacaucuguguauaaaggagucuacgaacugcagacccuggagcucaacauggaaacacugaauaugaccaugccucuuagcuguacaaagaacaauucccaucacuauauuauggugggcaacgagaccgggcuggagcucacgcugaccaauacaucuaucaucaaccauaaauucugcaaucuuagcgacgcgcacaagaaaaaccuguacgaucaugcucucauguccauuaucucuaccuuucaccugagcauuccgaauuucaaccaguaugaagccauguccugugacuuuaauggaggcaagaucagcguucaguacaaccugucucacuccuaugccggcgaugcugccaaucauugcgggacaguggcuaacggaguccuccaaaccuucaugcggauggccuggggcgggagcuacauugcgcuggacucuggacacggcaagugggauuguaucaugacguccuaccaguaucuuauuauccagaacacaaccugggaggaccauugccaguuuagccgccccucuccuaucggguaccugggacuccugucccaaagaacacgggauauuuauaucagccgcagacuucugggcaccuucaccuggacacucuccgacucugaaggcaaagauacgcccgggggauacugucugacccgguggaugcugauugaggccgagcucaagugcuuuggcaauacagcuguggccaaauguaacgaaaagcacgacgaggaguucugcgauaugcugcgccuuuuugacuucaauaaacaggcuauccagagacugaaggccgaagcgcagaugagcauucaacucaucaacaaggccgugaaugcucugaucaacgaucagcuuauuaugaaaaaucaucugcgggacaucauggggauuccuuauugcaacuacuccaaguauugguaccucaaucacaccacaaccggaaaaacgagccugcccaaguguuggcuggucucuaacggcuccuaccucaaugaaacacacuucagcgacgauaucgagcagcaagccgacaacaugauuaccgagaugcugcagaaagaauauauggagcgccaggggaagaccccucuuggacugguugaucucuuuguguucucuaccagcuuuuaccugaucuccaucuuccugcaucuugugaaaauuccgacacacagacauaucgucggcaagucuugccccaagccucaccggcucaaucacaugggcauuuguagcugcgggcuguauaaacagcccggagugccuguucgcuggaagagaugaggacuagucccuguucccagagcccacuuuuuuuucuuuuuuugaaauaaaauagccugucuuucagaucuaaaaaaaaaaaaaaaaaaaaaaaaaaaaaaaaaaaaaaaaaaaaaaaaaaaaaaaaaaaaaaaaaaaaaaaaaaaaaaaaaaaaaaaaaaaaaaaaaaaa

SEQ ID NO: 14342 - RNA, 1724 nt, Artificial Sequence
  mRNA product Design a-1 (A100) comprising derived and/or modified sequence from LASV(Mad39;Clade IV)__ANH09722__GPC (opt5)
aggagagucccgcagucggcguccagcggcucugcuuguucgugugugugucguugcaggccuuauucaagcuuaccaugggccagaucgugaccuucuuucaagaggucccccacguuauugaagaggugaugaacaucgugcugauugcccucagcauccuggcuguccuuaaggggcuguacaauguggccacaugcggacucauuggccugguuacguuccuucugcucugugggagauccugcaccacaacccuguauaaaggaguguacgaacugcaggcgcucgagcugaacauggaaacacuuaauaugaccaugccucugucuuguacaaagaacaauagccaucacuauauccgggucggcaacgagaccgggcucgagcugacgcuuaccaauacaucccugaucaaccauaaauuuugcaaucucucugacgcucacaagaaaaaccuguacgaucaugcccugaugagcauuaucuccaccuuccaccucucuauuccgaauuuuaaccaguaugaagccaugagcugugacuucaaugauggaaagaucuccgugcaguacaaccugagccacacauaugcuggcgacaccgccaaucauugcggcacgguugcuaacggggugcuucaaacauuuaugcgcauggccuggggaggcucuuacauugcgcuggauuccgggagaggaggcugggacuguaucaugaccagcuaccaguaucucauuauccagaacacaaccugggaggaucacugccaguucucucggcccuccccuaucggguaccugggacuucugagccaacgcaccagagacauuuauaucucucggcgccuccugggcacauuuacguggacccuguccgauagcgaaggcaaggacacacccgggggauacugucucaccagauggaugcugauugaggccgagcuuaaaugcuucggcaauacagcugucgccaaguguaacgaaaaacaugaugaggaauuuugcgacaugcugcgccucuucgauuuuaauaagcaggcuauccagcggcugaaagccgaggcgcagauguccauucaacuuaucaacaaggccgugaaugcucugaucaacgaccagcucauuaugaagaaucaccugagagacaucauggggauuccuuauugcaacuacucuaaauauugguaccugaaucacaccgugacgggaaagacaagccuccccaaauguuggcuggucuccaacggcagcuaccuuaaugaaacccauuucucugaugacaucgagcagcaagccgauaacaugauuaccgagaugcugcagaaggaauauauggagcggcaggggaaaacaccucucggacugguugaccuguucguguuuuccaccagcuucuaccuuaucucuaucuuucuccaccuggugaagauuccgacacaucgccacgucgugggcaaacccugcccuaagccccauagacugaaucacaugggcaucuguagcugcggguucuauaagcagccuggaguucccgugcgguggaaacgcugaggacuagucccuguucccagagcccacuuuuuuuucuuuuuuugaaauaaaauagccugucuuucagaucuaaaaaaaaaaaaaaaaaaaaaaaaaaaaaaaaaaaaaaaaaaaaaaaaaaaaaaaaaaaaaaaaaaaaaaaaaaaaaaaaaaaaaaaaaaaaaaaaaaaa

SEQ ID NO: 14343 - RNA, 1724 nt, Artificial Sequence
  mRNA product Design a-1 (A100) comprising derived and/or modified sequence from LASV(Z0947-SLE-2011;Clade IV)__AIT17840__GPC (opt5)
aggagagucccgcagucggcguccagcggcucugcuuguucgugugugugucguugcaggccuuauucaagcuuaccaugggccagaucgugaccuucuuucaagaggucccccacguuauugaagaggugaugaacaucgugcugauugcccucagcauccuggcuguccuuaaggggcuguacaauuucgccacaugcggacucgugggccugguuacguuucuucugcucugugggagauccugcaccauuucucuguauaaaggaguguacgaacugcagacacucgagcugaacauggaaacccuuaauaugacaaugccucugagcuguaccaagaacaauucccaucacuauaucauggucggcaacgagacagggcucgagcugacccuuacgaauaccucuaucauuaaccauaaauucugcaaucugagcgacgcgcacaagaaaaaccucuacgaucaugcucugauguccaucauuucuacauuucaccugagcaucccgaauuucaaccaguaugaagccauguccugugacuuuaauggaggcaagauuagcgugcaguacaaccucucucacuccuaugccggcgaugcugccaaucauugcgggaccguugcuaacggagugcugcaaacauucaugcggauggccuggggcgggagcuacaucgcgcuugacucuggacgcgauagaugggacuguauuaugaccuccuaccaguaucugaucauccagaacacgacaugggaggaucacugccaguuuagccggcccucuccuauuggcuaccucgggcugcuuucccaacgcaccagagacaucuauauuagccggcgccugcucggaacauucaccuggacccuguccgauucugaaggcaaggacacacccggcggguacugucugacgagauggaugcucaucgaggccgagcugaaaugcuuuggaaauaccgcugucgccaaguguaacgaaaaacaugaugaggaguucugcgacaugcuucggcuguuugauuucaauaagcaggcuauucagcgccucaaagccgaagcgcagaugagcauccaacugaucaacaaggccgugaaugcucuuauuaacgaccagcugaucaugaagaaucaccucagagacauuaugggcaucccuuauugcaacuacuccaaauauugguaccugaaucacacaaccacagggaagaccagccugcccaaauguuggcucgugucuaacggauccuaccugaaugaaacgcauuucagcgaugacauugagcagcaagccgauaacaugaucacagagaugcuucagaaggaauauauggagcggcagggcaaaaccccucuggggcucgucgaccuguuuguuuucucuaccagcuuuuaccugaucuccauuuuccuucaccucgugaagaucccgacacaucgccacauugugggaaaacccugcccuaagccccauagacugaaucacaugggcaucuguucuugcggccuguauaagcagccugggguccccgugaaauggaagcggugaggacuagucccuguucccagagcccacuuuuuuuucuuuuuuugaaauaaaauagccugucuuucagaucuaaaaaaaaaaaaaaaaaaaaaaaaaaaaaaaaaaaaaaaaaaaaaaaaaaaaaaaaaaaaaaaaaaaaaaaaaaaaaaaaaaaaaaaaaaaaaaaaaaaa

SEQ ID NO: 14344 - RNA, 1736 nt, Artificial Sequence
  mRNA product Design a-2 (hSL-A64-N5) comprising derived and/or modified sequence from LASV(Josiah;Clade IV)__NP_694870__GPC (opt1)
aggagaguccgcucagccagguugcagaagcggcuuagcguguguccuaaucuucucucugcguguagguaggccugugccgcaaacaagcuuaccaugggccagaucgugaccuucuuccaggaggucccccacgugaucgaggaggugaugaacaucguccugaucgcccucagcgugcuggccgugcugaaggggcucuacaacuucgcgaccugcggccuggucgggcuggugacguuccuccugcugugcggccgcuccugcaccaccagccucuacaaggggguguacgagcugcagacccuggagcucaacauggagacgcugaacaugaccaugccgcuguccugcaccaagaacaacagccaccacuacaucauggucggcaacgagaccggccucgagcugacgcugaccaacaccuccaucaucaaccacaaguucugcaaccucagcgacgcccacaagaagaaccuguacgaccacgcccugauguccaucaucagcaccuuccaccucuccauccccaacuucaaccaguacgaggccaugagcugcgacuucaacgggggcaagaucuccgugcaguacaaccugagccacuccuacgccggggacgcggccaaccacugcggcacgguggccaacgggguccugcagaccuucaugcggauggccuggggcggcagcuacaucgcgcucgacuccgggcgcggcaacugggacugcaucaugaccagcuaccaguaccugaucauccagaacaccacgugggaggaccacugccaguucucccggcccagccccaucggguaccugggccuccugucccagcgcacccgggacaucuacaucagccgccggcugcucggcaccuucaccuggacgcugagcgacuccgaggggaaggacaccccgggcggguacugccugacccgcuggaugcucaucgaggccgagcugaagugcuucggcaacaccgccguggccaagugcaacgagaagcacgacgaggaguucugcgacaugcugcggcuguucgacuucaacaagcaggccauccagcgccugaaggcggaggcccagaugagcauccagcugaucaacaaggccgugaacgcccucaucaacgaccagcugaucaugaagaaccaccuccgggacaucauggggauccccuacugcaacuacuccaaguacugguaccucaaccacacgaccaccggccgcaccagccugcccaagugcuggcuggucuccaacggcagcuaccucaacgagacgcacuucuccgacgacaucgagcagcaggccgacaacaugaucaccgagaugcugcagaaggaguacauggagcggcaggggaagacgccccugggccucguggaccuguucguguucagcaccuccuucuaccugaucagcaucuuccugcaccucgucaagaucccgacccaccgccacaucguggggaaguccugccccaagccccaccggcugaaccacaugggcaucugcagcugcgggcuguacaagcagcccggcgugccggucaaguggaagcgcugaggacuagucccuguucccagagcccacuuuuuuuucuuuuuuugaaauaaaauagccugucuuucagaucucaaaggcucuuuucagagccaccaaaaaaaaaaaaaaaaaaaaaaaaaaaaaaaaaaaaaaaaaaaaaaaaaaaaaaaaaaaaaaaaagaauu

SEQ ID NO: 14345 - RNA, 1733 nt, Artificial Sequence
  mRNA product Design a-2 (hSL-A64-N5) comprising derived and/or modified sequence from LASV(LP;Clade I)__AAF86701__GPC (opt1)
aggagaguccgcucagccagguugcagaagcggcuuagcguguguccuaaucuucucucugcguguagguaggccugugccgcaaacaagcuuaccaugggccagaucaucaccuucuuccaggaggugccccacgucaucgaggaggugaugaacaucgugcugaucgcccucagccugcuggccauccucaaggggcuguacaacaucgcgaccugcggcaucaucgggcuggucgccuuccucuuccugugcggcaaguccugcagccugacgcucaagggcggguacgagcugcagacccuggagcucaacauggagacccugaacaugaccaugccgcuguccugcacgaagaacagcucccaccacuacauccgcgugggcaacgagaccgggcucgagcugacccugaccaacacgagcaucaucaaccacaaguucugcaaccucuccgacgcccacaagaagaaccuguacgaccacgcccugaugagcaucaucuccaccuuccaccucagcauccccaacuucaaccaguacgaggccauguccugcgacuucaacggcgggaagaucagcgugcaguacaaccugucccacagcuacgcgggcgacgccgccgagcacugcgggaccgucgccaacggcgugcugcagaccuucaugcggauggcguggggcgggcgcuacaucgcccucgacuccggcaaggggaacugggacugcaucaugacgagcuaccaguaccugaucauccagaacaccaccugggaggaccacugccaguucucccggcccagccccaucggcuaccugggccuccugucccagcgcacccgggacaucuacaucagccgccggcugcucgggacguucaccuggacccugagcgacuccgagggcaacgagacccccgggggcuacugccugacgcgcuggaugcucaucgaggccgagcugaagugcuucgggaacaccgccguggccaagugcaacgagaagcacgacgaggaguucugcgacaugcugcggcuguucgacuucaacaagcaggcgauccgccggcugaaggccgaggcccagaugagcauccagcugaucaacaaggccgucaacgcccucaucaacgaccagcugaucaugaagaaccaccuccgcgacaucaugggcauccccuacugcaacuacuccaaguacugguaccucaaccacaccagcuccggccggaccagccugcccaagugcuggcugaucuccaacgggagcuaccucaacgagacgcaguucuccgacgacaucgagcagcaggcggacaacaugaucaccgagaugcugcagaaggaguacaucgagcgccagggcaagaccccgcuggggcucguggacaucuucaucuucagcaccuccuucuaccugaucagcaucuuccugcaccugaucaagaucccgacgcaccggcacaucgugggcaagcccugccccaagccccaccgccucaaccacaugggggucugcuccugcggccuguacaagcacccgggcgugcccaccaaguggaagcggugaggacuagucccuguucccagagcccacuuuuuuuucuuuuuuugaaauaaaauagccugucuuucagaucucaaaggcucuuuucagagccaccaaaaaaaaaaaaaaaaaaaaaaaaaaaaaaaaaaaaaaaaaaaaaaaaaaaaaaaaaaaaaaaaagaauu

SEQ ID NO: 14346 - RNA, 1733 nt, Artificial Sequence
  mRNA product Design a-2 (hSL-A64-N5) comprising derived and/or modified sequence from LASV(803213;Clade II)__AAF86703__GPC (opt1)
aggagaguccgcucagccagguugcagaagcggcuuagcguguguccuaaucuucucucugcguguagguaggccugugccgcaaacaagcuuaccaugggccagaucaucaccuucuuccaggaggugccccacgucaucgaggaggugaugaacaucgugcugaucgcccucagccugcuggccauccucaaggggaucuacaacgucgcgaccugcggccuguucgggcugaucuccuuccuccugcugugcggccgcagcugcuccgugacguacaaggggguguacgagcuccagacccuggagcugaacauggccaaccucaacaugaccaugccgcugagcugcaccaagaacaacucccaccacuacaucauggucggcaacgagacgggccuggagcucacccugaccaacaccagcaucaucaaccacaaguucugcaaccuguccgacgcccacaagaagaaccucuacgaccacgcccugaugagcaucaucuccacguuccaccugagcauccccaacuucaaccaguacgaggccauguccugcgacuucaacgggggcaagaucagcgugcaguacaaccucucccacagcuucgcgguggacgccgccaaccacugcgggaccaucgccaacggcguccugcagaccuucaugcggauggcguggggcggguccuacaucgcccuggacagcggcaaggggaacugggacugcaucaugaccuccuaccaguaccucaucauccagaacacgaccugggaggaccacugccaguucagccgccccucccccaucggcuaccuggggcugcucagccagcggacccgcgacaucuacaucagccggcgccugcugggcaccuucacguggacccucuccgacagcgagggcaacgaggcccccgggggcuacugccugacccgguggaugcugaucgaggccgagcucaagugcuucgggaacaccgccguggcgaagugcaacgagaagcacgacgaggaguucugcgacaugcugcgccuguucgacuucaacaagcaggccaucaagcggcucaagacggaggcccagauguccauccagcugaucaacaaggccgugaacgcccugaucaacgaccagcucaucaugaagaaccaccuccgcgacaucaugggcauccccuacugcaacuacagccgguacugguaccugaaccacaccgucaccgggaagaccucccugccccgcugcuggcuggugagcaacggcuccuaccugaacgagacgcacuucagcgacgacaucgagcagcaggcggacaacaugaucaccgagaugcuccagaaggaguacauggaccggcagggcaagaccccgcuggggcugguggaccucuucgucuucuccaccagcuucuaccugaucuccaucuuccugcaccuggugaagaucccgacgcaccgccacaucgugggcaagcccugccccaagccccaccggcucaaccacauggggaucugcagcugcggccuguacaagcacccggggguccccgugaaguggaagcgcugaggacuagucccuguucccagagcccacuuuuuuuucuuuuuuugaaauaaaauagccugucuuucagaucucaaaggcucuuuucagagccaccaaaaaaaaaaaaaaaaaaaaaaaaaaaaaaaaaaaaaaaaaaaaaaaaaaaaaaaaaaaaaaaaagaauu

SEQ ID NO: 14347 - RNA, 1733 nt, Artificial Sequence
  mRNA product Design a-2 (hSL-A64-N5) comprising derived and/or modified sequence from LASV(GA391;Clade III)__CAA36645__GPC (opt1)
aggagaguccgcucagccagguugcagaagcggcuuagcguguguccuaaucuucucucugcguguagguaggccugugccgcaaacaagcuuaccaugggccagaucgugaccuucuuccaggaggucccccacgugaucgaggaggugaugaacaucguccugaucgcccucagcauccuggccauccugaaggggcucuacaacguggcgaccugcggccugaucgggcuggugacguuccuccugcuguccggccgcagcugcucccucaucuacaaggggaccuacgagcugcagacccuggagcucaacauggagacccugaacaugacgaugccgcugagcugcaccaagaacaacucccaccacuacauccgggucggcaacgagaccggccucgagcugacccugacgaacaccagcauccucaaccacaaguucugcaaccuguccgacgcccacaagcgcaaccuguacgaccacagccucauguccaucaucagcaccuuccaccuguccauccccaacuucaaccaguacgaggccaugagcugcgacuucaacgggggcaagaucaccgugcaguacaaccugucccacagcuucgccguggacgccgcggggcacugcggcacgcucgccaacgggguccugcagaccuucaugcggauggccuggggcggcuccuacaucgcccuggacagcgggcgcggcaacugggacugcaucaugaccuccuaccaguaccucaucauccagaacaccacgugggacgaccacugccaguucagccggcccucccccaucggguaccugggccugcucagccagcgcacccgggacaucuacaucagccgccggcugcugggcaccuucaccuggacgcucuccgacagcgaggggaacgagaccccgggcggguacugccugacccgcuggaugcugaucgaggcggagcucaagugcuucggcaacaccgccguggccaagugcaacgagaagcacgacgaggaguucugcgacaugcugcggcuguucgacuucaacaagcaggccauccgccggcucaagacggaggcccagauguccauccagcugaucaacaaggcggugaacgcccugaucaacgaccagcucaucaugaagaaccaccuccgcgacaucauggggauccccuacugcaacuacagccgguacugguaccugaaccacaccuccaccggcaagaccagccugccccgcugcuggcugaucuccaacggcagcuaccugaacgagacgaaguucuccgacgacaucgagcagcaggccgacaacaugaucaccgagaugcuccagaaggaguacaucgaccggcaggggaagacgccccugggccuggucgaccuguucguguucagcaccuccuucuaccucaucagcaucuuccugcaccuggugaagaucccgacccaccgccacaucgucgggaagcccugccccaagccccaccggcucaaccacaugggcaucugcuccugcgggcuguacaagcagccgggcgugcccgugcgcuggaagcggugaggacuagucccuguucccagagcccacuuuuuuuucuuuuuuugaaauaaaauagccugucuuucagaucucaaaggcucuuuucagagccaccaaaaaaaaaaaaaaaaaaaaaaaaaaaaaaaaaaaaaaaaaaaaaaaaaaaaaaaaaaaaaaaaagaauu

SEQ ID NO: 14348 - RNA, 1736 nt, Artificial Sequence
  mRNA product Design a-2 (hSL-A64-N5) comprising derived and/or modified sequence from LASV(AV;Clade V)__CCA30314__GPC (opt1)
aggagaguccgcucagccagguugcagaagcggcuuagcguguguccuaaucuucucucugcguguagguaggccugugccgcaaacaagcuuaccaugggccagaucgugaccuucuuccaggaggucccccacgugaucgaggaggugaugaacaucguccugaucgcccucagcauccuggccgugcugaaggggcucuacaacaucgcgaccugcggccugaucgggcugaucacguuccuccugcugugcggccgcuccugcagcuccaaccucuacaaggggguguacgagcugcagagccuggaccucaacauggagacccugaacaugaccaugccgcuguccugcaccaagaacaacagccaccacuacauccgggucggcaacgacacgggccucgagcugacccugaccaacaccuccauccucaaccacaaguucugcaaccugagcgacgcccacaagaaggaccuguacgaccacgcccucauguccaucaucagcacguuccaccuguccauccccaacuucaaccaguacgaggccaugagcugcgacuucaacgggggcaagaucuccgugcaguacaaccugagccacuccuacgccaucgacgcggccaaccacugcgggaccguggccaacggcauccuccagaccuucaugcgcauggccuggggcgggagcuacaucgcgcuggacuccggccgggggaacugggacugcaucaugaccagcuaccaguaccugaucauccagaacacgaccugggagaaccacugccaguucucccgccccagccccaucggcuaccucgggcugcugagccagcggacccgcgacaucuacaucucccggcgccuccugggcaccuucacguggacccugagcgacuccgagggcaacgccacccccgggggcuacugccucacccgguggaugcugaucgaggccgagcugaagugcuucgggaacacggccgucgccaagugcaacgagaagcacgacgaggaguucugcgacaugcuccgccuguucgacuucaacaagcaggcgaucagccggcugaaguccgaggcccagaugagcauccagcucaucaacaaggccgugaacgcccugaucaacgaccagcugaucaugaagaaccaccuccgcgacaucaugggcauccccuacugcaacuacuccaaguacugguaccugaaccacaccaucaccgggaagaccagccugcccaagugcuggcucguguccaacggcagcuaccugaacgagacgcacuucuccgacgacaucgagcagcaggccgacaacaugaucaccgagaugcugcagaaggaguacauggagcggcagggcaagaccccgcucgggcuggucgaccuguucguguucagcaccuccuucuaccugaucagcaucuuccuccgccuggugaagaucccgacgcaccggcacaucgucggcaagcccugccccaagccccaccgccugaaccacauggggaucugcuccugcggccucuacaagcagccgggggugcccgugcgguggaagcgcugaggacuagucccuguucccagagcccacuuuuuuuucuuuuuuugaaauaaaauagccugucuuucagaucucaaaggcucuuuucagagccaccaaaaaaaaaaaaaaaaaaaaaaaaaaaaaaaaaaaaaaaaaaaaaaaaaaaaaaaaaaaaaaaaagaauu

SEQ ID NO: 14349 - RNA, 1733 nt, Artificial Sequence
  mRNA product Design a-2 (hSL-A64-N5) comprising derived and/or modified sequence from LASV(Togo/2016/7082;Clade VI)__AMR44577__GPC (opt1)
aggagaguccgcucagccagguugcagaagcggcuuagcguguguccuaaucuucucucugcguguagguaggccugugccgcaaacaagcuuaccaugggccagaucaucaccuucuuccaggaggugccccacgucaucgaggaggugaugaacaucgugcugaucgcccucagccugcuggccauccucaagggggucuacaacguggcgaccugcggcaucaucgggcuggugacguuccuguuccucugcggccgcuccugcagccugaucuacaagggguccuacgagcugcagacccucgagcugaacauggagacccugaacaugaccaugccgcucagcugcacgaagaacuccagccaccacuacauccgggucggcaacgagaccggccuggagcugacccucaccaacacguccaucaucaaccacaaguucugcaaccugagcgacgcccacaagcgcaaccuguacgaccacgcccucauguccauccugagcaccuuccaccuguccauccccaacuucaaccaguacgaggccaugagcugcgacuucaacgggggcaagaucuccgugcaguacaaccucagccacgccuacgcgguggacgccgccgagcacugcgggaccgucgccaacggcgugcugcagaccuucaugcggauggcguggggcggguccuacaucgcccuggacagcggccgcgggaacugggacugcaucaugacguccuaccaguaccucaucauccagaacaccaccugggaggaccacugccaguucagccggcccucccccaucggcuaccuggggcugcucagccagcgcacccgggacaucuacaucagccgccggcugcugggcacguucaccuggacccucuccgacagcgagggcaacgagacccccgggggcuacugccugacgcgcuggaugcugaucgaggccgagcucaagugcuucgggaacaccgccguggccaagugcaacgagaagcacgacgaggaguucugcgacaugcugcggcuguucgacuucaacaagcaggcgauccagcgccucaaguccgaggcccagaugagcauccagcugaucaacaaggccgucaacgcccugaucaacgaccagcucaucaugaagaaccaccuccgggacaugaugggcauccccuacugcaacuacuccaaguacugguaccugaaccacaccagcuccgggcgcaccagccugcccaagugcuggcugguguccaacggcagcuaccugaacgagacgcacuucuccgacgacaucgagcagcaggccgacaacaugaucaccgagaugcuccagaaggaguacaucgaccggcagggcaagaccccgcuggggcugguggaccucuucgucuucagcaccuccuucuaccugaucagcaucuuccugcaccugaucaagaucccgacgcaccgccacaucgugggcaagcccugccccaagccccaccggcucaaccacauggggaucugcuccugcggccuguacaagcagccgggggugcccacccgcuggaagcggugaggacuagucccuguucccagagcccacuuuuuuuucuuuuuuugaaauaaaauagccugucuuucagaucucaaaggcucuuuucagagccaccaaaaaaaaaaaaaaaaaaaaaaaaaaaaaaaaaaaaaaaaaaaaaaaaaaaaaaaaaaaaaaaaagaauu

SEQ ID NO: 14350 - RNA, 1733 nt, Artificial Sequence
  mRNA product Design a-2 (hSL-A64-N5) comprising derived and/or modified sequence from LASV(KAK-428;Clade n.d. (VII))__ANH09740__GPC (opt1)
aggagaguccgcucagccagguugcagaagcggcuuagcguguguccuaaucuucucucugcguguagguaggccugugccgcaaacaagcuuaccaugggccagaucgugaccuucuuccaggaggucccccacgugaucgaggaggugaugaacaucguccugaucgcccucagccugcuggccauccucaaggggcuguacaacuucgcgaccugcggcgugaucgggcugaucacguuccuccugcugugcggccgcuccugcagcgccaccuacaaggggcaguacgagcuccagacccuggagcugaacauggagucccucaacaugaccaugccgcugagcugcacgaagaacaacucccaccacuacauccgggccggcaacaacaccggccuggagcucacccugaccaacacgagcaucaucucccacaaguucugcaaccugagcgacgcccacaagaagaaccucuacgaccacacccugauguccaucaucaccaccuuccaccugagcauccccaacuucaaccaguacgaggccauguccugcgacuucaacgggggcaagaucagcauccaguacaaccucucccacagcuacgcgggggacgccgcccagcacugcggcacgguggccaacgggguccugcagaccuucaugcgcauggcguggggcggcuccuaccuggcccucgacagcgggcggcgcggcugggacugcaucaucuccagcuaccaguaccugaucauccagaacaccaccugggacgaccacugccaguucucccggcccagccccaucggguaccugggcuucgugagccagaagacgcgcgacaucuacaucucccggcgccuccugggcaccuucaccuggacccugagcgacuccgaggggcacgacaugccgggcggguacugccucacgcgguggaugcugaucgaggccgaccugaagugcuucggcaacaccgccguggccaagugcaacgagaagcacgacgaggaguucugcgacauguggcgccucuucgacuucaacaagcaggcgauccagcggcugaaggccgaggcccagaugaacauccagcugaucaacaaggccgucaacgcccucaucaacgaccagcugaugaugaagaaccaccuccgcgacaucauggggauccccuacugcaacuacagcaaguucugguaccugaacaacaccaccacgggccggaccucccugccccgcugcuggcugaucagcaacggcuccuaccucaacgagacccacuucagcgacgacaucgagcagcaggcggacaacaugaucaccgagaugcugcagaaggaguacauggaccggcaggggaagacgccccugggccucguggaccuguucguguucuccaccagcuucuaccugaucaccaucuuccuccaccuggucaagaucccgacccaccgccacaucguggggaagcccugccccaagccccaccggcugaaccacaugggcaucugcuccugcgggcuguacaagcagccgggcgugcccguccgcuggaagcggugaggacuagucccuguucccagagcccacuuuuuuuucuuuuuuugaaauaaaauagccugucuuucagaucucaaaggcucuuuucagagccaccaaaaaaaaaaaaaaaaaaaaaaaaaaaaaaaaaaaaaaaaaaaaaaaaaaaaaaaaaaaaaaaaagaauu

SEQ ID NO: 14351 - RNA, 1733 nt, Artificial Sequence; identical to SEQ ID NO: 14345
  mRNA product Design a-2 (hSL-A64-N5) comprising derived and/or modified sequence from LASV(Pinneo-NIG-1969;Clade I)__AIT17836__GPC (opt1)

SEQ ID NO: 14352 - RNA, 1733 nt, Artificial Sequence
  mRNA product Design a-2 (hSL-A64-N5) comprising derived and/or modified sequence from LASV(ISTH0009-NIG-2011;Clade II)__AIT17404__GPC (opt1)
aggagaguccgcucagccagguugcagaagcggcuuagcguguguccuaaucuucucucugcguguagguaggccugugccgcaaacaagcuuaccaugggccagaucaucaccuucuuccaggaggugccccacgucaucgaggaggugaugaacaucgugcugaucgcccucagccugcuggccauccucaaggggaucuacaacgucgcgaccugcggccuguucgggcugguguccuuccuccugcugugcggccgcagcugcuccacgaccuacaaggggguguacgagcuccagacccuggagcuggacauggccagccucaacaugaccaugccgcuguccugcacgaagaacaacagccaccacuacaucauggucggcaacgagaccggccuggagcucacccugaccaacacguccaucaucaaccacaaguucugcaaccugagcgacgcccacaagaagaaccucuacgaccacgcccugauguccaucaucagcaccuuccaccuguccauccccaacuucaaccaguacgaggccaugagcugcgacuucaacgggggcaagaucuccgugcaguacaaccucagccacgcguacgccguggacgccgccaaccacugcgggaccaucgcgaacggcguccugcagaccuucaugcggauggccuggggcggguccuacaucgcccuggacagcggcaagggguccugggacugcaucaugacgagcuaccaguaccucaucauccagaacaccaccugggaggaccacugccaguucucccgccccagccccaucggcuaccuggggcugcucagccagcggacccgcgacaucuacaucucccggcgccugcugggcacguucaccuggacccucagcgacuccgagggcaacgagacccccgggggcuacugccugacgcgguggaugcugaucgaggccgagcucaagugcuucgggaacaccgccguggcgaagugcaacgagaagcacgacgaggaguucugcgacaugcugcgccuguucgacuucaacaagcaggccauccggcgccucaagaccgaggcccagaugagcauccagcugaucaacaaggccgugaacgcccugaucaacgaccagcucaucaugaagaaccaccuccgggacaucaugggcaucccguacugcaacuacuccaaguacugguaccugaaccacaccgucacggggaagaccagccugccccgcugcuggcugguguccaacggcagcuaccugaacgagacccacuucuccgacgacaucgagcagcaggcggacaacaugaucaccgagcuccugcagaaggaguacauggaccggcagggcaagacgccccuggggcucguggaccuguucgucuucagcaccuccuucuaccugaucagcaucuuccugcaccucaucaagaucccgacccaccgccacaucaccggcaagcccugccccaagccccaccggcugaaccacauggggaucugcuccugcggccuguacaagcacccgggggugcccgugaaguggaagcgcugaggacuagucccuguucccagagcccacuuuuuuuucuuuuuuugaaauaaaauagccugucuuucagaucucaaaggcucuuuucagagccaccaaaaaaaaaaaaaaaaaaaaaaaaaaaaaaaaaaaaaaaaaaaaaaaaaaaaaaaaaaaaaaaaagaauu

SEQ ID NO: 14353 - RNA, 1733 nt, Artificial Sequence
  mRNA product Design a-2 (hSL-A64-N5) comprising derived and/or modified sequence from LASV(ISTH2010-NIG-2012;Clade II)__AIT17482__GPC (opt1)
aggagaguccgcucagccagguugcagaagcggcuuagcguguguccuaaucuucucucugcguguagguaggccugugccgcaaacaagcuuaccaugggccagaucaucaccuucuuccaggaggugccccacgucaucgaggaggugaugaacaucgugcugaucgcccucagccugcuggccauccucaaggggaucuacaacgucgcgaccugcggccuguucgggcugguguccuuccuccugcugugcggccgcagcugcuccacgaccuacaaggggguguacgagcuccagacccuggagcuggacauggccagccucaacaugaccaugccgcuguccugcacgaagaacaacagccaccacuacaucauggucggcaacgagaccggccuggagcucacccugaccaacacguccaucaucaaccacaaguucugcaaccugagcgacgcccacaagaagaaccucuacgaccacgcccugauguccaucaucagcaccuuccaccuguccauccccaacuucaaccaguacgaggccaugagcugcgacuucaacgggggcaagaucuccgugcaguacaaccucagccacgcguacgccguggacgccgccaaccacugcgggaccaucgcgaacggcguccugcagaccuucaugcggauggccuggggcggguccuacaucgcccuggacagcggcaagggguccugggacugcaucaugacgagcuaccaguaccucaucauccagaacaucaccugggaggaccacugccaguucucccgccccagccccaucggcuaccuggggcugcucagccagcggacccgcgacaucuacaucucccggcgccugcugggcaccuucacguggacccucagcgacuccgagggcaacgagacccccgggggcuacugccugacccgguggaugcugaucgaggccgagcucaagugcuucgggaacacggccguggcgaagugcaacgagaagcacgacgaggaguucugcgacaugcugcgccuguucgacuucaacaagcaggccauccggcgccucaagaccgaggcccagaugagcauccagcugaucaacaaggccgugaacgcccugaucaacgaccagcucaucaugaagaaccaccuccgggacaucaugggcauccccuacugcaacuacuccaaguacugguaccugaaccacaccgucaccgggaagacgagccugccccgcugcuggcugguguccaacggcagcuaccugaacgagacccacuucuccgacgacaucgagcagcaggcggacaacaugaucaccgagcuccugcagaaggaguacaucgaccggcagggcaagaccccgcuggggcucguggaccuguucgucuucagcacguccuucuaccugaucagcaucuuccugcaccucgugaagaucccgacccaccgccacguggucggcaagcccugccccaagccccaccggcugaaccacauggggaucugcuccugcggccuguacaagcacccgggggugcccgugaaguggaagcgcugaggacuagucccuguucccagagcccacuuuuuuuucuuuuuuugaaauaaaauagccugucuuucagaucucaaaggcucuuuucagagccaccaaaaaaaaaaaaaaaaaaaaaaaaaaaaaaaaaaaaaaaaaaaaaaaaaaaaaaaaaaaaaaaaagaauu

SEQ ID NO: 14354 - RNA, 1733 nt, Artificial Sequence
  mRNA product Design a-2 (hSL-A64-N5) comprising derived and/or modified sequence from LASV(Lassa virus/H.sapiens-wt/NGA/2015/ISTH_0543;Clade II)__AVO03639__GPC (opt1)
aggagaguccgcucagccagguugcagaagcggcuuagcguguguccuaaucuucucucugcguguagguaggccugugccgcaaacaagcuuaccaugggccagaucaucaccuucuuccaggaggugccccacgucaucgaggaggugaugaacaucgugcugaucgcccucagccugcuggccauccucaaggggaucuacaacgucgcgaccugcggccuguucgggcugguguccuuccuccugcugugcggccgcagcugcuccacgaccuacaaggggguguacgagcuccagacccuggagcuggacauggccaaccucaacaugaccaugccgcugagcugcacgaagaacaacucccaccacuacaucauggucggcaacgagaccggccuggagcucacccugaccaacacgagcaucaucaaccacaaguucugcaaccuguccgacgcccacaagaagaaccucuacgaccacgcccugaugagcaucaucuccaccuuccaccugagcauccccaacuucaaccaguacgaggccauguccugcgacuucaacgggggcaagaucagcgugcaguacaaccucucccacaccuacgcgguggacgccgccaaccacugcgggaccaucgccaacggcguccugcagacguucaugcggauggcguggggcgggagcuacaucgcccuggacuccggcaaggggagcugggacugcaucaugaccuccuaccaguaccucgugauccagaacaccaccugggaggaccacugccaguucagccgccccucccccaucggcuaccuggggcugcucagccagcggacgcgcgacaucuacaucagccggcgccugcugggcaccuucaccuggacccucuccgacagcgagggcaacgagacgcccgggggcuacugccugacccgguggaugcugaucgaggccgagcucaagugcuucgggaacaccgccguggccaagugcaacgagaagcacgacgaggaguucugcgacaugcugcgccuguucgacuucaacaagcaggcgauccggcgccucaagaccgaggcccagauguccauccagcugaucaacaaggccgucaacgcccugaucaacgaccagcucaucaugaagaaccaccuccgggacaucaugggcauccccuacugcaacuacagcaaguacugguaccugaaccacacggugaccgggaagaccucccugccccgcugcuggcuggugagcaacggcuccuaccugaacgagacccacuucagcgacgacaucgagcagcaggccgacaacaugaucacggagcuccugcagaaggaguacaucgaccggcagggcaagaccccgcuggggcucgucgaccuguucguguucuccaccagcuucuaccugaucuccaucuuccugcaccucgugaagaucccgacccaccgccacaucacgggcaagcccugccccaagccccaccggcugaaccacauggggaucugcagcugcggccuguacaagcacccggggguccccgugaaguggaagcgcugaggacuagucccuguucccagagcccacuuuuuuuucuuuuuuugaaauaaaauagccugucuuucagaucucaaaggcucuuuucagagccaccaaaaaaaaaaaaaaaaaaaaaaaaaaaaaaaaaaaaaaaaaaaaaaaaaaaaaaaaaaaaaaaaagaauu

SEQ ID NO: 14355 - RNA, 1733 nt, Artificial Sequence
  mRNA product Design a-2 (hSL-A64-N5) comprising derived and/or modified sequence from LASV(Lassa virus/H.sapiens-wt/NGA/2016/ISTH_0009;Clade II)__AVO03571__GPC (opt1)
aggagaguccgcucagccagguugcagaagcggcuuagcguguguccuaaucuucucucugcguguagguaggccugugccgcaaacaagcuuaccaugggccagaucaucaccuucuuccaggaggugccccacgucaucgaggaggugaugaacaucgugcugaucgcccucagccugcuggccauccucaaggggaucuacaacgucgcgaccugcggccugcuggggcucguguccuuccugcugcucugcggccgcagcugcuccacgaccuacaaggggguguacgagcugcagacccuggagcucgacauggccagccugaacaugaccaugccgcuguccugcacgaagaacaacagccaccacuacaucauggucggcaacgagaccggccucgagcugacccugaccaacacguccaucaucaaccacaaguucugcaaccucagcgacgcccacaagaagaaccuguacgaccacgcccugauguccaucaucagcaccuuccaccucuccauccccaacuucaaccaguacgaggccaugagcugcgacuucaacgggggccggaucuccgugcaguacaaccugagccacuccuacgcgguggacgccgccaaccacugcgggaccaucgccaacggcguccugcagaccuucaugcgcauggcguggggcgggagcuacaucgcccucgacuccggcaaggggagcugggacugcaucaugacguccuaccaguaccugaucauccagaacaccaccugggaggaccacugccaguucagccggcccagccccaucggcuaccuggggcuccugucccagcgcacccgggacaucuacaucagccgccggcugcucggcacguucaccuggacccuguccgacagcgagggcaacgagacccccgggggcuacugccugacgcgcuggaugcucaucgaggccgagcugaagugcuucgggaacaccgccguggccaagugcaacgagaagcacgacgaggaguucugcgacaugcugcggcuguucgacuucaacaagcaggcgauccgccggcugaagaccgaggcccagauguccauccagcugaucaacaaggccgugaacgcccucaucaacgaccagcugaucaugaagaaccaccuccgcgacaucaugggcaucccguacugcaacuacagcaaguacugguaccucaaccacaccgucacggggaagaccucccugccccggugcuggcuggugagcaacggcuccuaccucaacgagacccacuucagcgacgacaucgagcagcaggccgacaacaugaucaccgagcugcugcagaaggaguacaucgaccgccagggcaagacgccccucgggcugguggaccuguucgucuucuccaccagcuucuaccugaucuccaucuuccuccaccuggugaagaucccgacccaccggcacaucaccggcaagcccugccccaagccccaccgccugaaccacauggggaucugcagcugcggccucuacaaccacccgggggugcccgucaaguggaagcggugaggacuagucccuguucccagagcccacuuuuuuuucuuuuuuugaaauaaaauagccugucuuucagaucucaaaggcucuuuucagagccaccaaaaaaaaaaaaaaaaaaaaaaaaaaaaaaaaaaaaaaaaaaaaaaaaaaaaaaaaaaaaaaaaagaauu

SEQ ID NO: 14356 - RNA, 1733 nt, Artificial Sequence
  mRNA product Design a-2 (hSL-A64-N5) comprising derived and/or modified sequence from LASV(Lassa virus/H.sapiens-wt/NGA/2016/ISTH_0017;Clade II)__AVO03567__GPC (opt1)
aggagaguccgcucagccagguugcagaagcggcuuagcguguguccuaaucuucucucugcguguagguaggccugugccgcaaacaagcuuaccaugggccagaucaucaccuucuuccaggaggugccccacgucaucgaggaggugaugaacaucgugcugaucgcccucagccugcuggccauccucaaggggaucuacaacgucgcgaccugcggccuguucgggcugguguccuuccuccugcugugcggccgcagcugcuccacgaccuacaaggggguguacgagcuccagacccuggagcuggacauggccagccucaacaugaccaugccgcuguccugcacgaagaacaacagccaccacuacaucauggucggcaacgagaccggccuggagcucacccugaccaacacguccaucaucaaccacaaguucugcaaccugagcgacgcccacaagaagaaccucuacgaccacgcccugauguccaucaucagcaccuuccaccuguccauccccaacuucaaccaguacgaggccaugagcugcgacuucaacgggggcaagaucuccgugcaguacaaccucagccacaccuacgcgaucgacgccgccaaccacugcgggaccaucgccaacggcgugcugcagacguucaugcggauggcguggggcggguccuacaucgcccuggacagcggcaagggguccugggacugcaucaugaccagcuaccaguaccucaucauccagaacaccaccugggaggaccacugccaguucucccgccccagccccaucggcuaccuggggcugcucagccagcggacgcgcgacaucuacaucucccggcgccugcugggcaccuucaccuggacccucagcgacuccgagggcaacgagacgcccgggggcuacugccugacccgguggaugcugaucgaggccgagcucaagugcuucgggaacaccgccgucgccaagugcaacgagaagcacgacgaggaguucugcgacaugcugcgccuguucgacuucaacaagcaggcgauccggcgccucaagaccgaggcccagaugagcauccagcugaucaacaaggccgugaacgcccugaucaacgaccagcucaucaugaagaaccaccuccgggacaucaugggcauccccuacugcaacuacuccaaguacugguaccugaaccacacggugaccgggaagaccagccugccccgcugcuggcuggucuccaacggcagcuaccugaacgagacccacuucuccgacgacaucgagcagcaggccgacaacaugaucacggagcuccugcagaaggaguacauggaccggcagggcaagaccccgcuggggcucguggaccuguucguguucagcaccuccuucuaccugaucagcaucuuccugcaccucguccgcaucccgacccaccggcacgugaucggcaagcccugccccaagccccaccgccugaaccacauggggaucugcuccugcggccuguacaagcacccgggggugcccgucaaguggaagcggugaggacuagucccuguucccagagcccacuuuuuuuucuuuuuuugaaauaaaauagccugucuuucagaucucaaaggcucuuuucagagccaccaaaaaaaaaaaaaaaaaaaaaaaaaaaaaaaaaaaaaaaaaaaaaaaaaaaaaaaaaaaaaaaaagaauu

SEQ ID NO: 14357 - RNA, 1733 nt, Artificial Sequence
  mRNA product Design a-2 (hSL-A64-N5) comprising derived and/or modified sequence from LASV(Lassa virus/H.sapiens-wt/NGA/2018/ISTH_0959;Clade II)__AVV65099__GPC (opt1)
aggagaguccgcucagccagguugcagaagcggcuuagcguguguccuaaucuucucucugcguguagguaggccugugccgcaaacaagcuuaccaugggccagaucaucaccuucuuccaggaggugccccacgucaucgaggaggugaugaacaucgugcugaucgcccucagccugcuggccauccucaaggggaucuacaacgucgugaccugcggccuguucgggcugguguccuuccuccugcugugcggccgcagcugcuccacgaccuacaagggggucuacgagcuccagacccuggagcuggacauggcgagccucaacaugaccaugccgcuguccugcacgaagaacaacagccaccacuacaucauggugggcaacgagaccggccuggagcucacccugaccaacacguccaucaucaaccacaaguucugcaaccugagcgacgcccacaagaagaaccucuacgaccacgcccugauguccaucaucagcaccuuccaccuguccauccccaacuucaaccaguacgaggccaugagcugcgacuucaacgggggcaagaucuccgugcaguacaaccucagccacgccuacgcgaucgacgccgccaaccacugcgggaccaucgccaacggcguccugcagaccuucaugcggauggcguggggcggguccuacaucgcccuggacagcggcaagggguccugggacugcaucaugacgagcuaccaguaccucaucauccagaacaccaccugggaggaccacugccaguucucccgccccagccccaucggcuaccuggggcugcucagccagcggacccgcgacaucuacaucucccggcgccugcugggcacguucaccuggacccucagcgacuccgagggcaacgagacccccgggggcuacugccugacgcgguggaugcugaucgaggccgagcucaagugcuucgggaacaccgccguggccaagugcaacgagaagcacgacgaggaguucugcgacaugcugcgccuguucgacuucaacaagcaggcgauccggcgccucaagaccgaggcccagaugagcauccagcugaucaacaaggccgugaacgcccugaucaacgaccagcucaucaugaagaaccaccuccgggacaucaugggcaucccguacugcaacuacuccaaguacugguaccugaaccacaccgucacggggaagaccagccugccccgcugcuggcugguguccaacggcagcuaccugaacgagacccacuucuccgacgacaucgagcagcaggccgacaacaugaucaccgagcuccugcagaaggaguacaucgaccggcagggcaagacgccccuggggcucguggaccuguucgucuucagcaccuccuucuaccugaucagcaucuuccugcaccucgugaagaucccgacccaccgccacgugaucggcaagcccugccccaagccccaccggcugaaccacauggggaucugcuccugcggccuguacaagcacccggggguccccgugaaguggaagcgcugaggacuagucccuguucccagagcccacuuuuuuuucuuuuuuugaaauaaaauagccugucuuucagaucucaaaggcucuuuucagagccaccaaaaaaaaaaaaaaaaaaaaaaaaaaaaaaaaaaaaaaaaaaaaaaaaaaaaaaaaaaaaaaaaagaauu

SEQ ID NO: 14358 - RNA, 1733 nt, Artificial Sequence
  mRNA product Design a-2 (hSL-A64-N5) comprising derived and/or modified sequence from LASV(LASV003-NIG-2008;Clade II)__AIT17580__GPC (opt1)
aggagaguccgcucagccagguugcagaagcggcuuagcguguguccuaaucuucucucugcguguagguaggccugugccgcaaacaagcuuaccaugggccagaucaucaccuucuuccaggaggugccccacgucaucgaggaggugaugaacaucgugcugaucgcccucagccugcuggccauccucaaggggaucuacaacgucgcgaccugcggccuguucgggcugguguccuuccuccugcugugcggccgcagcugcuccacgaccuacaaggggguguacgagcuccagacccuggagcuggacauggccagccucaacaugaccaugccgcuguccugcacgaagaacaacagccaccacuacaucauggucggcaacgagaccggccuggagcucacccugaccaacacguccaucaucaaccacaaguucugcaaccugagcgacgcccacaagaagaaccucuacgaccacgcccugauguccaucaucagcaccuuccaccuguccauccccaacuucaaccaguacgaggccaugagcugcgacuucaacgggggcaagaucuccgugcaguacaaccucagccacaccuacgcgguggacgccgccaaccacugcgggaccaucgccaacggcguccugcagacguucaugcggauggcguggggcggguccuacaucgcccuggacagcggcaagggguccugggacugcaucaugaccagcuaccaguaccucaucauccagaacaccaccugggaggaccacugccaguucucccgccccagccccaucggcuaccuggggcugcucagccagcggacgcgcgacaucuacaucucccggcgccugcugggcaccuucaccuggacccucagcgacuccgagagcaacgagacgccgggcggguacugccugacccgguggaugcugaucgaggccgagcucaagugcuucggcaacaccgccguggccaagugcaacgagaagcacgacgaggaguucugcgacaugcugcgccuguucgacuucaacaagcaggcgauccggcgccucaaggccgaggcccagauguccauccagcugaucaacaaggccgugaacgcccugaucaacgaccagcucaucaugaagaaccaccuccgggacaucauggggauccccuacugcaacuacagcaaguacugguaccugaaccacaccgucacgggccgcaccucccugccccggugcuggcuggugagcaacggguccuaccugaacgagacccacuucagcgacgacaucgagcagcaggcggacaacaugaucaccgagcuccugcagaaggaguacauggaccgccagggcaagacgccccugggccucguggaccuguucgucuucuccaccagcuucuaccugaucuccaucuuccugcaccucgugaagaucccgacccaccggcacgugaucgggaagcccugccccaagccccaccgccugaaccacaugggcaucugcagcugcgggcuguacaagcacccgggcguccccgugaaguggaagcggugaggacuagucccuguucccagagcccacuuuuuuuucuuuuuuugaaauaaaauagccugucuuucagaucucaaaggcucuuuucagagccaccaaaaaaaaaaaaaaaaaaaaaaaaaaaaaaaaaaaaaaaaaaaaaaaaaaaaaaaaaaaaaaaaagaauu

SEQ ID NO: 14359 - RNA, 1733 nt, Artificial Sequence
  mRNA product Design a-2 (hSL-A64-N5) comprising derived and/or modified sequence from LASV(LASV035-NIG-2009;Clade II)__AIT17588__GPC (opt1)
aggagaguccgcucagccagguugcagaagcggcuuagcguguguccuaaucuucucucugcguguagguaggccugugccgcaaacaagcuuaccaugggccagaucaucaccuucuuccaggaggugccccacgucaucgaggaggugaugaacaucgugcugaucgcccucagccugcuggccauccucaaggggaucuacaacgucgcgaccugcggccuguucgggcugguguccuuccuccugcugugcggccgcagcugcuccacgaccuacaaggggguguacgagcuccagacccuggagcuggacauggccagccucaacaugaccaugccgcuguccugcacgaagaacaacagccaccacuacaucauggucggcaacgagaccggccuggagcucacccugaccaacacguccaucaucaaccacaaguucugcaaccugagcgacgcccacaagaagaaccucuacgaccacgcccugauguccaucaucagcaccuuccaccuguccauccccaacuucaaccaguacgaggccaugagcugcgacuucaacgggggcaagaucuccgugcaguacaaccucagccacgcguacgccguggacgccgccaaccacugcgggaccaucgcgaacggcguccugcagaccuucaugcggauggccuggggcggguccuacaucgcccuggacagcggcaagggguccugggacugcaucaugacgagcuaccaguaccucaucauccagaacaccaccugggaggaccacugccaguucucccgccccagccccaucggcuaccuggggcugcucagccagcggacccgcgacaucuacaucucccggcgccugcugggcacguucaccuggacccucagcgacuccgagggcaacgagacccccgggggcuacugccugacgcgguggaugcugaucgaggccgagcucaagugcuucgggaacaccgccguggcgaagugcaacgagaagcacgacgaggaguucugcgacaugcugcgccuguucgacuucaacaagcaggccauccggcgccucaaggccgaggcccagaugagcauccagcugaucaacaaggccgugaacgcgcugaucaacgaccagcucaucaugaagaaccaccuccgggacaucaugggcauccccuacugcaacuacuccaaguacugguaccugaaccacaccgucaccgggaagacgagccugccccgcugcuggcugguguccaacggcagcuaccugaacgagacccacuucuccgacgacaucgagcagcaggccgacaacaugaucaccgagcuccugcagaaggaguacaucgaccggcagggcaagaccccgcuggggcucguggaccuguucgucuucagcacguccuucuaccugaucagcaucuuccugcaccucgugaagaucccgacccaccgccacgugaucggcaagcccugccccaagccccaccggcugaaccacauggggaucugcuccugcggccuguacaagcacccggggguccccgugaaguggaagcgcugaggacuagucccuguucccagagcccacuuuuuuuucuuuuuuugaaauaaaauagccugucuuucagaucucaaaggcucuuuucagagccaccaaaaaaaaaaaaaaaaaaaaaaaaaaaaaaaaaaaaaaaaaaaaaaaaaaaaaaaaaaaaaaaaagaauu

SEQ ID NO: 14360 - RNA, 1733 nt, Artificial Sequence
  mRNA product Design a-2 (hSL-A64-N5) comprising derived and/or modified sequence from LASV(LASV1000-NIG-2009;Clade II)__AIT17782__GPC (opt1)
aggagaguccgcucagccagguugcagaagcggcuuagcguguguccuaaucuucucucugcguguagguaggccugugccgcaaacaagcuuaccaugggccagaucaucaccuucuuccaggaggugccccacgucaucgaggaggugaugaacaucgugcugaucgcccucagccugcuggccauccucaaggggaucuacaacgucgcgaccugcggccuguucgggcugguguccuuccuccugcugugcggccgcagcugcuccacgaccuacaaggggguguacgagcuccagacccuggagcuggacauggccagccucaacaugaccaugccgcuguccugcacgaagaacaacagccaccacuacaucauggucggcaacgagaccggccuggagcucacccugaccaacacguccaucaucaaccacaaguucugcaaccugagcgacgcccacaagaagaaccucuacgaccacgcccugauguccaucaucagcaccuuccaccuguccauccccaacuucaaccaguacgaggccaugagcugcgacuucaacgggggcaagaucuccgugcaguacaaccucagccacaccuacgcgguggacgccgccaaccacugcgggaccaucgccaacggcguccugcagacguucaugcggauggcguggggcggguccuacaucgcccuggacagcggcaagggguccugggacugcaucaugaccagcuaccaguaccucaucauccagaacaccaccugggaggaccacugccaguucucccgccccagccccaucggcuaccuggggcugcucagccagcggacgcgcgacaucuacaucucccggcgccugcugggcaccuucaccuggacccucagcgacuccgagggcaacgagacgcccgggggcuacugccugacccgguggaugcugaucgaggccgagcucaagugcuucgggaacaccgccguggccaagugcaacgagaagcacgacgaggaguucugcgacaugcugcgccuguucgacuucaacaagcaggcgaucaagcggcucaagaccgaggcccagaugagcauccagcugaucaacaaggccgugaacgcccugaucaacgaccagcucaucaugaagaaccaccuccgcgacaucaugggcauccccuacugcaacuacuccaaguacugguaccugaaccacacggucaccgggaagaccagccugccccggugcuggcugguguccaacggcagcuaccugaacgagacccacuucuccgacgacaucgagcagcaggccgacaacaugaucacggagcuccugcagaaggaguacaucgaccgccagggcaagaccccgcuggggcucguggaccuguucgucuucagcaccuccuucuaccugaucagcaucuuccugcaccucgugaagaucccgacccaccggcacguggucggcaagcccugccccaagccccaccgccugaaccacauggggaucugcuccugcggccuguacaagcacccgggggugcccgugaaguggaagcggugaggacuagucccuguucccagagcccacuuuuuuuucuuuuuuugaaauaaaauagccugucuuucagaucucaaaggcucuuuucagagccaccaaaaaaaaaaaaaaaaaaaaaaaaaaaaaaaaaaaaaaaaaaaaaaaaaaaaaaaaaaaaaaaaagaauu

SEQ ID NO: 14361 - RNA, 1733 nt, Artificial Sequence
  mRNA product Design a-2 (hSL-A64-N5) comprising derived and/or modified sequence from LASV(LASV221-NIG-2010;Clade II)__AIT17624__GPC (opt1)
aggagaguccgcucagccagguugcagaagcggcuuagcguguguccuaaucuucucucugcguguagguaggccugugccgcaaacaagcuuaccaugggccagaucaucaccuucuuccaggaggugccccacgucaucgaggaggugaugaacaucgugcugaucgcccucagccugcuggccauccucaaggggaucuacaacgucgcgaccugcggccuguucgggcugguguccuuccuccugcugugcggccgcagcugcuccacgaccuacaaggggguguacgagcuccagacccuggagcuggacauggccagccucaacaugaccaugccgcuguccugcacgaagaacaacagccaccacuacaucauggucggcaacgagaccggccuggagcucacccugaccaacacguccaucaucaaccacaaguucugcaaccugagcgacgcccacaagaagaaccucuacgaccacgcccugauguccaucaucagcaccuuccaccuguccauccccaacuucaaccaguacgaggccaugagcugcgacuucaacgggggcaagaucuccgugcaguacaaccucagccacaccuacgcgaucgacgccgccaaccacugcgggaccaucgccaacggcgugcugcagacguucaugcggauggcguggggcggguccuacaucgcccuggacagcggcaagggguccugggacugcaucaugaccagcuaccaguaccucaucauccagaacaccaccugggaggaccacugccaguucucccgccccagccccaucggcuaccuggggcugcucagccagcggacgcgcgacaucuacaucucccggcgccugcugggcaccuucaccuggacccucagcgacuccgagggcaacgagacgcccgggggcuacugccugacccgguggaugcugaucgaggccgagcucaagugcuucgggaacaccgccgucgccaagugcaacgagaagcacgacgaggaguucugcgacaugcugcgccuguucgacuucaacaagcaggcgauccggcgccucaagaccgaggcccagaugagcauccagcugaucaacaaggccgugaacgcccugaucaacgaccagcucaucaugaagaaccaccuccgggacaucaugggcauccccuacugcaacuacuccaaguacugguaccugaaccacacggugaccgggaagaccagccugccccgcugcuggcuggucuccaacggcagcuaccugaacgagacccacuucuccgacgacaucgagcagcaggccgacaacaugaucacggagaugcuccagaaggaguacauggaccggcagggcaagaccccgcuggggcugguggaccucuucguguucagcaccuccuucuaccugaucagcaucuuccugcaccuggucaagaucccgacccaccgccacgugaucggcaagcccugccccaagccccaccggcucaaccacauggggaucugcuccugcggccuguacaagcacccgggggugcccgucaaguggaagcgcugaggacuagucccuguucccagagcccacuuuuuuuucuuuuuuugaaauaaaauagccugucuuucagaucucaaaggcucuuuucagagccaccaaaaaaaaaaaaaaaaaaaaaaaaaaaaaaaaaaaaaaaaaaaaaaaaaaaaaaaaaaaaaaaaagaauu

SEQ ID NO: 14362 - RNA, 1733 nt, Artificial Sequence
  mRNA product Design a-2 (hSL-A64-N5) comprising derived and/or modified sequence from LASV(LASV237-NIG-2010;Clade II)__AIT17638__GPC (opt1)
aggagaguccgcucagccagguugcagaagcggcuuagcguguguccuaaucuucucucugcguguagguaggccugugccgcaaacaagcuuaccaugggccagaucaucaccuucuuccaggaggugccccacgucaucgaggaggugaugaacaucgugcugaucgcccucagccugcuggccauccucaaggggaucuacaacgucgcgaccugcggccuguucgggcugguguccuuccuccugcugugcggccgcagcugcuccacgaccuacaaggggguguacgagcuccagacccuggagcuggacauggccagccucaacaugaccaugccgcuguccugcacgaagaacaacagccaccacuacaucauggucggcaacgagaccggccuggagcucacccugaccaacacguccaucaucaaccacaaguucugcaaccugagcgacgcccacaagaaggaccucuacgaccacgcccugauguccaucaucagcaccuuccaccuguccauccccaacuucaaccaguacgaggccaugagcugcgacuucaacgggggcaagaucuccgugcaguacaaccucagccacaccuacgcgguggacgccgccaaccacugcgggaccaucgccaacggcguccugcagacguucaugcggauggcguggggcggguccuacaucgcccuggacagcggcaagggguccugggacugcaucaugaccagcuaccaguaccucaucauccagaacaccaccugggaggaccacugccaguucucccgccccagccccaucggcuaccuggggcugcucagccagcggacgcgcgacaucuacaucucccggcgccugcugggcaccuucaccuggacccucagcgacuccgagggcaacgagacgcccgggggcuacugccugacccgguggaugcugaucgaggccgagcucaagugcuucgggaacaccgccguggccaagugcaacgagaagcacgacgaggaguucugcgacaugcugcgccuguucgacuucaacaagcaggcgauccggcgccucaagaccgaggcccagaugagcauccagcugaucaacaaggccgugaacgcccugaucaacgaccagcucaucaugaagaaccaccuccgggacaucaugggcauccccuacugcaacuacuccaaguacugguaccugaaccacacggucaccgggaagaccagccugccccgcugcuggcugguguccaacggcagcuaccugaacgagacccacuucuccgacgacaucgagcagcaggccgacaacaugaucacggagcuccugcagaaggaguacauggaccggcagggcaagaccccgcuggggcucguggaccuguucgucuucagcaccuccuucuaccugaucagcaucuuccugcaccucaucaagaucccgacccaccgccacaucacgggcaagcccugccccaagccccaccggcugaaccacauggggaucugcuccugcggccuguacaagcacccgggggugcccgugaaguggaagcgcugaggacuagucccuguucccagagcccacuuuuuuuucuuuuuuugaaauaaaauagccugucuuucagaucucaaaggcucuuuucagagccaccaaaaaaaaaaaaaaaaaaaaaaaaaaaaaaaaaaaaaaaaaaaaaaaaaaaaaaaaaaaaaaaaagaauu

SEQ ID NO: 14363 - RNA, 1733 nt, Artificial Sequence
  mRNA product Design a-2 (hSL-A64-N5) comprising derived and/or modified sequence from LASV(LASV253-NIG-2011;Clade II)__AIT17670__GPC (opt1)
aggagaguccgcucagccagguugcagaagcggcuuagcguguguccuaaucuucucucugcguguagguaggccugugccgcaaacaagcuuaccaugggccagaucaucaccuucuuccaggaggugccccacgucaucgaggaggugaugaacaucgugcugaucgcccucagccugcuggccauccucaaggggaucuacaacgucgcgaccugcggccuguucgggcugguguccuuccuccugcugugcggccgcagcugcuccacgaccuacaaggggguguacgagcuccagacccuggagcuggacauggccagccucaacaugaccaugccgcuguccugcacgaagaacaacagccaccacuacaucauggucggcaacgagaccggccuggagcucacccugaccaacacguccaucaucaaccacaaguucugcaaccugagcgacgcccacaagaagaaccucuacgaccacgcccugauguccaucaucagcaccuuccaccuguccauccccaacuucaaccaguacgaggccaugagcugcgacuucaacgggggcaagaucuccgugcaguacaaccucagccacaccuacgcgguggacgccgccaaccacugcgggaccaucgccaacggcguccugcagacguucaugcggauggcguggggcggguccuacaucgcccuggacagcggcaagggguccugggacugcaucaugaccagcuaccaguaccucaucauccagaacaccaccugggaggaccacugccaguucucccgccccagccccaucggcuaccuggggcugcucagccagcggacgcgcgacaucuacaucucccggcgccugcugggcaccuucaccuggacccucagcgacuccgagggcaacgagacgcccgggggcuacugccugacccgguggaugcugaucgaggccgagcucaagugcuucgggaacaccgccguggccaagugcaacgagaagcacgacgaggaguucugcgacaugcugcgccuguucgacuucaacaagcaggcgauccggcgccucaaggccgaggcccagaugagcauccagcugaucaacaaggccgugaacgcccugaucaacgaccagcucaucaugaagaaccaccuccgggacaucaugggcaucccguacugcaacuacuccaaguacugguaccugaaccacaccgucacggggcgcaccagccugccccggugcuggcugguguccaacggcagcuaccugaacgagacccacuucuccgacgacaucgagcagcaggcggacaacaugaucaccgagcuccugcagaaggaguacaucgaccgccagggcaagacgccccuggggcucguggaccuguucgucuucagcaccuccuucuaccugaucagcaucuuccugcaccucgugaagaucccgacccaccggcacaucaucggcaagcccugccccaagccccaccgccugaaccacauggggaucugcuccugcggccuguacaagcacccgggggugcccgucaaguggaagcggugaggacuagucccuguucccagagcccacuuuuuuuucuuuuuuugaaauaaaauagccugucuuucagaucucaaaggcucuuuucagagccaccaaaaaaaaaaaaaaaaaaaaaaaaaaaaaaaaaaaaaaaaaaaaaaaaaaaaaaaaaaaaaaaaagaauu

SEQ ID NO: 14364 - RNA, 1733 nt, Artificial Sequence
  mRNA product Design a-2 (hSL-A64-N5) comprising derived and/or modified sequence from LASV(LASV254-NIG-2011;Clade II)__AIT17674__GPC (opt1)
aggagaguccgcucagccagguugcagaagcggcuuagcguguguccuaaucuucucucugcguguagguaggccugugccgcaaacaagcuuaccaugggccagaucaucaccuucuuccaggaggugccccacgucaucgaggaggugaugaacaucgugcugaucgcccucagccugcuggccauccucaaggggaucuacaacgucgcgaccugcggccuguucgggcugguguccuuccuccugcugugcggccgcagcugcuccacgaccuacaaggggguguacgagcuccagacccuggagcuggacaugaccaaccucaacaugacgaugccgcugagcugcaccaagaacaacucccaccacuacaucauggucggcaacgagaccggccuggagcucacccugacgaacaccagcaucaucaaccacaaguucugcaaccuguccgacgcccacaagaagaaccucuacaaccacgcccugaugagcaucaucuccaccuuccaccugagcauccccaacuucaaccaguacgaggccauguccugcgacuucaacgggggcaagaucagcgugcaguacaaccucucccacagcuacgccguggacgcggccaaccacugcgggaccaucgccaacggcguccugcagacguucaugcggauggccuggggcggguccuacaucgcgcuggacagcggcaaggggaacugggacugcaucaugaccuccuaccaguaccucaucauccagaacaccaccugggaggaccacugccaguucagccgccccucccccaucggcuaccuggggcugcucagccagcggacgcgcgacaucuacaucagccggcgccugcugggcaccuucaccuggacccucuccgacagcgagggcaacgagacgcccgggggcuacugccugacccgguggaugcugaucgaggccgagcucaagugcuucgggaacaccgccguggccaagugcaacgagaagcacgacgaggaguucugcgacaugcugcgccuguucgacuucaacaagcaggccauccggcgccucaagaccgaggcgcaggccaacauccagcugaucaacaaggccgugaacgcccugaucaacgaccagcucaucaugaagaaccaccuccgggacaucaugggcauccccuacugcaacuacuccaaguacugguaccugaaccacacggucaccgggaagaccagccugccccgcugcuggcugguguccaacggcagcuaccugaacgagacccacuucuccgacgacaucgagcagcaggccgacaacaugaucacggagcuccugcagaaggaguacauggaccggcagggcaagaccccgcuggggcucguggaccuguucgucuucagcaccuccuucuaccugaucagcaucuuccugcaccucgugaagaucccgacccaccgccacgugaucggcaagcccugccccaagccccaccggcugaaccacauggggaucugcuccugcggccuguacaagcacccggggguccccgugaaguggaagcgcugaggacuagucccuguucccagagcccacuuuuuuuucuuuuuuugaaauaaaauagccugucuuucagaucucaaaggcucuuuucagagccaccaaaaaaaaaaaaaaaaaaaaaaaaaaaaaaaaaaaaaaaaaaaaaaaaaaaaaaaaaaaaaaaaagaauu

SEQ ID NO: 14365 - RNA, 1733 nt, Artificial Sequence
  mRNA product Design a-2 (hSL-A64-N5) comprising derived and/or modified sequence from LASV(Nig08-A19;Clade III)__ADU56618__GPC (opt1)
aggagaguccgcucagccagguugcagaagcggcuuagcguguguccuaaucuucucucugcguguagguaggccugugccgcaaacaagcuuaccaugggccagaucgugaccuucuuccaggaggucccccacgugaucgaggaggugaugaacaucguccugaucgcccucagcauccuggccauccugaaggggcucuacaacaucgcgaccugcggccugaucgggcuggugacguuccuccugcuguccggccgcagcugcuccaugaccuacaaggggguguacgagcuccagacccuggagcugaacaugaacacccucaacaugacgaugccgcugagcugcaccaagaacaacucccaccacuacaucauggucggcaacgagaccggccuggagcucacccugacgaacaccagccugcuccaccacaaguucugcaaccuguccgacgcccacaagaagaaccuguacgaccacacccucaugagcaucaucuccaccuuccaccugagcauccccaacuucaaccaguacgaggccauguccugcgacuucaacgggggcaagaucacggugcaguacaaccugagccacuccuacgccaucgacgccgcgaaccacugcgggaccguggccaacggcguccuccagaccuucaugcggauggccuggggcgggagcuacaucgcccuggacuccggccgcgggaagugggacugcaucaugaccagcuaccaguaccugaucauccagaacacgaccugggaggaccacugccaguucucccggcccagccccaucggcuaccucgggcugcugucccagcgcacccgggacaucuacaucagccgccggcuccugggcaccuucacguggacccugagcgacuccgagggcaacgagacccccgggggcuacugccucacccgcuggaugcugaucgaggcggagcugaagugcuucgggaacacggccguggccaagugcaacgagaagcacgacgaggaguucugcgacaugcuccggcuguucgacuucaacaagcaggccauccgccggcugaaggccgaggcgcagaugagcauccagcucaucaacaaggccgugaacgcccugaucaacgaccagcugaucaugaagaaccaccuccgcgacaucaugggcauccccuacugcaacuacuccaaguacugguaccugaaccacaccagcaccgggcggaccucccugccccgcugcuggcucgucagcaacggcuccuaccugaacgagacgcacuucagcgacgacaucgagcagcaggccgacaacaugaucaccgagaugcugcagaaggaguaccucgaccggcagggcaagaccccgcuggggcugguggaccuguucguguucuccaccagcuucuaccucaucuccaucuuccugcaccuggucaagaucccgacgcaccgccacaucgugggcaagcccugccccaagccccaccggcucaaccacauggggaucugcagcugcggccuguacaagcagccgggggugcccguccgcuggaagcggugaggacuagucccuguucccagagcccacuuuuuuuucuuuuuuugaaauaaaauagccugucuuucagaucucaaaggcucuuuucagagccaccaaaaaaaaaaaaaaaaaaaaaaaaaaaaaaaaaaaaaaaaaaaaaaaaaaaaaaaaaaaaaaaaagaauu

SEQ ID NO: 14366 - RNA, 1736 nt, Artificial Sequence
  mRNA product Design a-2 (hSL-A64-N5) comprising derived and/or modified sequence from LASV(G1180-SLE-2010;Clade IV)__AIT17168__GPC (opt1)
aggagaguccgcucagccagguugcagaagcggcuuagcguguguccuaaucuucucucugcguguagguaggccugugccgcaaacaagcuuaccaugggccagaucgugaccuucuuccaggaggucccccacgugaucgaggaggugaugaacaucguccugaucgcccucagcauccuggccgugcugaaggggcucuacaacuucgcgaccugcggccugguggggcugcucaccuuccugcugcucugcggccgcuccugcaccgccagccgguacaagggggucuacgagcugcagacccuggagcucaacauggagacccugaacaugacgaugccgcuguccugcaccaagaacaacagccaccacuacaucauggugggcaacgagaccggccucgagcugacccugacgaacaccuccaucaucaaccacaaguucugcaaccucagcgacgcccacaagaagaaccuguacgaccacgcccugauguccaucaucagcaccuuccaccucuccauccccaacuucaaccaguacgaggccaugagcugcgacuucaacgggggcaagaucuccgugcaguacaaccugagccacuccuacgcgggggacgccgccaaccacugcggcaccgucgccaacggggugcugcagacguucaugcgcauggcguggggcggcagcuacaucgcccucgacuccgggcacggcagcugggacugcaucaugaccuccuaccaguaccugaucauccagaacaccaccugggaggaccacugccaguucagccggcccucccccaucggguaccugggccuccugagccagcgcacgcgggacaucuacaucagccgccggcugcucggcaccuucaccuggacccuguccgacagcgaggggaaggacacgccgggcggguacugccugacccgcuggaugcucaucgaggccgagcugaagugcuucggcaacaccgccguggccaagugcaacgagaagcacgacgaggaguucugcgacaugcugcggcuguucgacuucaacaagcaggcgauccagcgccugaaggccgaggcccagauguccauccagcugaucaacaaggccgucaacgcccucaucaacgaccagcugaucaugaagaaccaccuccgggacaucauggggauccccuacugcaacuacagcaaguacugguaccucaaccacaccacgaccggcaagaccucccugcccaagugcuggcuggugagcaacggcuccuaccucaacgagacccacuucagcgacgacaucgagcagcaggcggacaacaugaucacggagaugcugcagaaggaguacauggagcgccaggggaagacgccccugggccucguggaccuguucgucuucuccaccagcuucuaccugaucuccaucuuccugcaccucgugaagaucccgacccaccggcacaucgugggcaagagcugccccaagccccaccgccugaaccacauggggaucugcuccugcgggcuguacaagcagcccggcgucccggugaaguggaagcggugaggacuagucccuguucccagagcccacuuuuuuuucuuuuuuugaaauaaaauagccugucuuucagaucucaaaggcucuuuucagagccaccaaaaaaaaaaaaaaaaaaaaaaaaaaaaaaaaaaaaaaaaaaaaaaaaaaaaaaaaaaaaaaaaagaauu

SEQ ID NO: 14367 - RNA, 1736 nt, Artificial Sequence
  mRNA product Design a-2 (hSL-A64-N5) comprising derived and/or modified sequence from LASV(G1442-SLE-2011;Clade IV)__AIT17180__GPC (opt1)
aggagaguccgcucagccagguugcagaagcggcuuagcguguguccuaaucuucucucugcguguagguaggccugugccgcaaacaagcuuaccaugggccagaucgugaccuucuuccaggaggucccccacgugaucgaggaggugaugaacaucguccugaucgcccucagcauccuggccgugcugaaggggcucuacaacguggcgaccugcggccugaucgggcuggucacguuccuccugcugugcggccgcuccugcaccaccacccucuacaaggggguguacgagcugcagacgcuggagcucaacauggagacccugaacaugaccaugccgcugagcugcaccaagaacaacucccaccacuacauccgggugggcaacgagacgggccucgagcugacccugaccaacaccagcaucaucaaccacaaguucugcaaccucuccgacgcccacaagaagaaccuguacgaccacgcccugaugagcaucaucuccacguuccaccucagcauccccaacuucaaccaguacgaggccauguccugcgacuucaacgggggcaagaucagcguccaguacaaccugucccacagcuacgccggggacgcggccaaccacugcggcaccguggccaacggggugcugcagaccuucaugcgcauggccuggggcggcuccuacaucgcgcucgacagcgggcggggcaacugggacugcaucaugaccuccuaccaguaccugaucauccagaacacgaccugggacgaccacugccaguucagccgccccucccccaucggguaccugggccuccugagccagcggacccgcgacgucuacaucucccggcgccugcucggcaccuucacguggacccugagcgacagcgaggggaaggacaccccgggcggguacugccugacccgguggaugcucaucgaggccgagcugaagugcuucggcaacacggccguggccaagugcaacgagaagcacgacgaggaguucugcgacaugcugcgccucuucgacuucaacaagcaggccauccagcggcugaaggcggaggcccagauguccauccagcugaucaacaaggccgugaacgcccucaucaacgaccagcugaucaugaagaaccaccuccgcgacaucauggggauccccuacugcaacuacagcaaguacugguaccugaacaacaccgccaccggcaagaccucccugcccaagugcuggcugaucagcaacggcuccuaccucaacgagacgcacuucagcgacgacaucgagcaggaggcggacaacaugaucaccgagaugcugcagaaggaguacauggagcggcaggggaagacgccccugggccucgucgaccuguucguguucuccaccagcuucuaccugaucuccaucuuccugcaccucgugaagaucccgacccaccgccacaucgucggcaagagcugccccaagccccaccggcugaaccacauggggaucugcuccugcgggcuguacaagcagcccggcgugccggugcgcuggaagcggugaggacuagucccuguucccagagcccacuuuuuuuucuuuuuuugaaauaaaauagccugucuuucagaucucaaaggcucuuuucagagccaccaaaaaaaaaaaaaaaaaaaaaaaaaaaaaaaaaaaaaaaaaaaaaaaaaaaaaaaaaaaaaaaaagaauu

SEQ ID NO: 14368 - RNA, 1736 nt, Artificial Sequence
  mRNA product Design a-2 (hSL-A64-N5) comprising derived and/or modified sequence from LASV(G3010-SLE-2013;Clade IV)__AIT17344__GPC (opt1)
aggagaguccgcucagccagguugcagaagcggcuuagcguguguccuaaucuucucucugcguguagguaggccugugccgcaaacaagcuuaccaugggccagaucgugaccuucuuccaggaggucccccacgugaucgaggaggugaugaacaucguccugaucgcccucagcauccuggccgugcugaaggggcucuacaacuucgcgaccugcggccugguggggcuggucacguuccuccugcugugcggccgcuccugcaccaccagccucuacaaggggguguacgagcugcagacccuggagcucaacauggagacgcugaacaugaccaugccgcuguccugcaccaagaacaacagccaccacuacaucauggugggcaacgagaccggccucgagcugacgcugaccaacaccuccaucaucaaccacaaguucugcaaccucagcgacgcccacaagaagaaccuguacaaccacgcccugauguccaucaucagcaccuuccaccucuccauccccaacuucaaccaguacgaggccaugagcugcgacuucaacgggggcaagaucuccguccaguacaaccugagccacuccuacgccggggacgcggccagccacugcggcacgguggccaacggggugcugcagaccuucaugcggauggccuggggcggcuccuacaucgcgcucgacagcggguacggcaagugggacugcaucaugaccuccuaccaguaccugaucauccagaacaccacgugggaggaccacugccaguucagccgccccucccccaucggguaccugggccuccugagccagcggacccgcgacaucuacaucagccggcgccugcucggcaccuucaccuggacgcuguccgacagcgaggggaaggacaccccgggcggguacugccugacccgguggaugcucaucgaggccgagcugaagugcuucggcaacaccgccgucgccaagugcaacgagaagcacgacgaggaguucugcgacaugcugcgccucuucgacuucaacaagcaggccauccagcggcugaagacggaggcgcagauguccauccagcugaucaacaaggccgugaacgcccucaucaacgaccagcugaucaugaagaaccaccuccgcgacaucauggggauccccuacugcaacuacagcaaguacugguaccugaaccacaccaccaccggcaagacgucccugcccaagugcuggcuggugagcaacggcuccuaccucaacgagacccacuucagcgacgacaucgagcagcaggccgacaacaugaucaccgagaugcugcagaaggaguacauggagcggcaggggaagacgccccugggccucgucgaccuguucguguucuccaccagcuucuaccugaucuccaucuuccugcaccucgugaagaucccgacccaccgccacaucgucggcaagagcugccccaagccccaccggcugaaccacauggggaucugcuccugcgggcuguacaagcagcccggcgugccggugcgcuggaagcggugaggacuagucccuguucccagagcccacuuuuuuuucuuuuuuugaaauaaaauagccugucuuucagaucucaaaggcucuuuucagagccaccaaaaaaaaaaaaaaaaaaaaaaaaaaaaaaaaaaaaaaaaaaaaaaaaaaaaaaaaaaaaaaaaagaauu

SEQ ID NO: 14369 - RNA, 1736 nt, Artificial Sequence
  mRNA product Design a-2 (hSL-A64-N5) comprising derived and/or modified sequence from LASV(G502-SLE-2009;Clade IV)__AIT17126__GPC (opt1)
aggagaguccgcucagccagguugcagaagcggcuuagcguguguccuaaucuucucucugcguguagguaggccugugccgcaaacaagcuuaccaugggccagaucgugaccuucuuccaggaggucccccacgugaucgaggaggugaugaacaucguccugaucgcccucagcauccuggccgugcugaaggggcucuacaacuucgcgaccugcggccugguggggcugcucacguuccugcugcucugcggccgcuccugcaccaccgggcuguacaagggcgucuacgagcugcagacccucgagcugaacauggagacgcugaacaugaccaugccgcucagcugcaccaagaacaacucccaccacuacaucauggugggcaacgagaccgggcuggagcugacgcucaccaacaccagcaucaucaaccacaaguucugcaaccuguccgacgcccacaagaagaaccuguacgaccacgcccucaugagcaucaucuccaccuuccaccugagcauccccaacuucaaccaguacgaggccauguccugcgacuucaacggcgggaagaucagcgugcaguacaaccugucccacagcuacgccggcgacgcggccgaccacugcgggacggucgccaacggcgugcuccagaccuucaugcggauggccuggggcggguccuacaucgcgcuggacagcggccgcgggcggugggacugcaucaugaccuccuaccaguaccugaucauccagaacaccacgugggaggaccacugccaguucagccgccccucccccaucggcuaccucggccugcugagccagcggacccgcgacaucuacaucucccggcgccuccuggggaccuucaccuggacgcugagcgacagcgagggcaaggacacccccgggggcuacugccucacccgguggaugcugaucgaggccgagcugaagugcuucgggaacaccgccguggccaagugcaacgagaagcacgacgaggaguucugcgacaugcuccgccuguucgacuucaacaagcaggccauccagcggcugaaggcggaggcccagauguccauccagcucaucaacaaggccgucaacgcccugaucaacgaccagcuggugaugaagaaccaccuccgcgacaucaugggcauccccuacugcaacuacagccgguacugguaccugaaccacacgaccaccggccgcaccucccugcccaagugcuggcucgugagcaacggguccuaccugaacgagacgcacuucagcgacgacaucgagcagcaggccgacaacaugaucaccgagaugcugcagaaggaguacauggagcggcagggcaagaccccgcucgggcuggucgaccuguucguguucuccaccagcuucuaccugaucuccaucuuccuccaccuggugaagaucccgacgcaccgccacaucgucggcaagagcugccccaagccccaccggcugaaccacauggggaucugcuccugcggccucuacaagcagcccggcgugccggugaaguggaagcgcugaggacuagucccuguucccagagcccacuuuuuuuucuuuuuuugaaauaaaauagccugucuuucagaucucaaaggcucuuuucagagccaccaaaaaaaaaaaaaaaaaaaaaaaaaaaaaaaaaaaaaaaaaaaaaaaaaaaaaaaaaaaaaaaaagaauu

SEQ ID NO: 14370 - RNA, 1736 nt, Artificial Sequence
  mRNA product Design a-2 (hSL-A64-N5) comprising derived and/or modified sequence from LASV(G733-SLE-2010;Clade IV)__AIT17154__GPC (opt1)
aggagaguccgcucagccagguugcagaagcggcuuagcguguguccuaaucuucucucugcguguagguaggccugugccgcaaacaagcuuaccaugggccagaucgugaccuucuuccaggaggucccccacgugaucgaggaggugaugaacaucguccugaucgcccucagcauccuggccgugcugaaggggcucuacaacuucgcgaccugcggcaucguggggcuggucuccuuccugcuccugugcggccgcagcugcacgaccucccuguacaaggggguguacgagcuccagacccuggagcugaacauggagacccucaacaugacgaugccgcugagcugcaccaagaacaacucccaccacuacaucauggugggcaacgagaccggccuggagcucacccugacgaacaccagcaucaucaaccacaaguucugcaaccuguccgacgcccacaagaagaaccucuacgaccacgcccugaugagcaucaucuccaccuuccaccugagcauccccaacuucaaccaguacgaggccauguccugcgacuucaacgggggcaagaucagcguccaguacaaccucucccacagcuacgccggggacgcggccaaccacugcggcaccaucgccaacggggugcugcagacguucaugcggauggccuggggcggcuccuacaucgcgcuggacagcgggcgcgaccggugggacugcaucaugaccuccuaccaguaccucaucauccagaacaccaccugggaggaccacugccaguucagccgccccucccccaucggcuaccuggggcugcucagccagcggacgcgcgacaucuacaucagccggcgccugcugggcaccuucaccuggacccucuccgacagcgagggcaaggacacgcccgggggcuacugccugacccgguggaugcugaucgaggccgagcucaagugcuucgggaacaccgccguggccaagugcaacgagaagcacgacgaggaguucugcgacaugcugcgccuguucgacuucaacaagcaggccauccagcggcucaaggcggaggcccagauguccauccagcugaucaacaaggccgucaacgcccugaucaacgaccagcucaucaugaagaaccaccuccgcgacaucaugggcauccccuacugcaacuacagcaaguacugguaccugaaccacaccacgaccgggaagaccucccugcccaagugcuggcuggugagcaacggcuccuaccugaacgagacccacuucagcgacgacaucgagcagcaggccgacaacaugaucacggagaugcuccagaaggaguacauggagcggcagggcaagaccccgcuggggcugguggaccucuucgucuucuccaccagcuucuaccugaucuccaucuuccugcaccuggugaagaucccgacccaccgccacguggucggcaagagcugccccaagccccaccggcucaaccacauggggaucugcuccugcggccuguacgggcagcccggcgugccggugaaguggaagcgcugaggacuagucccuguucccagagcccacuuuuuuuucuuuuuuugaaauaaaauagccugucuuucagaucucaaaggcucuuuucagagccaccaaaaaaaaaaaaaaaaaaaaaaaaaaaaaaaaaaaaaaaaaaaaaaaaaaaaaaaaaaaaaaaaagaauu

SEQ ID NO: 14371 - RNA, 1736 nt, Artificial Sequence
  mRNA product Design a-2 (hSL-A64-N5) comprising derived and/or modified sequence from MOPV/LASV reassortant(IGS-1;Clade IV)__AFY05576__GPC (opt1)
aggagaguccgcucagccagguugcagaagcggcuuagcguguguccuaaucuucucucugcguguagguaggccugugccgcaaacaagcuuaccaugggccagaucgugaccuucuuccaggaggucccccacgugaucgaggaggugaugaacaucguccugaucgcccucagcgugcuggccgugcugaaggggcucuacaacuucgcgaccugcggccuggucgggcuggugacguuccuccugcugugcggccgcuccugcaccaccagccucuacaaggggguguacgagcugcagacccuggagcucaacauggagacgcugaacaugaccaugccgcuguccugcaccaagaacaacagccaccacuacaucauggucggcaacgagaccggccucgagcugacgcugaccaacaccuccaucaucaaccacaaguucugcaaccucagcgacgcccacaagaagaaccuguacgaccacgcccugauguccaucaucagcaccuuccaccucuccauccccaacuucaaccaguacgaggccaugagcugcgacuucaacgggggcaagaucuccgugcaguacaaccugagccacuccuacgccggggacgcggccaaccacugcggcacgguggccaacgggguccugcagaccuucaugcggauggccuggggcggcagcuacaucgcgcucgacuccgggcgcggcaacugggacugcaucaugaccagcuaccaguaccugaucauccagaacaccacgugggaggaccacugccaguucucccggcccagccccaucggguaccugggccuccugucccagcgcacccgggacaucuacaucagccgccggcugcucggcaccuucaccuggacgcugagcgacuccgagggggaggacaccccgggcggguacugccugacccgcuggaugcucaucgaggccgagcugaagugcuucggcaacaccgccguggccaagugcaacgagaagcacgacgaggaguucugcgacaugcugcggcuguucgacuucaacaagcaggccauccagcgccugaaggcggaggcccagaugagcauccagcugaucaacaaggccgugaacgcccucaucaacgaccagcugaucaugaagaaccaccuccgggacaucauggggauccccuacugcaacuacuccaaguacugguaccucaaccacacgaccaccggccgcaccagccugcccaagugcuggcuggucuccaacggcagcuaccucaacgagacgcacuucuccgacgacaucgagcagcaggccgacaacaugaucaccgagaugcugcagaaggaguacauggagcggcaggggaagacgccccugggccucguggaccuguucguguucagcaccuccuucuaccugaucagcaucuuccugcaccucgucaagaucccgacccaccgccacaucguggggaaguccugccccaagccccaccggcugaaccacaugggcaucugcagcugcgggcuguacaagcagcccggcgugccggucaaguggaagcgcugaggacuagucccuguucccagagcccacuuuuuuuucuuuuuuugaaauaaaauagccugucuuucagaucucaaaggcucuuuucagagccaccaaaaaaaaaaaaaaaaaaaaaaaaaaaaaaaaaaaaaaaaaaaaaaaaaaaaaaaaaaaaaaaaagaauu

SEQ ID NO: 14372 - RNA, 1736 nt, Artificial Sequence
  mRNA product Design a-2 (hSL-A64-N5) comprising derived and/or modified sequence from LASV(LM765-SLE-2012;Clade IV)__AIT17814__GPC (opt1)
aggagaguccgcucagccagguugcagaagcggcuuagcguguguccuaaucuucucucugcguguagguaggccugugccgcaaacaagcuuaccaugggccagaucgugaccuucuuccaggaggucccccacgugaucgaggaggugaugaacaucguccugaucgcccucagcauccuggccgugcugaaggggcucuacaacuucgcgaccugcggccugguggggcuggucacguuccuccugcugugcggccgcuccugcaccaccagccucuacaaggggguguacgagcugcagacccuggagcucaacauggagacgcugaacaugaccaugccgcuguccugcaccaagaacaacagccaccacuacaucauggugggcaacgagaccggccucgagcugacgcugaccaacaccuccaucaucgaccacaaguucugcaaccucagcgacgcccaccggaagaaccuguacgaccacgcccugauguccaucaucagcaccuuccaccucuccauccccaacuucaaccaguacgaggccaugagcugcgacuucaacgggggcaagaucuccguccaguacaaccugagccacuccuacgccaaggacgcggccgaccacugcgggacgguggccaacggcgugcugcagaccuucaugcgcauggccuggggcgggagcuacaucgcgcucgacuccggccgggggcgcugggacugcaucaugaccagcuaccaguaccugaucauccagaacaccacgugggaggaccacugccaguucucccggcccagccccaucggcuaccuggggcuccugucccagcgcacccgggacaucuacaucagccgccggcugcucggcaccuucaccuggacgcugagcgacuccgagggcaaggacacccccgggggcuacugccugacccgcuggaugcucaucgaggccgagcugaagugcuucgggaacaccgccgucgccaagugcaacgagaagcacgacgaggaguucugcgacaugcugcggcuguucgacuucaacaagcaggccauccagcgccugaaggcggaggcccagaugagcauccagcugaucaacaaggccgugaacgcccucaucaacgaccagcugaucaugaagaaccaccuccgggacaucaugggcauccccuacugcaacuacuccaaguacugguaccucaaccacacgaccaccgggaagaccagccugcccaagugcuggcugguguccaacggcagcuaccucaacgagacgcacuucuccgacgacaucgagcagcaggccgacaacaugaucaccgagaugcugcagaaggaguacauggagcgccagggcaagaccccgcuggggcucgucgaccuguucguguucagcaccuccuucuaccugaucagcaucuuccugcaccucgugaagaucccgacgcaccggcacaucgucggcaagcccugccccaagccccaccgccugaaccacauggggaucugcuccugcggccuguacaagcagccgggggugcccgugaaguggaagcggugaggacuagucccuguucccagagcccacuuuuuuuucuuuuuuugaaauaaaauagccugucuuucagaucucaaaggcucuuuucagagccaccaaaaaaaaaaaaaaaaaaaaaaaaaaaaaaaaaaaaaaaaaaaaaaaaaaaaaaaaaaaaaaaaagaauu

SEQ ID NO: 14373 - RNA, 1736 nt, Artificial Sequence
  mRNA product Design a-2 (hSL-A64-N5) comprising derived and/or modified sequence from LASV(LM776-SLE-2012;Clade IV)__AIT17824__GPC (opt1)
aggagaguccgcucagccagguugcagaagcggcuuagcguguguccuaaucuucucucugcguguagguaggccugugccgcaaacaagcuuaccaugggccagaucgugaccuucuuccaggaggucccccacgugaucgaggaggugaugaacaucguccugaucgcccucagcauccuggccgugcugaaggggcucuacaacuucgcgaccugcggccugguggggcuggucacguuccuccugcugugcggccgcuccugcaccaccagcguguacaaggggguguacgagcuccagacccuggagcugaacauggagacgcucaacaugaccaugccgcuguccugcaccaagaacaacagccaccacuacaucauggucggcaacgagaccggccuggagcucacgcugaccaacaccuccaucaucaaccacaaguucugcaaccugagcgacgcccacaagaagaaccucuacgaccacgcccugauguccaucaucagcaccuuccaccuguccauccccaacuucaaccaguacgaggccaugagcugcgacuucaacgggggcaagaucuccgugcaguacaaccucagccacuccuacgccggggacgcggccaaccacugcggcacgguggccaacgggguccugcagaccuucaugcggauggccuggggcggcagcuacaucgcgcuggacuccgggcacggcaagugggacugcaucaugaccagcuaccaguaccucaucauccagaacaccacgugggaggaccacugccaguucucccgccccagccccaucggguaccugggccugcucucccagcggacccgcgacaucuacaucagccggcgccugcugggcaccuucaccuggacgcucagcgacuccgaggggaaggacaccccgggcggguacugccugacccgguggaugcugaucgaggccgagcucaagugcuucggcaacaccgccguggccaagugcaacgagaagcacgacgaggaguucugcgacaugcugcgccuguucgacuucaacaagcaggccauccagcggcucaaggcggaggcccagaugagcauccagcugaucaacaaggccgugaacgcccugaucaacgaccagcucaucaugaagaaccaccuccgcgacaucauggggauccccuacugcaacuacuccaaguacugguaccugaaccacacgaccaccggcaagaccagccugcccaagugcuggcuggucuccaacggcagcuaccugaacgagacgcacuucuccgacgacaucgagcagcaggccgacaacaugaucaccgagaugcuccagaaggaguacauggagcggcaggggaagacgccccugggccugguggaccucuucguguucagcaccuccuucuaccugaucagcaucuuccugcaccuggucaagaucccgacccaccgccacaucguggggaaguccugccccaagccccaccggcucaaccacaugggcaucugcagcugcgggcuguacaagcagcccggcgugccgguccgcuggaagcggugaggacuagucccuguucccagagcccacuuuuuuuucuuuuuuugaaauaaaauagccugucuuucagaucucaaaggcucuuuucagagccaccaaaaaaaaaaaaaaaaaaaaaaaaaaaaaaaaaaaaaaaaaaaaaaaaaaaaaaaaaaaaaaaaagaauu

SEQ ID NO: 14374 - RNA, 1736 nt, Artificial Sequence
  mRNA product Design a-2 (hSL-A64-N5) comprising derived and/or modified sequence from LASV(Mad39;Clade IV)__ANH09722__GPC (opt1)
aggagaguccgcucagccagguugcagaagcggcuuagcguguguccuaaucuucucucugcguguagguaggccugugccgcaaacaagcuuaccaugggccagaucgugaccuucuuccaggaggucccccacgugaucgaggaggugaugaacaucguccugaucgcccucagcauccuggccgugcugaaggggcucuacaacguggcgaccugcggccugaucgggcuggucacguuccuccugcugugcggccgcuccugcaccaccacccucuacaaggggguguacgagcugcaggcccuggagcucaacauggagacgcugaacaugaccaugccgcugagcugcaccaagaacaacucccaccacuacauccgggugggcaacgagaccggccucgagcugacgcugaccaacaccagccucaucaaccacaaguucugcaaccuguccgacgcccacaagaagaaccuguacgaccacgcccucaugagcaucaucuccaccuuccaccugagcauccccaacuucaaccaguacgaggccauguccugcgacuucaacgacgggaagaucagcguccaguacaaccugucccacacguacgcgggcgacaccgccaaccacugcgggaccguggccaacggcgugcuccagaccuucaugcgcauggccuggggcgggagcuacaucgcgcuggacuccggccgcgggggcugggacugcaucaugacgagcuaccaguaccugaucauccagaacaccaccugggaggaccacugccaguucucccggcccagccccaucggguaccucggccugcugucccagcggacccgcgacaucuacaucagccggcgccuccugggcacguucaccuggacccuguccgacagcgaggggaaggacaccccgggcggguacugccucacgcgguggaugcugaucgaggccgagcugaagugcuucggcaacaccgccgucgccaagugcaacgagaagcacgacgaggaguucugcgacaugcuccgccuguucgacuucaacaagcaggccauccagcggcugaaggcggaggcccagaugagcauccagcucaucaacaaggccgugaacgcccugaucaacgaccagcugaucaugaagaaccaccuccgcgacaucauggggauccccuacugcaacuacuccaaguacugguaccugaaccacaccgugaccggcaagacgagccugcccaagugcuggcucgucuccaacggcagcuaccugaacgagacccacuucuccgacgacaucgagcagcaggccgacaacaugaucaccgagaugcugcagaaggaguacauggagcggcaggggaagacgccccucggccugguggaccuguucguguucagcaccuccuucuaccugaucagcaucuuccuccaccuggucaagaucccgacccaccgccacgugguggggaagcccugccccaagccccaccggcugaaccacaugggcaucugcuccugcggguucuacaagcagccgggcguccccgugcgcuggaagcggugaggacuagucccuguucccagagcccacuuuuuuuucuuuuuuugaaauaaaauagccugucuuucagaucucaaaggcucuuuucagagccaccaaaaaaaaaaaaaaaaaaaaaaaaaaaaaaaaaaaaaaaaaaaaaaaaaaaaaaaaaaaaaaaaagaauu

SEQ ID NO: 14375 - RNA, 1736 nt, Artificial Sequence
  mRNA product Design a-2 (hSL-A64-N5) comprising derived and/or modified sequence from LASV(Z0947-SLE-2011;Clade IV)__AIT17840__GPC (opt1)
aggagaguccgcucagccagguugcagaagcggcuuagcguguguccuaaucuucucucugcguguagguaggccugugccgcaaacaagcuuaccaugggccagaucgugaccuucuuccaggaggucccccacgugaucgaggaggugaugaacaucguccugaucgcccucagcauccuggccgugcugaaggggcucuacaacuucgcgaccugcggccugguggggcuggucacguuccuccugcugugcggccgcuccugcaccaucagccucuacaaggggguguacgagcugcagacccuggagcucaacauggagacccugaacaugacgaugccgcuguccugcaccaagaacaacagccaccacuacaucauggugggcaacgagaccggccucgagcugacccugacgaacaccuccaucaucaaccacaaguucugcaaccucagcgacgcccacaagaagaaccuguacgaccacgcccugauguccaucaucagcaccuuccaccucuccauccccaacuucaaccaguacgaggccaugagcugcgacuucaacgggggcaagaucuccguccaguacaaccugagccacuccuacgccggggacgcggccaaccacugcggcaccguggccaacggggugcugcagacguucaugcggauggccuggggcggcagcuacaucgcgcucgacuccgggcgcgaccggugggacugcaucaugaccagcuaccaguaccugaucauccagaacaccaccugggaggaccacugccaguucucccgccccagccccaucggcuaccuggggcuccugucccagcggacgcgcgacaucuacaucagccggcgccugcucggcaccuucaccuggacccugagcgacuccgagggcaaggacacgcccgggggcuacugccugacccgguggaugcucaucgaggccgagcugaagugcuucgggaacaccgccgucgccaagugcaacgagaagcacgacgaggaguucugcgacaugcugcgccucuucgacuucaacaagcaggccauccagcggcugaaggcggaggcccagaugagcauccagcugaucaacaaggccgugaacgcccucaucaacgaccagcugaucaugaagaaccaccuccgcgacaucaugggcauccccuacugcaacuacuccaaguacugguaccugaaccacaccacgaccgggaagaccagccugcccaagugcuggcugguguccaacggcagcuaccucaacgagacccacuucuccgacgacaucgagcagcaggccgacaacaugaucacggagaugcugcagaaggaguacauggagcggcagggcaagaccccgcuggggcucgucgaccuguucguguucagcaccuccuucuaccugaucagcaucuuccugcaccucgugaagaucccgacccaccgccacaucgucggcaagcccugccccaagccccaccggcugaaccacauggggaucugcuccugcggccuguacaagcagccgggggugcccgugaaguggaagcgcugaggacuagucccuguucccagagcccacuuuuuuuucuuuuuuugaaauaaaauagccugucuuucagaucucaaaggcucuuuucagagccaccaaaaaaaaaaaaaaaaaaaaaaaaaaaaaaaaaaaaaaaaaaaaaaaaaaaaaaaaaaaaaaaaagaauu

SEQ ID NO: 14376 - RNA, 1736 nt, Artificial Sequence
  mRNA product Design a-2 (hSL-A64-N5) comprising derived and/or modified sequence from LASV(Josiah;Clade IV)__NP_694870__GPC (opt4)
aggagaguccgcucagccagguugcagaagcggcuuagcguguguccuaaucuucucucugcguguagguaggccugugccgcaaacaagcuuaccaugggccagaucgugaccuucuuccaggaggugccccacgugaucgaggaggugaugaacaucgugcugaucgcccugagcgugcuggccgugcugaagggccuguacaacuucgccaccugcggccuggugggccuggugaccuuccugcugcugugcggcagaagcugcaccaccagccuguacaagggcguguacgagcugcagacccuggagcugaacauggagacccugaacaugaccaugccccugagcugcaccaagaacaacagccaccacuacaucauggugggcaacgagaccggccuggagcugacccugaccaacaccagcaucaucaaccacaaguucugcaaccugagcgacgcccacaagaagaaccuguacgaccacgcccugaugagcaucaucagcaccuuccaccugagcauccccaacuucaaccaguacgaggccaugagcugcgacuucaacggcggcaagaucagcgugcaguacaaccugagccacagcuacgccggcgacgccgccaaccacugcggcaccguggccaacggcgugcugcagaccuucaugagaauggccuggggcggcagcuacaucgcccuggacagcggcagaggcaacugggacugcaucaugaccagcuaccaguaccugaucauccagaacaccaccugggaggaccacugccaguucagcagacccagccccaucggcuaccugggccugcugagccagagaaccagagacaucuacaucagcagaagacugcugggcaccuucaccuggacccugagcgacagcgagggcaaggacacccccggcggcuacugccugaccagauggaugcugaucgaggccgagcugaagugcuucggcaacaccgccguggccaagugcaacgagaagcacgacgaggaguucugcgacaugcugagacuguucgacuucaacaagcaggccauccagagacugaaggccgaggcccagaugagcauccagcugaucaacaaggccgugaacgcccugaucaacgaccagcugaucaugaagaaccaccugagagacaucaugggcauccccuacugcaacuacagcaaguacugguaccugaaccacaccaccaccggcagaaccagccugcccaagugcuggcuggugagcaacggcagcuaccugaacgagacccacuucagcgacgacaucgagcagcaggccgacaacaugaucaccgagaugcugcagaaggaguacauggagagacagggcaagaccccccugggccugguggaccuguucguguucagcaccagcuucuaccugaucagcaucuuccugcaccuggugaagauccccacccacagacacaucgugggcaagagcugccccaagccccacagacugaaccacaugggcaucugcagcugcggccuguacaagcagcccggcgugcccgugaaguggaagagaugaggacuagucccuguucccagagcccacuuuuuuuucuuuuuuugaaauaaaauagccugucuuucagaucucaaaggcucuuuucagagccaccaaaaaaaaaaaaaaaaaaaaaaaaaaaaaaaaaaaaaaaaaaaaaaaaaaaaaaaaaaaaaaaaagaauu

SEQ ID NO: 14377 - RNA, 1733 nt, Artificial Sequence
  mRNA product Design a-2 (hSL-A64-N5) comprising derived and/or modified sequence from LASV(LP;Clade I)__AAF86701__GPC (opt4)
aggagaguccgcucagccagguugcagaagcggcuuagcguguguccuaaucuucucucugcguguagguaggccugugccgcaaacaagcuuaccaugggccagaucaucaccuucuuccaggaggugccccacgugaucgaggaggugaugaacaucgugcugaucgcccugagccugcuggccauccugaagggccuguacaacaucgccaccugcggcaucaucggccugguggccuuccuguuccugugcggcaagagcugcagccugacccugaagggcggcuacgagcugcagacccuggagcugaacauggagacccugaacaugaccaugccccugagcugcaccaagaacagcagccaccacuacaucagagugggcaacgagaccggccuggagcugacccugaccaacaccagcaucaucaaccacaaguucugcaaccugagcgacgcccacaagaagaaccuguacgaccacgcccugaugagcaucaucagcaccuuccaccugagcauccccaacuucaaccaguacgaggccaugagcugcgacuucaacggcggcaagaucagcgugcaguacaaccugagccacagcuacgccggcgacgccgccgagcacugcggcaccguggccaacggcgugcugcagaccuucaugagaauggccuggggcggcagauacaucgcccuggacagcggcaagggcaacugggacugcaucaugaccagcuaccaguaccugaucauccagaacaccaccugggaggaccacugccaguucagcagacccagccccaucggcuaccugggccugcugagccagagaaccagagacaucuacaucagcagaagacugcugggcaccuucaccuggacccugagcgacagcgagggcaacgagacccccggcggcuacugccugaccagauggaugcugaucgaggccgagcugaagugcuucggcaacaccgccguggccaagugcaacgagaagcacgacgaggaguucugcgacaugcugagacuguucgacuucaacaagcaggccaucagaagacugaaggccgaggcccagaugagcauccagcugaucaacaaggccgugaacgcccugaucaacgaccagcugaucaugaagaaccaccugagagacaucaugggcauccccuacugcaacuacagcaaguacugguaccugaaccacaccagcagcggcagaaccagccugcccaagugcuggcugaucagcaacggcagcuaccugaacgagacccaguucagcgacgacaucgagcagcaggccgacaacaugaucaccgagaugcugcagaaggaguacaucgagagacagggcaagaccccccugggccugguggacaucuucaucuucagcaccagcuucuaccugaucagcaucuuccugcaccugaucaagauccccacccacagacacaucgugggcaagcccugccccaagccccacagacugaaccacaugggcgugugcagcugcggccuguacaagcaccccggcgugcccaccaaguggaagagaugaggacuagucccuguucccagagcccacuuuuuuuucuuuuuuugaaauaaaauagccugucuuucagaucucaaaggcucuuuucagagccaccaaaaaaaaaaaaaaaaaaaaaaaaaaaaaaaaaaaaaaaaaaaaaaaaaaaaaaaaaaaaaaaaagaauu

SEQ ID NO: 14378 - RNA, 1733 nt, Artificial Sequence
  mRNA product Design a-2 (hSL-A64-N5) comprising derived and/or modified sequence from LASV(803213;Clade II)__AAF86703__GPC (opt4)
aggagaguccgcucagccagguugcagaagcggcuuagcguguguccuaaucuucucucugcguguagguaggccugugccgcaaacaagcuuaccaugggccagaucaucaccuucuuccaggaggugccccacgugaucgaggaggugaugaacaucgugcugaucgcccugagccugcuggccauccugaagggcaucuacaacguggccaccugcggccuguucggccugaucagcuuccugcugcugugcggcagaagcugcagcgugaccuacaagggcguguacgagcugcagacccuggagcugaacauggccaaccugaacaugaccaugccccugagcugcaccaagaacaacagccaccacuacaucauggugggcaacgagaccggccuggagcugacccugaccaacaccagcaucaucaaccacaaguucugcaaccugagcgacgcccacaagaagaaccuguacgaccacgcccugaugagcaucaucagcaccuuccaccugagcauccccaacuucaaccaguacgaggccaugagcugcgacuucaacggcggcaagaucagcgugcaguacaaccugagccacagcuucgccguggacgccgccaaccacugcggcaccaucgccaacggcgugcugcagaccuucaugagaauggccuggggcggcagcuacaucgcccuggacagcggcaagggcaacugggacugcaucaugaccagcuaccaguaccugaucauccagaacaccaccugggaggaccacugccaguucagcagacccagccccaucggcuaccugggccugcugagccagagaaccagagacaucuacaucagcagaagacugcugggcaccuucaccuggacccugagcgacagcgagggcaacgaggcccccggcggcuacugccugaccagauggaugcugaucgaggccgagcugaagugcuucggcaacaccgccguggccaagugcaacgagaagcacgacgaggaguucugcgacaugcugagacuguucgacuucaacaagcaggccaucaagagacugaagaccgaggcccagaugagcauccagcugaucaacaaggccgugaacgcccugaucaacgaccagcugaucaugaagaaccaccugagagacaucaugggcauccccuacugcaacuacagcagauacugguaccugaaccacaccgugaccggcaagaccagccugcccagaugcuggcuggugagcaacggcagcuaccugaacgagacccacuucagcgacgacaucgagcagcaggccgacaacaugaucaccgagaugcugcagaaggaguacauggacagacagggcaagaccccccugggccugguggaccuguucguguucagcaccagcuucuaccugaucagcaucuuccugcaccuggugaagauccccacccacagacacaucgugggcaagcccugccccaagccccacagacugaaccacaugggcaucugcagcugcggccuguacaagcaccccggcgugcccgugaaguggaagagaugaggacuagucccuguucccagagcccacuuuuuuuucuuuuuuugaaauaaaauagccugucuuucagaucucaaaggcucuuuucagagccaccaaaaaaaaaaaaaaaaaaaaaaaaaaaaaaaaaaaaaaaaaaaaaaaaaaaaaaaaaaaaaaaaagaauu

SEQ ID NO: 14379 - RNA, 1733 nt, Artificial Sequence
  mRNA product Design a-2 (hSL-A64-N5) comprising derived and/or modified sequence from LASV(GA391;Clade III)__CAA36645__GPC (opt4)
aggagaguccgcucagccagguugcagaagcggcuuagcguguguccuaaucuucucucugcguguagguaggccugugccgcaaacaagcuuaccaugggccagaucgugaccuucuuccaggaggugccccacgugaucgaggaggugaugaacaucgugcugaucgcccugagcauccuggccauccugaagggccuguacaacguggccaccugcggccugaucggccuggugaccuuccugcugcugagcggcagaagcugcagccugaucuacaagggcaccuacgagcugcagacccuggagcugaacauggagacccugaacaugaccaugccccugagcugcaccaagaacaacagccaccacuacaucagagugggcaacgagaccggccuggagcugacccugaccaacaccagcauccugaaccacaaguucugcaaccugagcgacgcccacaagagaaaccuguacgaccacagccugaugagcaucaucagcaccuuccaccugagcauccccaacuucaaccaguacgaggccaugagcugcgacuucaacggcggcaagaucaccgugcaguacaaccugagccacagcuucgccguggacgccgccggccacugcggcacccuggccaacggcgugcugcagaccuucaugagaauggccuggggcggcagcuacaucgcccuggacagcggcagaggcaacugggacugcaucaugaccagcuaccaguaccugaucauccagaacaccaccugggacgaccacugccaguucagcagacccagccccaucggcuaccugggccugcugagccagagaaccagagacaucuacaucagcagaagacugcugggcaccuucaccuggacccugagcgacagcgagggcaacgagacccccggcggcuacugccugaccagauggaugcugaucgaggccgagcugaagugcuucggcaacaccgccguggccaagugcaacgagaagcacgacgaggaguucugcgacaugcugagacuguucgacuucaacaagcaggccaucagaagacugaagaccgaggcccagaugagcauccagcugaucaacaaggccgugaacgcccugaucaacgaccagcugaucaugaagaaccaccugagagacaucaugggcauccccuacugcaacuacagcagauacugguaccugaaccacaccagcaccggcaagaccagccugcccagaugcuggcugaucagcaacggcagcuaccugaacgagaccaaguucagcgacgacaucgagcagcaggccgacaacaugaucaccgagaugcugcagaaggaguacaucgacagacagggcaagaccccccugggccugguggaccuguucguguucagcaccagcuucuaccugaucagcaucuuccugcaccuggugaagauccccacccacagacacaucgugggcaagcccugccccaagccccacagacugaaccacaugggcaucugcagcugcggccuguacaagcagcccggcgugcccgugagauggaagagaugaggacuagucccuguucccagagcccacuuuuuuuucuuuuuuugaaauaaaauagccugucuuucagaucucaaaggcucuuuucagagccaccaaaaaaaaaaaaaaaaaaaaaaaaaaaaaaaaaaaaaaaaaaaaaaaaaaaaaaaaaaaaaaaaagaauu

SEQ ID NO: 14380 - RNA, 1736 nt, Artificial Sequence
  mRNA product Design a-2 (hSL-A64-N5) comprising derived and/or modified sequence from LASV(AV;Clade V)__CCA30314__GPC (opt4)
aggagaguccgcucagccagguugcagaagcggcuuagcguguguccuaaucuucucucugcguguagguaggccugugccgcaaacaagcuuaccaugggccagaucgugaccuucuuccaggaggugccccacgugaucgaggaggugaugaacaucgugcugaucgcccugagcauccuggccgugcugaagggccuguacaacaucgccaccugcggccugaucggccugaucaccuuccugcugcugugcggcagaagcugcagcagcaaccuguacaagggcguguacgagcugcagagccuggaccugaacauggagacccugaacaugaccaugccccugagcugcaccaagaacaacagccaccacuacaucagagugggcaacgacaccggccuggagcugacccugaccaacaccagcauccugaaccacaaguucugcaaccugagcgacgcccacaagaaggaccuguacgaccacgcccugaugagcaucaucagcaccuuccaccugagcauccccaacuucaaccaguacgaggccaugagcugcgacuucaacggcggcaagaucagcgugcaguacaaccugagccacagcuacgccaucgacgccgccaaccacugcggcaccguggccaacggcauccugcagaccuucaugagaauggccuggggcggcagcuacaucgcccuggacagcggcagaggcaacugggacugcaucaugaccagcuaccaguaccugaucauccagaacaccaccugggagaaccacugccaguucagcagacccagccccaucggcuaccugggccugcugagccagagaaccagagacaucuacaucagcagaagacugcugggcaccuucaccuggacccugagcgacagcgagggcaacgccacccccggcggcuacugccugaccagauggaugcugaucgaggccgagcugaagugcuucggcaacaccgccguggccaagugcaacgagaagcacgacgaggaguucugcgacaugcugagacuguucgacuucaacaagcaggccaucagcagacugaagagcgaggcccagaugagcauccagcugaucaacaaggccgugaacgcccugaucaacgaccagcugaucaugaagaaccaccugagagacaucaugggcauccccuacugcaacuacagcaaguacugguaccugaaccacaccaucaccggcaagaccagccugcccaagugcuggcuggugagcaacggcagcuaccugaacgagacccacuucagcgacgacaucgagcagcaggccgacaacaugaucaccgagaugcugcagaaggaguacauggagagacagggcaagaccccccugggccugguggaccuguucguguucagcaccagcuucuaccugaucagcaucuuccugagacuggugaagauccccacccacagacacaucgugggcaagcccugccccaagccccacagacugaaccacaugggcaucugcagcugcggccuguacaagcagcccggcgugcccgugagauggaagagaugaggacuagucccuguucccagagcccacuuuuuuuucuuuuuuugaaauaaaauagccugucuuucagaucucaaaggcucuuuucagagccaccaaaaaaaaaaaaaaaaaaaaaaaaaaaaaaaaaaaaaaaaaaaaaaaaaaaaaaaaaaaaaaaaagaauu

SEQ ID NO: 14381 - RNA, 1733 nt, Artificial Sequence
  mRNA product Design a-2 (hSL-A64-N5) comprising derived and/or modified sequence from LASV(Togo/2016/7082;Clade VI)__AMR44577__GPC (opt4)
aggagaguccgcucagccagguugcagaagcggcuuagcguguguccuaaucuucucucugcguguagguaggccugugccgcaaacaagcuuaccaugggccagaucaucaccuucuuccaggaggugccccacgugaucgaggaggugaugaacaucgugcugaucgcccugagccugcuggccauccugaagggcguguacaacguggccaccugcggcaucaucggccuggugaccuuccuguuccugugcggcagaagcugcagccugaucuacaagggcagcuacgagcugcagacccuggagcugaacauggagacccugaacaugaccaugccccugagcugcaccaagaacagcagccaccacuacaucagagugggcaacgagaccggccuggagcugacccugaccaacaccagcaucaucaaccacaaguucugcaaccugagcgacgcccacaagagaaaccuguacgaccacgcccugaugagcauccugagcaccuuccaccugagcauccccaacuucaaccaguacgaggccaugagcugcgacuucaacggcggcaagaucagcgugcaguacaaccugagccacgccuacgccguggacgccgccgagcacugcggcaccguggccaacggcgugcugcagaccuucaugagaauggccuggggcggcagcuacaucgcccuggacagcggcagaggcaacugggacugcaucaugaccagcuaccaguaccugaucauccagaacaccaccugggaggaccacugccaguucagcagacccagccccaucggcuaccugggccugcugagccagagaaccagagacaucuacaucagcagaagacugcugggcaccuucaccuggacccugagcgacagcgagggcaacgagacccccggcggcuacugccugaccagauggaugcugaucgaggccgagcugaagugcuucggcaacaccgccguggccaagugcaacgagaagcacgacgaggaguucugcgacaugcugagacuguucgacuucaacaagcaggccauccagagacugaagagcgaggcccagaugagcauccagcugaucaacaaggccgugaacgcccugaucaacgaccagcugaucaugaagaaccaccugagagacaugaugggcauccccuacugcaacuacagcaaguacugguaccugaaccacaccagcagcggcagaaccagccugcccaagugcuggcuggugagcaacggcagcuaccugaacgagacccacuucagcgacgacaucgagcagcaggccgacaacaugaucaccgagaugcugcagaaggaguacaucgacagacagggcaagaccccccugggccugguggaccuguucguguucagcaccagcuucuaccugaucagcaucuuccugcaccugaucaagauccccacccacagacacaucgugggcaagcccugccccaagccccacagacugaaccacaugggcaucugcagcugcggccuguacaagcagcccggcgugcccaccagauggaagagaugaggacuagucccuguucccagagcccacuuuuuuuucuuuuuuugaaauaaaauagccugucuuucagaucucaaaggcucuuuucagagccaccaaaaaaaaaaaaaaaaaaaaaaaaaaaaaaaaaaaaaaaaaaaaaaaaaaaaaaaaaaaaaaaaagaauu

SEQ ID NO: 14382 - RNA, 1733 nt, Artificial Sequence
  mRNA product Design a-2 (hSL-A64-N5) comprising derived and/or modified sequence from LASV(KAK-428;Clade n.d. (VII))__ANH09740__GPC (opt4)
aggagaguccgcucagccagguugcagaagcggcuuagcguguguccuaaucuucucucugcguguagguaggccugugccgcaaacaagcuuaccaugggccagaucgugaccuucuuccaggaggugccccacgugaucgaggaggugaugaacaucgugcugaucgcccugagccugcuggccauccugaagggccuguacaacuucgccaccugcggcgugaucggccugaucaccuuccugcugcugugcggcagaagcugcagcgccaccuacaagggccaguacgagcugcagacccuggagcugaacauggagagccugaacaugaccaugccccugagcugcaccaagaacaacagccaccacuacaucagagccggcaacaacaccggccuggagcugacccugaccaacaccagcaucaucagccacaaguucugcaaccugagcgacgcccacaagaagaaccuguacgaccacacccugaugagcaucaucaccaccuuccaccugagcauccccaacuucaaccaguacgaggccaugagcugcgacuucaacggcggcaagaucagcauccaguacaaccugagccacagcuacgccggcgacgccgcccagcacugcggcaccguggccaacggcgugcugcagaccuucaugagaauggccuggggcggcagcuaccuggcccuggacagcggcagaagaggcugggacugcaucaucagcagcuaccaguaccugaucauccagaacaccaccugggacgaccacugccaguucagcagacccagccccaucggcuaccugggcuucgugagccagaagaccagagacaucuacaucagcagaagacugcugggcaccuucaccuggacccugagcgacagcgagggccacgacaugcccggcggcuacugccugaccagauggaugcugaucgaggccgaccugaagugcuucggcaacaccgccguggccaagugcaacgagaagcacgacgaggaguucugcgacauguggagacuguucgacuucaacaagcaggccauccagagacugaaggccgaggcccagaugaacauccagcugaucaacaaggccgugaacgcccugaucaacgaccagcugaugaugaagaaccaccugagagacaucaugggcauccccuacugcaacuacagcaaguucugguaccugaacaacaccaccaccggcagaaccagccugcccagaugcuggcugaucagcaacggcagcuaccugaacgagacccacuucagcgacgacaucgagcagcaggccgacaacaugaucaccgagaugcugcagaaggaguacauggacagacagggcaagaccccccugggccugguggaccuguucguguucagcaccagcuucuaccugaucaccaucuuccugcaccuggugaagauccccacccacagacacaucgugggcaagcccugccccaagccccacagacugaaccacaugggcaucugcagcugcggccuguacaagcagcccggcgugcccgugagauggaagagaugaggacuagucccuguucccagagcccacuuuuuuuucuuuuuuugaaauaaaauagccugucuuucagaucucaaaggcucuuuucagagccaccaaaaaaaaaaaaaaaaaaaaaaaaaaaaaaaaaaaaaaaaaaaaaaaaaaaaaaaaaaaaaaaaagaauu

SEQ ID NO: 14383 - RNA, 1733 nt, Artificial Sequence; identical to SEQ ID NO: 14377
  mRNA product Design a-2 (hSL-A64-N5) comprising derived and/or modified sequence from LASV(Pinneo-NIG-1969;Clade I)__AIT17836__GPC (opt4)

SEQ ID NO: 14384 - RNA, 1733 nt, Artificial Sequence
  mRNA product Design a-2 (hSL-A64-N5) comprising derived and/or modified sequence from LASV(ISTH0009-NIG-2011;Clade II)__AIT17404__GPC (opt4)
aggagaguccgcucagccagguugcagaagcggcuuagcguguguccuaaucuucucucugcguguagguaggccugugccgcaaacaagcuuaccaugggccagaucaucaccuucuuccaggaggugccccacgugaucgaggaggugaugaacaucgugcugaucgcccugagccugcuggccauccugaagggcaucuacaacguggccaccugcggccuguucggccuggugagcuuccugcugcugugcggcagaagcugcagcaccaccuacaagggcguguacgagcugcagacccuggagcuggacauggccagccugaacaugaccaugccccugagcugcaccaagaacaacagccaccacuacaucauggugggcaacgagaccggccuggagcugacccugaccaacaccagcaucaucaaccacaaguucugcaaccugagcgacgcccacaagaagaaccuguacgaccacgcccugaugagcaucaucagcaccuuccaccugagcauccccaacuucaaccaguacgaggccaugagcugcgacuucaacggcggcaagaucagcgugcaguacaaccugagccacgccuacgccguggacgccgccaaccacugcggcaccaucgccaacggcgugcugcagaccuucaugagaauggccuggggcggcagcuacaucgcccuggacagcggcaagggcagcugggacugcaucaugaccagcuaccaguaccugaucauccagaacaccaccugggaggaccacugccaguucagcagacccagccccaucggcuaccugggccugcugagccagagaaccagagacaucuacaucagcagaagacugcugggcaccuucaccuggacccugagcgacagcgagggcaacgagacccccggcggcuacugccugaccagauggaugcugaucgaggccgagcugaagugcuucggcaacaccgccguggccaagugcaacgagaagcacgacgaggaguucugcgacaugcugagacuguucgacuucaacaagcaggccaucagaagacugaagaccgaggcccagaugagcauccagcugaucaacaaggccgugaacgcccugaucaacgaccagcugaucaugaagaaccaccugagagacaucaugggcauccccuacugcaacuacagcaaguacugguaccugaaccacaccgugaccggcaagaccagccugcccagaugcuggcuggugagcaacggcagcuaccugaacgagacccacuucagcgacgacaucgagcagcaggccgacaacaugaucaccgagcugcugcagaaggaguacauggacagacagggcaagaccccccugggccugguggaccuguucguguucagcaccagcuucuaccugaucagcaucuuccugcaccugaucaagauccccacccacagacacaucaccggcaagcccugccccaagccccacagacugaaccacaugggcaucugcagcugcggccuguacaagcaccccggcgugcccgugaaguggaagagaugaggacuagucccuguucccagagcccacuuuuuuuucuuuuuuugaaauaaaauagccugucuuucagaucucaaaggcucuuuucagagccaccaaaaaaaaaaaaaaaaaaaaaaaaaaaaaaaaaaaaaaaaaaaaaaaaaaaaaaaaaaaaaaaaagaauu

SEQ ID NO: 14385 - RNA, 1733 nt, Artificial Sequence
  mRNA product Design a-2 (hSL-A64-N5) comprising derived and/or modified sequence from LASV(ISTH2010-NIG-2012;Clade II)__AIT17482__GPC (opt4)
aggagaguccgcucagccagguugcagaagcggcuuagcguguguccuaaucuucucucugcguguagguaggccugugccgcaaacaagcuuaccaugggccagaucaucaccuucuuccaggaggugccccacgugaucgaggaggugaugaacaucgugcugaucgcccugagccugcuggccauccugaagggcaucuacaacguggccaccugcggccuguucggccuggugagcuuccugcugcugugcggcagaagcugcagcaccaccuacaagggcguguacgagcugcagacccuggagcuggacauggccagccugaacaugaccaugccccugagcugcaccaagaacaacagccaccacuacaucauggugggcaacgagaccggccuggagcugacccugaccaacaccagcaucaucaaccacaaguucugcaaccugagcgacgcccacaagaagaaccuguacgaccacgcccugaugagcaucaucagcaccuuccaccugagcauccccaacuucaaccaguacgaggccaugagcugcgacuucaacggcggcaagaucagcgugcaguacaaccugagccacgccuacgccguggacgccgccaaccacugcggcaccaucgccaacggcgugcugcagaccuucaugagaauggccuggggcggcagcuacaucgcccuggacagcggcaagggcagcugggacugcaucaugaccagcuaccaguaccugaucauccagaacaucaccugggaggaccacugccaguucagcagacccagccccaucggcuaccugggccugcugagccagagaaccagagacaucuacaucagcagaagacugcugggcaccuucaccuggacccugagcgacagcgagggcaacgagacccccggcggcuacugccugaccagauggaugcugaucgaggccgagcugaagugcuucggcaacaccgccguggccaagugcaacgagaagcacgacgaggaguucugcgacaugcugagacuguucgacuucaacaagcaggccaucagaagacugaagaccgaggcccagaugagcauccagcugaucaacaaggccgugaacgcccugaucaacgaccagcugaucaugaagaaccaccugagagacaucaugggcauccccuacugcaacuacagcaaguacugguaccugaaccacaccgugaccggcaagaccagccugcccagaugcuggcuggugagcaacggcagcuaccugaacgagacccacuucagcgacgacaucgagcagcaggccgacaacaugaucaccgagcugcugcagaaggaguacaucgacagacagggcaagaccccccugggccugguggaccuguucguguucagcaccagcuucuaccugaucagcaucuuccugcaccuggugaagauccccacccacagacacguggugggcaagcccugccccaagccccacagacugaaccacaugggcaucugcagcugcggccuguacaagcaccccggcgugcccgugaaguggaagagaugaggacuagucccuguucccagagcccacuuuuuuuucuuuuuuugaaauaaaauagccugucuuucagaucucaaaggcucuuuucagagccaccaaaaaaaaaaaaaaaaaaaaaaaaaaaaaaaaaaaaaaaaaaaaaaaaaaaaaaaaaaaaaaaaagaauu

SEQ ID NO: 14386 - RNA, 1733 nt, Artificial Sequence
  mRNA product Design a-2 (hSL-A64-N5) comprising derived and/or modified sequence from LASV(Lassa virus/H.sapiens-wt/NGA/2015/ISTH_0543;Clade II)__AVO03639__GPC (opt4)
aggagaguccgcucagccagguugcagaagcggcuuagcguguguccuaaucuucucucugcguguagguaggccugugccgcaaacaagcuuaccaugggccagaucaucaccuucuuccaggaggugccccacgugaucgaggaggugaugaacaucgugcugaucgcccugagccugcuggccauccugaagggcaucuacaacguggccaccugcggccuguucggccuggugagcuuccugcugcugugcggcagaagcugcagcaccaccuacaagggcguguacgagcugcagacccuggagcuggacauggccaaccugaacaugaccaugccccugagcugcaccaagaacaacagccaccacuacaucauggugggcaacgagaccggccuggagcugacccugaccaacaccagcaucaucaaccacaaguucugcaaccugagcgacgcccacaagaagaaccuguacgaccacgcccugaugagcaucaucagcaccuuccaccugagcauccccaacuucaaccaguacgaggccaugagcugcgacuucaacggcggcaagaucagcgugcaguacaaccugagccacaccuacgccguggacgccgccaaccacugcggcaccaucgccaacggcgugcugcagaccuucaugagaauggccuggggcggcagcuacaucgcccuggacagcggcaagggcagcugggacugcaucaugaccagcuaccaguaccuggugauccagaacaccaccugggaggaccacugccaguucagcagacccagccccaucggcuaccugggccugcugagccagagaaccagagacaucuacaucagcagaagacugcugggcaccuucaccuggacccugagcgacagcgagggcaacgagacccccggcggcuacugccugaccagauggaugcugaucgaggccgagcugaagugcuucggcaacaccgccguggccaagugcaacgagaagcacgacgaggaguucugcgacaugcugagacuguucgacuucaacaagcaggccaucagaagacugaagaccgaggcccagaugagcauccagcugaucaacaaggccgugaacgcccugaucaacgaccagcugaucaugaagaaccaccugagagacaucaugggcauccccuacugcaacuacagcaaguacugguaccugaaccacaccgugaccggcaagaccagccugcccagaugcuggcuggugagcaacggcagcuaccugaacgagacccacuucagcgacgacaucgagcagcaggccgacaacaugaucaccgagcugcugcagaaggaguacaucgacagacagggcaagaccccccugggccugguggaccuguucguguucagcaccagcuucuaccugaucagcaucuuccugcaccuggugaagauccccacccacagacacaucaccggcaagcccugccccaagccccacagacugaaccacaugggcaucugcagcugcggccuguacaagcaccccggcgugcccgugaaguggaagagaugaggacuagucccuguucccagagcccacuuuuuuuucuuuuuuugaaauaaaauagccugucuuucagaucucaaaggcucuuuucagagccaccaaaaaaaaaaaaaaaaaaaaaaaaaaaaaaaaaaaaaaaaaaaaaaaaaaaaaaaaaaaaaaaaagaauu

SEQ ID NO: 14387 - RNA, 1733 nt, Artificial Sequence
  mRNA product Design a-2 (hSL-A64-N5) comprising derived and/or modified sequence from LASV(Lassa virus/H.sapiens-wt/NGA/2016/ISTH_0009;Clade II)__AVO03571__GPC (opt4)
aggagaguccgcucagccagguugcagaagcggcuuagcguguguccuaaucuucucucugcguguagguaggccugugccgcaaacaagcuuaccaugggccagaucaucaccuucuuccaggaggugccccacgugaucgaggaggugaugaacaucgugcugaucgcccugagccugcuggccauccugaagggcaucuacaacguggccaccugcggccugcugggccuggugagcuuccugcugcugugcggcagaagcugcagcaccaccuacaagggcguguacgagcugcagacccuggagcuggacauggccagccugaacaugaccaugccccugagcugcaccaagaacaacagccaccacuacaucauggugggcaacgagaccggccuggagcugacccugaccaacaccagcaucaucaaccacaaguucugcaaccugagcgacgcccacaagaagaaccuguacgaccacgcccugaugagcaucaucagcaccuuccaccugagcauccccaacuucaaccaguacgaggccaugagcugcgacuucaacggcggcagaaucagcgugcaguacaaccugagccacagcuacgccguggacgccgccaaccacugcggcaccaucgccaacggcgugcugcagaccuucaugagaauggccuggggcggcagcuacaucgcccuggacagcggcaagggcagcugggacugcaucaugaccagcuaccaguaccugaucauccagaacaccaccugggaggaccacugccaguucagcagacccagccccaucggcuaccugggccugcugagccagagaaccagagacaucuacaucagcagaagacugcugggcaccuucaccuggacccugagcgacagcgagggcaacgagacccccggcggcuacugccugaccagauggaugcugaucgaggccgagcugaagugcuucggcaacaccgccguggccaagugcaacgagaagcacgacgaggaguucugcgacaugcugagacuguucgacuucaacaagcaggccaucagaagacugaagaccgaggcccagaugagcauccagcugaucaacaaggccgugaacgcccugaucaacgaccagcugaucaugaagaaccaccugagagacaucaugggcauccccuacugcaacuacagcaaguacugguaccugaaccacaccgugaccggcaagaccagccugcccagaugcuggcuggugagcaacggcagcuaccugaacgagacccacuucagcgacgacaucgagcagcaggccgacaacaugaucaccgagcugcugcagaaggaguacaucgacagacagggcaagaccccccugggccugguggaccuguucguguucagcaccagcuucuaccugaucagcaucuuccugcaccuggugaagauccccacccacagacacaucaccggcaagcccugccccaagccccacagacugaaccacaugggcaucugcagcugcggccuguacaaccaccccggcgugcccgugaaguggaagagaugaggacuagucccuguucccagagcccacuuuuuuuucuuuuuuugaaauaaaauagccugucuuucagaucucaaaggcucuuuucagagccaccaaaaaaaaaaaaaaaaaaaaaaaaaaaaaaaaaaaaaaaaaaaaaaaaaaaaaaaaaaaaaaaaagaauu

SEQ ID NO: 14388 - RNA, 1733 nt, Artificial Sequence
  mRNA product Design a-2 (hSL-A64-N5) comprising derived and/or modified sequence from LASV(Lassa virus/H.sapiens-wt/NGA/2016/ISTH_0017;Clade II)__AVO03567__GPC (opt4)
aggagaguccgcucagccagguugcagaagcggcuuagcguguguccuaaucuucucucugcguguagguaggccugugccgcaaacaagcuuaccaugggccagaucaucaccuucuuccaggaggugccccacgugaucgaggaggugaugaacaucgugcugaucgcccugagccugcuggccauccugaagggcaucuacaacguggccaccugcggccuguucggccuggugagcuuccugcugcugugcggcagaagcugcagcaccaccuacaagggcguguacgagcugcagacccuggagcuggacauggccagccugaacaugaccaugccccugagcugcaccaagaacaacagccaccacuacaucauggugggcaacgagaccggccuggagcugacccugaccaacaccagcaucaucaaccacaaguucugcaaccugagcgacgcccacaagaagaaccuguacgaccacgcccugaugagcaucaucagcaccuuccaccugagcauccccaacuucaaccaguacgaggccaugagcugcgacuucaacggcggcaagaucagcgugcaguacaaccugagccacaccuacgccaucgacgccgccaaccacugcggcaccaucgccaacggcgugcugcagaccuucaugagaauggccuggggcggcagcuacaucgcccuggacagcggcaagggcagcugggacugcaucaugaccagcuaccaguaccugaucauccagaacaccaccugggaggaccacugccaguucagcagacccagccccaucggcuaccugggccugcugagccagagaaccagagacaucuacaucagcagaagacugcugggcaccuucaccuggacccugagcgacagcgagggcaacgagacccccggcggcuacugccugaccagauggaugcugaucgaggccgagcugaagugcuucggcaacaccgccguggccaagugcaacgagaagcacgacgaggaguucugcgacaugcugagacuguucgacuucaacaagcaggccaucagaagacugaagaccgaggcccagaugagcauccagcugaucaacaaggccgugaacgcccugaucaacgaccagcugaucaugaagaaccaccugagagacaucaugggcauccccuacugcaacuacagcaaguacugguaccugaaccacaccgugaccggcaagaccagccugcccagaugcuggcuggugagcaacggcagcuaccugaacgagacccacuucagcgacgacaucgagcagcaggccgacaacaugaucaccgagcugcugcagaaggaguacauggacagacagggcaagaccccccugggccugguggaccuguucguguucagcaccagcuucuaccugaucagcaucuuccugcaccuggugagaauccccacccacagacacgugaucggcaagcccugccccaagccccacagacugaaccacaugggcaucugcagcugcggccuguacaagcaccccggcgugcccgugaaguggaagagaugaggacuagucccuguucccagagcccacuuuuuuuucuuuuuuugaaauaaaauagccugucuuucagaucucaaaggcucuuuucagagccaccaaaaaaaaaaaaaaaaaaaaaaaaaaaaaaaaaaaaaaaaaaaaaaaaaaaaaaaaaaaaaaaaagaauu

SEQ ID NO: 14389 - RNA, 1733 nt, Artificial Sequence
  mRNA product Design a-2 (hSL-A64-N5) comprising derived and/or modified sequence from LASV(Lassa virus/H.sapiens-wt/NGA/2018/ISTH_0959;Clade II)__AVV65099__GPC (opt4)
aggagaguccgcucagccagguugcagaagcggcuuagcguguguccuaaucuucucucugcguguagguaggccugugccgcaaacaagcuuaccaugggccagaucaucaccuucuuccaggaggugccccacgugaucgaggaggugaugaacaucgugcugaucgcccugagccugcuggccauccugaagggcaucuacaacguggugaccugcggccuguucggccuggugagcuuccugcugcugugcggcagaagcugcagcaccaccuacaagggcguguacgagcugcagacccuggagcuggacauggccagccugaacaugaccaugccccugagcugcaccaagaacaacagccaccacuacaucauggugggcaacgagaccggccuggagcugacccugaccaacaccagcaucaucaaccacaaguucugcaaccugagcgacgcccacaagaagaaccuguacgaccacgcccugaugagcaucaucagcaccuuccaccugagcauccccaacuucaaccaguacgaggccaugagcugcgacuucaacggcggcaagaucagcgugcaguacaaccugagccacgccuacgccaucgacgccgccaaccacugcggcaccaucgccaacggcgugcugcagaccuucaugagaauggccuggggcggcagcuacaucgcccuggacagcggcaagggcagcugggacugcaucaugaccagcuaccaguaccugaucauccagaacaccaccugggaggaccacugccaguucagcagacccagccccaucggcuaccugggccugcugagccagagaaccagagacaucuacaucagcagaagacugcugggcaccuucaccuggacccugagcgacagcgagggcaacgagacccccggcggcuacugccugaccagauggaugcugaucgaggccgagcugaagugcuucggcaacaccgccguggccaagugcaacgagaagcacgacgaggaguucugcgacaugcugagacuguucgacuucaacaagcaggccaucagaagacugaagaccgaggcccagaugagcauccagcugaucaacaaggccgugaacgcccugaucaacgaccagcugaucaugaagaaccaccugagagacaucaugggcauccccuacugcaacuacagcaaguacugguaccugaaccacaccgugaccggcaagaccagccugcccagaugcuggcuggugagcaacggcagcuaccugaacgagacccacuucagcgacgacaucgagcagcaggccgacaacaugaucaccgagcugcugcagaaggaguacaucgacagacagggcaagaccccccugggccugguggaccuguucguguucagcaccagcuucuaccugaucagcaucuuccugcaccuggugaagauccccacccacagacacgugaucggcaagcccugccccaagccccacagacugaaccacaugggcaucugcagcugcggccuguacaagcaccccggcgugcccgugaaguggaagagaugaggacuagucccuguucccagagcccacuuuuuuuucuuuuuuugaaauaaaauagccugucuuucagaucucaaaggcucuuuucagagccaccaaaaaaaaaaaaaaaaaaaaaaaaaaaaaaaaaaaaaaaaaaaaaaaaaaaaaaaaaaaaaaaaagaauu

SEQ ID NO: 14390 - RNA, 1733 nt, Artificial Sequence
  mRNA product Design a-2 (hSL-A64-N5) comprising derived and/or modified sequence from LASV(LASV003-NIG-2008;Clade II)__AIT17580__GPC (opt4)
aggagaguccgcucagccagguugcagaagcggcuuagcguguguccuaaucuucucucugcguguagguaggccugugccgcaaacaagcuuaccaugggccagaucaucaccuucuuccaggaggugccccacgugaucgaggaggugaugaacaucgugcugaucgcccugagccugcuggccauccugaagggcaucuacaacguggccaccugcggccuguucggccuggugagcuuccugcugcugugcggcagaagcugcagcaccaccuacaagggcguguacgagcugcagacccuggagcuggacauggccagccugaacaugaccaugccccugagcugcaccaagaacaacagccaccacuacaucauggugggcaacgagaccggccuggagcugacccugaccaacaccagcaucaucaaccacaaguucugcaaccugagcgacgcccacaagaagaaccuguacgaccacgcccugaugagcaucaucagcaccuuccaccugagcauccccaacuucaaccaguacgaggccaugagcugcgacuucaacggcggcaagaucagcgugcaguacaaccugagccacaccuacgccguggacgccgccaaccacugcggcaccaucgccaacggcgugcugcagaccuucaugagaauggccuggggcggcagcuacaucgcccuggacagcggcaagggcagcugggacugcaucaugaccagcuaccaguaccugaucauccagaacaccaccugggaggaccacugccaguucagcagacccagccccaucggcuaccugggccugcugagccagagaaccagagacaucuacaucagcagaagacugcugggcaccuucaccuggacccugagcgacagcgagagcaacgagacccccggcggcuacugccugaccagauggaugcugaucgaggccgagcugaagugcuucggcaacaccgccguggccaagugcaacgagaagcacgacgaggaguucugcgacaugcugagacuguucgacuucaacaagcaggccaucagaagacugaaggccgaggcccagaugagcauccagcugaucaacaaggccgugaacgcccugaucaacgaccagcugaucaugaagaaccaccugagagacaucaugggcauccccuacugcaacuacagcaaguacugguaccugaaccacaccgugaccggcagaaccagccugcccagaugcuggcuggugagcaacggcagcuaccugaacgagacccacuucagcgacgacaucgagcagcaggccgacaacaugaucaccgagcugcugcagaaggaguacauggacagacagggcaagaccccccugggccugguggaccuguucguguucagcaccagcuucuaccugaucagcaucuuccugcaccuggugaagauccccacccacagacacgugaucggcaagcccugccccaagccccacagacugaaccacaugggcaucugcagcugcggccuguacaagcaccccggcgugcccgugaaguggaagagaugaggacuagucccuguucccagagcccacuuuuuuuucuuuuuuugaaauaaaauagccugucuuucagaucucaaaggcucuuuucagagccaccaaaaaaaaaaaaaaaaaaaaaaaaaaaaaaaaaaaaaaaaaaaaaaaaaaaaaaaaaaaaaaaaagaauu

SEQ ID NO: 14391 - RNA, 1733 nt, Artificial Sequence
  mRNA product Design a-2 (hSL-A64-N5) comprising derived and/or modified sequence from LASV(LASV035-NIG-2009;Clade II)__AIT17588__GPC (opt4)
aggagaguccgcucagccagguugcagaagcggcuuagcguguguccuaaucuucucucugcguguagguaggccugugccgcaaacaagcuuaccaugggccagaucaucaccuucuuccaggaggugccccacgugaucgaggaggugaugaacaucgugcugaucgcccugagccugcuggccauccugaagggcaucuacaacguggccaccugcggccuguucggccuggugagcuuccugcugcugugcggcagaagcugcagcaccaccuacaagggcguguacgagcugcagacccuggagcuggacauggccagccugaacaugaccaugccccugagcugcaccaagaacaacagccaccacuacaucauggugggcaacgagaccggccuggagcugacccugaccaacaccagcaucaucaaccacaaguucugcaaccugagcgacgcccacaagaagaaccuguacgaccacgcccugaugagcaucaucagcaccuuccaccugagcauccccaacuucaaccaguacgaggccaugagcugcgacuucaacggcggcaagaucagcgugcaguacaaccugagccacgccuacgccguggacgccgccaaccacugcggcaccaucgccaacggcgugcugcagaccuucaugagaauggccuggggcggcagcuacaucgcccuggacagcggcaagggcagcugggacugcaucaugaccagcuaccaguaccugaucauccagaacaccaccugggaggaccacugccaguucagcagacccagccccaucggcuaccugggccugcugagccagagaaccagagacaucuacaucagcagaagacugcugggcaccuucaccuggacccugagcgacagcgagggcaacgagacccccggcggcuacugccugaccagauggaugcugaucgaggccgagcugaagugcuucggcaacaccgccguggccaagugcaacgagaagcacgacgaggaguucugcgacaugcugagacuguucgacuucaacaagcaggccaucagaagacugaaggccgaggcccagaugagcauccagcugaucaacaaggccgugaacgcccugaucaacgaccagcugaucaugaagaaccaccugagagacaucaugggcauccccuacugcaacuacagcaaguacugguaccugaaccacaccgugaccggcaagaccagccugcccagaugcuggcuggugagcaacggcagcuaccugaacgagacccacuucagcgacgacaucgagcagcaggccgacaacaugaucaccgagcugcugcagaaggaguacaucgacagacagggcaagaccccccugggccugguggaccuguucguguucagcaccagcuucuaccugaucagcaucuuccugcaccuggugaagauccccacccacagacacgugaucggcaagcccugccccaagccccacagacugaaccacaugggcaucugcagcugcggccuguacaagcaccccggcgugcccgugaaguggaagagaugaggacuagucccuguucccagagcccacuuuuuuuucuuuuuuugaaauaaaauagccugucuuucagaucucaaaggcucuuuucagagccaccaaaaaaaaaaaaaaaaaaaaaaaaaaaaaaaaaaaaaaaaaaaaaaaaaaaaaaaaaaaaaaaaagaauu

SEQ ID NO: 14392 - RNA, 1733 nt, Artificial Sequence
  mRNA product Design a-2 (hSL-A64-N5) comprising derived and/or modified sequence from LASV(LASV1000-NIG-2009;Clade II)__AIT17782__GPC (opt4)
aggagaguccgcucagccagguugcagaagcggcuuagcguguguccuaaucuucucucugcguguagguaggccugugccgcaaacaagcuuaccaugggccagaucaucaccuucuuccaggaggugccccacgugaucgaggaggugaugaacaucgugcugaucgcccugagccugcuggccauccugaagggcaucuacaacguggccaccugcggccuguucggccuggugagcuuccugcugcugugcggcagaagcugcagcaccaccuacaagggcguguacgagcugcagacccuggagcuggacauggccagccugaacaugaccaugccccugagcugcaccaagaacaacagccaccacuacaucauggugggcaacgagaccggccuggagcugacccugaccaacaccagcaucaucaaccacaaguucugcaaccugagcgacgcccacaagaagaaccuguacgaccacgcccugaugagcaucaucagcaccuuccaccugagcauccccaacuucaaccaguacgaggccaugagcugcgacuucaacggcggcaagaucagcgugcaguacaaccugagccacaccuacgccguggacgccgccaaccacugcggcaccaucgccaacggcgugcugcagaccuucaugagaauggccuggggcggcagcuacaucgcccuggacagcggcaagggcagcugggacugcaucaugaccagcuaccaguaccugaucauccagaacaccaccugggaggaccacugccaguucagcagacccagccccaucggcuaccugggccugcugagccagagaaccagagacaucuacaucagcagaagacugcugggcaccuucaccuggacccugagcgacagcgagggcaacgagacccccggcggcuacugccugaccagauggaugcugaucgaggccgagcugaagugcuucggcaacaccgccguggccaagugcaacgagaagcacgacgaggaguucugcgacaugcugagacuguucgacuucaacaagcaggccaucaagagacugaagaccgaggcccagaugagcauccagcugaucaacaaggccgugaacgcccugaucaacgaccagcugaucaugaagaaccaccugagagacaucaugggcauccccuacugcaacuacagcaaguacugguaccugaaccacaccgugaccggcaagaccagccugcccagaugcuggcuggugagcaacggcagcuaccugaacgagacccacuucagcgacgacaucgagcagcaggccgacaacaugaucaccgagcugcugcagaaggaguacaucgacagacagggcaagaccccccugggccugguggaccuguucguguucagcaccagcuucuaccugaucagcaucuuccugcaccuggugaagauccccacccacagacacguggugggcaagcccugccccaagccccacagacugaaccacaugggcaucugcagcugcggccuguacaagcaccccggcgugcccgugaaguggaagagaugaggacuagucccuguucccagagcccacuuuuuuuucuuuuuuugaaauaaaauagccugucuuucagaucucaaaggcucuuuucagagccaccaaaaaaaaaaaaaaaaaaaaaaaaaaaaaaaaaaaaaaaaaaaaaaaaaaaaaaaaaaaaaaaaagaauu

SEQ ID NO: 14393 - RNA, 1733 nt, Artificial Sequence
  mRNA product Design a-2 (hSL-A64-N5) comprising derived and/or modified sequence from LASV(LASV221-NIG-2010;Clade II)__AIT17624__GPC (opt4)
aggagaguccgcucagccagguugcagaagcggcuuagcguguguccuaaucuucucucugcguguagguaggccugugccgcaaacaagcuuaccaugggccagaucaucaccuucuuccaggaggugccccacgugaucgaggaggugaugaacaucgugcugaucgcccugagccugcuggccauccugaagggcaucuacaacguggccaccugcggccuguucggccuggugagcuuccugcugcugugcggcagaagcugcagcaccaccuacaagggcguguacgagcugcagacccuggagcuggacauggccagccugaacaugaccaugccccugagcugcaccaagaacaacagccaccacuacaucauggugggcaacgagaccggccuggagcugacccugaccaacaccagcaucaucaaccacaaguucugcaaccugagcgacgcccacaagaagaaccuguacgaccacgcccugaugagcaucaucagcaccuuccaccugagcauccccaacuucaaccaguacgaggccaugagcugcgacuucaacggcggcaagaucagcgugcaguacaaccugagccacaccuacgccaucgacgccgccaaccacugcggcaccaucgccaacggcgugcugcagaccuucaugagaauggccuggggcggcagcuacaucgcccuggacagcggcaagggcagcugggacugcaucaugaccagcuaccaguaccugaucauccagaacaccaccugggaggaccacugccaguucagcagacccagccccaucggcuaccugggccugcugagccagagaaccagagacaucuacaucagcagaagacugcugggcaccuucaccuggacccugagcgacagcgagggcaacgagacccccggcggcuacugccugaccagauggaugcugaucgaggccgagcugaagugcuucggcaacaccgccguggccaagugcaacgagaagcacgacgaggaguucugcgacaugcugagacuguucgacuucaacaagcaggccaucagaagacugaagaccgaggcccagaugagcauccagcugaucaacaaggccgugaacgcccugaucaacgaccagcugaucaugaagaaccaccugagagacaucaugggcauccccuacugcaacuacagcaaguacugguaccugaaccacaccgugaccggcaagaccagccugcccagaugcuggcuggugagcaacggcagcuaccugaacgagacccacuucagcgacgacaucgagcagcaggccgacaacaugaucaccgagaugcugcagaaggaguacauggacagacagggcaagaccccccugggccugguggaccuguucguguucagcaccagcuucuaccugaucagcaucuuccugcaccuggugaagauccccacccacagacacgugaucggcaagcccugccccaagccccacagacugaaccacaugggcaucugcagcugcggccuguacaagcaccccggcgugcccgugaaguggaagagaugaggacuagucccuguucccagagcccacuuuuuuuucuuuuuuugaaauaaaauagccugucuuucagaucucaaaggcucuuuucagagccaccaaaaaaaaaaaaaaaaaaaaaaaaaaaaaaaaaaaaaaaaaaaaaaaaaaaaaaaaaaaaaaaaagaauu

SEQ ID NO: 14394 - RNA, 1733 nt, Artificial Sequence
  mRNA product Design a-2 (hSL-A64-N5) comprising derived and/or modified sequence from LASV(LASV237-NIG-2010;Clade II)__AIT17638__GPC (opt4)
aggagaguccgcucagccagguugcagaagcggcuuagcguguguccuaaucuucucucugcguguagguaggccugugccgcaaacaagcuuaccaugggccagaucaucaccuucuuccaggaggugccccacgugaucgaggaggugaugaacaucgugcugaucgcccugagccugcuggccauccugaagggcaucuacaacguggccaccugcggccuguucggccuggugagcuuccugcugcugugcggcagaagcugcagcaccaccuacaagggcguguacgagcugcagacccuggagcuggacauggccagccugaacaugaccaugccccugagcugcaccaagaacaacagccaccacuacaucauggugggcaacgagaccggccuggagcugacccugaccaacaccagcaucaucaaccacaaguucugcaaccugagcgacgcccacaagaaggaccuguacgaccacgcccugaugagcaucaucagcaccuuccaccugagcauccccaacuucaaccaguacgaggccaugagcugcgacuucaacggcggcaagaucagcgugcaguacaaccugagccacaccuacgccguggacgccgccaaccacugcggcaccaucgccaacggcgugcugcagaccuucaugagaauggccuggggcggcagcuacaucgcccuggacagcggcaagggcagcugggacugcaucaugaccagcuaccaguaccugaucauccagaacaccaccugggaggaccacugccaguucagcagacccagccccaucggcuaccugggccugcugagccagagaaccagagacaucuacaucagcagaagacugcugggcaccuucaccuggacccugagcgacagcgagggcaacgagacccccggcggcuacugccugaccagauggaugcugaucgaggccgagcugaagugcuucggcaacaccgccguggccaagugcaacgagaagcacgacgaggaguucugcgacaugcugagacuguucgacuucaacaagcaggccaucagaagacugaagaccgaggcccagaugagcauccagcugaucaacaaggccgugaacgcccugaucaacgaccagcugaucaugaagaaccaccugagagacaucaugggcauccccuacugcaacuacagcaaguacugguaccugaaccacaccgugaccggcaagaccagccugcccagaugcuggcuggugagcaacggcagcuaccugaacgagacccacuucagcgacgacaucgagcagcaggccgacaacaugaucaccgagcugcugcagaaggaguacauggacagacagggcaagaccccccugggccugguggaccuguucguguucagcaccagcuucuaccugaucagcaucuuccugcaccugaucaagauccccacccacagacacaucaccggcaagcccugccccaagccccacagacugaaccacaugggcaucugcagcugcggccuguacaagcaccccggcgugcccgugaaguggaagagaugaggacuagucccuguucccagagcccacuuuuuuuucuuuuuuugaaauaaaauagccugucuuucagaucucaaaggcucuuuucagagccaccaaaaaaaaaaaaaaaaaaaaaaaaaaaaaaaaaaaaaaaaaaaaaaaaaaaaaaaaaaaaaaaaagaauu

SEQ ID NO: 14395 - RNA, 1733 nt, Artificial Sequence
  mRNA product Design a-2 (hSL-A64-N5) comprising derived and/or modified sequence from LASV(LASV253-NIG-2011;Clade II)__AIT17670__GPC (opt4)
aggagaguccgcucagccagguugcagaagcggcuuagcguguguccuaaucuucucucugcguguagguaggccugugccgcaaacaagcuuaccaugggccagaucaucaccuucuuccaggaggugccccacgugaucgaggaggugaugaacaucgugcugaucgcccugagccugcuggccauccugaagggcaucuacaacguggccaccugcggccuguucggccuggugagcuuccugcugcugugcggcagaagcugcagcaccaccuacaagggcguguacgagcugcagacccuggagcuggacauggccagccugaacaugaccaugccccugagcugcaccaagaacaacagccaccacuacaucauggugggcaacgagaccggccuggagcugacccugaccaacaccagcaucaucaaccacaaguucugcaaccugagcgacgcccacaagaagaaccuguacgaccacgcccugaugagcaucaucagcaccuuccaccugagcauccccaacuucaaccaguacgaggccaugagcugcgacuucaacggcggcaagaucagcgugcaguacaaccugagccacaccuacgccguggacgccgccaaccacugcggcaccaucgccaacggcgugcugcagaccuucaugagaauggccuggggcggcagcuacaucgcccuggacagcggcaagggcagcugggacugcaucaugaccagcuaccaguaccugaucauccagaacaccaccugggaggaccacugccaguucagcagacccagccccaucggcuaccugggccugcugagccagagaaccagagacaucuacaucagcagaagacugcugggcaccuucaccuggacccugagcgacagcgagggcaacgagacccccggcggcuacugccugaccagauggaugcugaucgaggccgagcugaagugcuucggcaacaccgccguggccaagugcaacgagaagcacgacgaggaguucugcgacaugcugagacuguucgacuucaacaagcaggccaucagaagacugaaggccgaggcccagaugagcauccagcugaucaacaaggccgugaacgcccugaucaacgaccagcugaucaugaagaaccaccugagagacaucaugggcauccccuacugcaacuacagcaaguacugguaccugaaccacaccgugaccggcagaaccagccugcccagaugcuggcuggugagcaacggcagcuaccugaacgagacccacuucagcgacgacaucgagcagcaggccgacaacaugaucaccgagcugcugcagaaggaguacaucgacagacagggcaagaccccccugggccugguggaccuguucguguucagcaccagcuucuaccugaucagcaucuuccugcaccuggugaagauccccacccacagacacaucaucggcaagcccugccccaagccccacagacugaaccacaugggcaucugcagcugcggccuguacaagcaccccggcgugcccgugaaguggaagagaugaggacuagucccuguucccagagcccacuuuuuuuucuuuuuuugaaauaaaauagccugucuuucagaucucaaaggcucuuuucagagccaccaaaaaaaaaaaaaaaaaaaaaaaaaaaaaaaaaaaaaaaaaaaaaaaaaaaaaaaaaaaaaaaaagaauu

SEQ ID NO: 14396 - RNA, 1733 nt, Artificial Sequence
  mRNA product Design a-2 (hSL-A64-N5) comprising derived and/or modified sequence from LASV(LASV254-NIG-2011;Clade II)__AIT17674__GPC (opt4)
aggagaguccgcucagccagguugcagaagcggcuuagcguguguccuaaucuucucucugcguguagguaggccugugccgcaaacaagcuuaccaugggccagaucaucaccuucuuccaggaggugccccacgugaucgaggaggugaugaacaucgugcugaucgcccugagccugcuggccauccugaagggcaucuacaacguggccaccugcggccuguucggccuggugagcuuccugcugcugugcggcagaagcugcagcaccaccuacaagggcguguacgagcugcagacccuggagcuggacaugaccaaccugaacaugaccaugccccugagcugcaccaagaacaacagccaccacuacaucauggugggcaacgagaccggccuggagcugacccugaccaacaccagcaucaucaaccacaaguucugcaaccugagcgacgcccacaagaagaaccuguacaaccacgcccugaugagcaucaucagcaccuuccaccugagcauccccaacuucaaccaguacgaggccaugagcugcgacuucaacggcggcaagaucagcgugcaguacaaccugagccacagcuacgccguggacgccgccaaccacugcggcaccaucgccaacggcgugcugcagaccuucaugagaauggccuggggcggcagcuacaucgcccuggacagcggcaagggcaacugggacugcaucaugaccagcuaccaguaccugaucauccagaacaccaccugggaggaccacugccaguucagcagacccagccccaucggcuaccugggccugcugagccagagaaccagagacaucuacaucagcagaagacugcugggcaccuucaccuggacccugagcgacagcgagggcaacgagacccccggcggcuacugccugaccagauggaugcugaucgaggccgagcugaagugcuucggcaacaccgccguggccaagugcaacgagaagcacgacgaggaguucugcgacaugcugagacuguucgacuucaacaagcaggccaucagaagacugaagaccgaggcccaggccaacauccagcugaucaacaaggccgugaacgcccugaucaacgaccagcugaucaugaagaaccaccugagagacaucaugggcauccccuacugcaacuacagcaaguacugguaccugaaccacaccgugaccggcaagaccagccugcccagaugcuggcuggugagcaacggcagcuaccugaacgagacccacuucagcgacgacaucgagcagcaggccgacaacaugaucaccgagcugcugcagaaggaguacauggacagacagggcaagaccccccugggccugguggaccuguucguguucagcaccagcuucuaccugaucagcaucuuccugcaccuggugaagauccccacccacagacacgugaucggcaagcccugccccaagccccacagacugaaccacaugggcaucugcagcugcggccuguacaagcaccccggcgugcccgugaaguggaagagaugaggacuagucccuguucccagagcccacuuuuuuuucuuuuuuugaaauaaaauagccugucuuucagaucucaaaggcucuuuucagagccaccaaaaaaaaaaaaaaaaaaaaaaaaaaaaaaaaaaaaaaaaaaaaaaaaaaaaaaaaaaaaaaaaagaauu

SEQ ID NO: 14397 - RNA, 1733 nt, Artificial Sequence
  mRNA product Design a-2 (hSL-A64-N5) comprising derived and/or modified sequence from LASV(Nig08-A19;Clade III)__ADU56618__GPC (opt4)
aggagaguccgcucagccagguugcagaagcggcuuagcguguguccuaaucuucucucugcguguagguaggccugugccgcaaacaagcuuaccaugggccagaucgugaccuucuuccaggaggugccccacgugaucgaggaggugaugaacaucgugcugaucgcccugagcauccuggccauccugaagggccuguacaacaucgccaccugcggccugaucggccuggugaccuuccugcugcugagcggcagaagcugcagcaugaccuacaagggcguguacgagcugcagacccuggagcugaacaugaacacccugaacaugaccaugccccugagcugcaccaagaacaacagccaccacuacaucauggugggcaacgagaccggccuggagcugacccugaccaacaccagccugcugcaccacaaguucugcaaccugagcgacgcccacaagaagaaccuguacgaccacacccugaugagcaucaucagcaccuuccaccugagcauccccaacuucaaccaguacgaggccaugagcugcgacuucaacggcggcaagaucaccgugcaguacaaccugagccacagcuacgccaucgacgccgccaaccacugcggcaccguggccaacggcgugcugcagaccuucaugagaauggccuggggcggcagcuacaucgcccuggacagcggcagaggcaagugggacugcaucaugaccagcuaccaguaccugaucauccagaacaccaccugggaggaccacugccaguucagcagacccagccccaucggcuaccugggccugcugagccagagaaccagagacaucuacaucagcagaagacugcugggcaccuucaccuggacccugagcgacagcgagggcaacgagacccccggcggcuacugccugaccagauggaugcugaucgaggccgagcugaagugcuucggcaacaccgccguggccaagugcaacgagaagcacgacgaggaguucugcgacaugcugagacuguucgacuucaacaagcaggccaucagaagacugaaggccgaggcccagaugagcauccagcugaucaacaaggccgugaacgcccugaucaacgaccagcugaucaugaagaaccaccugagagacaucaugggcauccccuacugcaacuacagcaaguacugguaccugaaccacaccagcaccggcagaaccagccugcccagaugcuggcuggugagcaacggcagcuaccugaacgagacccacuucagcgacgacaucgagcagcaggccgacaacaugaucaccgagaugcugcagaaggaguaccuggacagacagggcaagaccccccugggccugguggaccuguucguguucagcaccagcuucuaccugaucagcaucuuccugcaccuggugaagauccccacccacagacacaucgugggcaagcccugccccaagccccacagacugaaccacaugggcaucugcagcugcggccuguacaagcagcccggcgugcccgugagauggaagagaugaggacuagucccuguucccagagcccacuuuuuuuucuuuuuuugaaauaaaauagccugucuuucagaucucaaaggcucuuuucagagccaccaaaaaaaaaaaaaaaaaaaaaaaaaaaaaaaaaaaaaaaaaaaaaaaaaaaaaaaaaaaaaaaaagaauu

SEQ ID NO: 14398 - RNA, 1736 nt, Artificial Sequence
  mRNA product Design a-2 (hSL-A64-N5) comprising derived and/or modified sequence from LASV(G1180-SLE-2010;Clade IV)__AIT17168__GPC (opt4)
aggagaguccgcucagccagguugcagaagcggcuuagcguguguccuaaucuucucucugcguguagguaggccugugccgcaaacaagcuuaccaugggccagaucgugaccuucuuccaggaggugccccacgugaucgaggaggugaugaacaucgugcugaucgcccugagcauccuggccgugcugaagggccuguacaacuucgccaccugcggccuggugggccugcugaccuuccugcugcugugcggcagaagcugcaccgccagcagauacaagggcguguacgagcugcagacccuggagcugaacauggagacccugaacaugaccaugccccugagcugcaccaagaacaacagccaccacuacaucauggugggcaacgagaccggccuggagcugacccugaccaacaccagcaucaucaaccacaaguucugcaaccugagcgacgcccacaagaagaaccuguacgaccacgcccugaugagcaucaucagcaccuuccaccugagcauccccaacuucaaccaguacgaggccaugagcugcgacuucaacggcggcaagaucagcgugcaguacaaccugagccacagcuacgccggcgacgccgccaaccacugcggcaccguggccaacggcgugcugcagaccuucaugagaauggccuggggcggcagcuacaucgcccuggacagcggccacggcagcugggacugcaucaugaccagcuaccaguaccugaucauccagaacaccaccugggaggaccacugccaguucagcagacccagccccaucggcuaccugggccugcugagccagagaaccagagacaucuacaucagcagaagacugcugggcaccuucaccuggacccugagcgacagcgagggcaaggacacccccggcggcuacugccugaccagauggaugcugaucgaggccgagcugaagugcuucggcaacaccgccguggccaagugcaacgagaagcacgacgaggaguucugcgacaugcugagacuguucgacuucaacaagcaggccauccagagacugaaggccgaggcccagaugagcauccagcugaucaacaaggccgugaacgcccugaucaacgaccagcugaucaugaagaaccaccugagagacaucaugggcauccccuacugcaacuacagcaaguacugguaccugaaccacaccaccaccggcaagaccagccugcccaagugcuggcuggugagcaacggcagcuaccugaacgagacccacuucagcgacgacaucgagcagcaggccgacaacaugaucaccgagaugcugcagaaggaguacauggagagacagggcaagaccccccugggccugguggaccuguucguguucagcaccagcuucuaccugaucagcaucuuccugcaccuggugaagauccccacccacagacacaucgugggcaagagcugccccaagccccacagacugaaccacaugggcaucugcagcugcggccuguacaagcagcccggcgugcccgugaaguggaagagaugaggacuagucccuguucccagagcccacuuuuuuuucuuuuuuugaaauaaaauagccugucuuucagaucucaaaggcucuuuucagagccaccaaaaaaaaaaaaaaaaaaaaaaaaaaaaaaaaaaaaaaaaaaaaaaaaaaaaaaaaaaaaaaaaagaauu

SEQ ID NO: 14399 - RNA, 1736 nt, Artificial Sequence
  mRNA product Design a-2 (hSL-A64-N5) comprising derived and/or modified sequence from LASV(G1442-SLE-2011;Clade IV)__AIT17180__GPC (opt4)
aggagaguccgcucagccagguugcagaagcggcuuagcguguguccuaaucuucucucugcguguagguaggccugugccgcaaacaagcuuaccaugggccagaucgugaccuucuuccaggaggugccccacgugaucgaggaggugaugaacaucgugcugaucgcccugagcauccuggccgugcugaagggccuguacaacguggccaccugcggccugaucggccuggugaccuuccugcugcugugcggcagaagcugcaccaccacccuguacaagggcguguacgagcugcagacccuggagcugaacauggagacccugaacaugaccaugccccugagcugcaccaagaacaacagccaccacuacaucagagugggcaacgagaccggccuggagcugacccugaccaacaccagcaucaucaaccacaaguucugcaaccugagcgacgcccacaagaagaaccuguacgaccacgcccugaugagcaucaucagcaccuuccaccugagcauccccaacuucaaccaguacgaggccaugagcugcgacuucaacggcggcaagaucagcgugcaguacaaccugagccacagcuacgccggcgacgccgccaaccacugcggcaccguggccaacggcgugcugcagaccuucaugagaauggccuggggcggcagcuacaucgcccuggacagcggcagaggcaacugggacugcaucaugaccagcuaccaguaccugaucauccagaacaccaccugggacgaccacugccaguucagcagacccagccccaucggcuaccugggccugcugagccagagaaccagagacguguacaucagcagaagacugcugggcaccuucaccuggacccugagcgacagcgagggcaaggacacccccggcggcuacugccugaccagauggaugcugaucgaggccgagcugaagugcuucggcaacaccgccguggccaagugcaacgagaagcacgacgaggaguucugcgacaugcugagacuguucgacuucaacaagcaggccauccagagacugaaggccgaggcccagaugagcauccagcugaucaacaaggccgugaacgcccugaucaacgaccagcugaucaugaagaaccaccugagagacaucaugggcauccccuacugcaacuacagcaaguacugguaccugaacaacaccgccaccggcaagaccagccugcccaagugcuggcugaucagcaacggcagcuaccugaacgagacccacuucagcgacgacaucgagcaggaggccgacaacaugaucaccgagaugcugcagaaggaguacauggagagacagggcaagaccccccugggccugguggaccuguucguguucagcaccagcuucuaccugaucagcaucuuccugcaccuggugaagauccccacccacagacacaucgugggcaagagcugccccaagccccacagacugaaccacaugggcaucugcagcugcggccuguacaagcagcccggcgugcccgugagauggaagagaugaggacuagucccuguucccagagcccacuuuuuuuucuuuuuuugaaauaaaauagccugucuuucagaucucaaaggcucuuuucagagccaccaaaaaaaaaaaaaaaaaaaaaaaaaaaaaaaaaaaaaaaaaaaaaaaaaaaaaaaaaaaaaaaaagaauu

SEQ ID NO: 14400 - RNA, 1736 nt, Artificial Sequence
  mRNA product Design a-2 (hSL-A64-N5) comprising derived and/or modified sequence from LASV(G3010-SLE-2013;Clade IV)__AIT17344__GPC (opt4)
aggagaguccgcucagccagguugcagaagcggcuuagcguguguccuaaucuucucucugcguguagguaggccugugccgcaaacaagcuuaccaugggccagaucgugaccuucuuccaggaggugccccacgugaucgaggaggugaugaacaucgugcugaucgcccugagcauccuggccgugcugaagggccuguacaacuucgccaccugcggccuggugggccuggugaccuuccugcugcugugcggcagaagcugcaccaccagccuguacaagggcguguacgagcugcagacccuggagcugaacauggagacccugaacaugaccaugccccugagcugcaccaagaacaacagccaccacuacaucauggugggcaacgagaccggccuggagcugacccugaccaacaccagcaucaucaaccacaaguucugcaaccugagcgacgcccacaagaagaaccuguacaaccacgcccugaugagcaucaucagcaccuuccaccugagcauccccaacuucaaccaguacgaggccaugagcugcgacuucaacggcggcaagaucagcgugcaguacaaccugagccacagcuacgccggcgacgccgccagccacugcggcaccguggccaacggcgugcugcagaccuucaugagaauggccuggggcggcagcuacaucgcccuggacagcggcuacggcaagugggacugcaucaugaccagcuaccaguaccugaucauccagaacaccaccugggaggaccacugccaguucagcagacccagccccaucggcuaccugggccugcugagccagagaaccagagacaucuacaucagcagaagacugcugggcaccuucaccuggacccugagcgacagcgagggcaaggacacccccggcggcuacugccugaccagauggaugcugaucgaggccgagcugaagugcuucggcaacaccgccguggccaagugcaacgagaagcacgacgaggaguucugcgacaugcugagacuguucgacuucaacaagcaggccauccagagacugaagaccgaggcccagaugagcauccagcugaucaacaaggccgugaacgcccugaucaacgaccagcugaucaugaagaaccaccugagagacaucaugggcauccccuacugcaacuacagcaaguacugguaccugaaccacaccaccaccggcaagaccagccugcccaagugcuggcuggugagcaacggcagcuaccugaacgagacccacuucagcgacgacaucgagcagcaggccgacaacaugaucaccgagaugcugcagaaggaguacauggagagacagggcaagaccccccugggccugguggaccuguucguguucagcaccagcuucuaccugaucagcaucuuccugcaccuggugaagauccccacccacagacacaucgugggcaagagcugccccaagccccacagacugaaccacaugggcaucugcagcugcggccuguacaagcagcccggcgugcccgugagauggaagagaugaggacuagucccuguucccagagcccacuuuuuuuucuuuuuuugaaauaaaauagccugucuuucagaucucaaaggcucuuuucagagccaccaaaaaaaaaaaaaaaaaaaaaaaaaaaaaaaaaaaaaaaaaaaaaaaaaaaaaaaaaaaaaaaaagaauu

SEQ ID NO: 14401 - RNA, 1736 nt, Artificial Sequence
  mRNA product Design a-2 (hSL-A64-N5) comprising derived and/or modified sequence from LASV(G502-SLE-2009;Clade IV)__AIT17126__GPC (opt4)
aggagaguccgcucagccagguugcagaagcggcuuagcguguguccuaaucuucucucugcguguagguaggccugugccgcaaacaagcuuaccaugggccagaucgugaccuucuuccaggaggugccccacgugaucgaggaggugaugaacaucgugcugaucgcccugagcauccuggccgugcugaagggccuguacaacuucgccaccugcggccuggugggccugcugaccuuccugcugcugugcggcagaagcugcaccaccggccuguacaagggcguguacgagcugcagacccuggagcugaacauggagacccugaacaugaccaugccccugagcugcaccaagaacaacagccaccacuacaucauggugggcaacgagaccggccuggagcugacccugaccaacaccagcaucaucaaccacaaguucugcaaccugagcgacgcccacaagaagaaccuguacgaccacgcccugaugagcaucaucagcaccuuccaccugagcauccccaacuucaaccaguacgaggccaugagcugcgacuucaacggcggcaagaucagcgugcaguacaaccugagccacagcuacgccggcgacgccgccgaccacugcggcaccguggccaacggcgugcugcagaccuucaugagaauggccuggggcggcagcuacaucgcccuggacagcggcagaggcagaugggacugcaucaugaccagcuaccaguaccugaucauccagaacaccaccugggaggaccacugccaguucagcagacccagccccaucggcuaccugggccugcugagccagagaaccagagacaucuacaucagcagaagacugcugggcaccuucaccuggacccugagcgacagcgagggcaaggacacccccggcggcuacugccugaccagauggaugcugaucgaggccgagcugaagugcuucggcaacaccgccguggccaagugcaacgagaagcacgacgaggaguucugcgacaugcugagacuguucgacuucaacaagcaggccauccagagacugaaggccgaggcccagaugagcauccagcugaucaacaaggccgugaacgcccugaucaacgaccagcuggugaugaagaaccaccugagagacaucaugggcauccccuacugcaacuacagcagauacugguaccugaaccacaccaccaccggcagaaccagccugcccaagugcuggcuggugagcaacggcagcuaccugaacgagacccacuucagcgacgacaucgagcagcaggccgacaacaugaucaccgagaugcugcagaaggaguacauggagagacagggcaagaccccccugggccugguggaccuguucguguucagcaccagcuucuaccugaucagcaucuuccugcaccuggugaagauccccacccacagacacaucgugggcaagagcugccccaagccccacagacugaaccacaugggcaucugcagcugcggccuguacaagcagcccggcgugcccgugaaguggaagagaugaggacuagucccuguucccagagcccacuuuuuuuucuuuuuuugaaauaaaauagccugucuuucagaucucaaaggcucuuuucagagccaccaaaaaaaaaaaaaaaaaaaaaaaaaaaaaaaaaaaaaaaaaaaaaaaaaaaaaaaaaaaaaaaaagaauu

SEQ ID NO: 14402 - RNA, 1736 nt, Artificial Sequence
  mRNA product Design a-2 (hSL-A64-N5) comprising derived and/or modified sequence from LASV(G733-SLE-2010;Clade IV)__AIT17154__GPC (opt4)
aggagaguccgcucagccagguugcagaagcggcuuagcguguguccuaaucuucucucugcguguagguaggccugugccgcaaacaagcuuaccaugggccagaucgugaccuucuuccaggaggugccccacgugaucgaggaggugaugaacaucgugcugaucgcccugagcauccuggccgugcugaagggccuguacaacuucgccaccugcggcaucgugggccuggugagcuuccugcugcugugcggcagaagcugcaccaccagccuguacaagggcguguacgagcugcagacccuggagcugaacauggagacccugaacaugaccaugccccugagcugcaccaagaacaacagccaccacuacaucauggugggcaacgagaccggccuggagcugacccugaccaacaccagcaucaucaaccacaaguucugcaaccugagcgacgcccacaagaagaaccuguacgaccacgcccugaugagcaucaucagcaccuuccaccugagcauccccaacuucaaccaguacgaggccaugagcugcgacuucaacggcggcaagaucagcgugcaguacaaccugagccacagcuacgccggcgacgccgccaaccacugcggcaccaucgccaacggcgugcugcagaccuucaugagaauggccuggggcggcagcuacaucgcccuggacagcggcagagacagaugggacugcaucaugaccagcuaccaguaccugaucauccagaacaccaccugggaggaccacugccaguucagcagacccagccccaucggcuaccugggccugcugagccagagaaccagagacaucuacaucagcagaagacugcugggcaccuucaccuggacccugagcgacagcgagggcaaggacacccccggcggcuacugccugaccagauggaugcugaucgaggccgagcugaagugcuucggcaacaccgccguggccaagugcaacgagaagcacgacgaggaguucugcgacaugcugagacuguucgacuucaacaagcaggccauccagagacugaaggccgaggcccagaugagcauccagcugaucaacaaggccgugaacgcccugaucaacgaccagcugaucaugaagaaccaccugagagacaucaugggcauccccuacugcaacuacagcaaguacugguaccugaaccacaccaccaccggcaagaccagccugcccaagugcuggcuggugagcaacggcagcuaccugaacgagacccacuucagcgacgacaucgagcagcaggccgacaacaugaucaccgagaugcugcagaaggaguacauggagagacagggcaagaccccccugggccugguggaccuguucguguucagcaccagcuucuaccugaucagcaucuuccugcaccuggugaagauccccacccacagacacguggugggcaagagcugccccaagccccacagacugaaccacaugggcaucugcagcugcggccuguacggccagcccggcgugcccgugaaguggaagagaugaggacuagucccuguucccagagcccacuuuuuuuucuuuuuuugaaauaaaauagccugucuuucagaucucaaaggcucuuuucagagccaccaaaaaaaaaaaaaaaaaaaaaaaaaaaaaaaaaaaaaaaaaaaaaaaaaaaaaaaaaaaaaaaaagaauu

SEQ ID NO: 14403 - RNA, 1736 nt, Artificial Sequence
  mRNA product Design a-2 (hSL-A64-N5) comprising derived and/or modified sequence from MOPV/LASV reassortant(IGS-1;Clade IV)__AFY05576__GPC (opt4)
aggagaguccgcucagccagguugcagaagcggcuuagcguguguccuaaucuucucucugcguguagguaggccugugccgcaaacaagcuuaccaugggccagaucgugaccuucuuccaggaggugccccacgugaucgaggaggugaugaacaucgugcugaucgcccugagcgugcuggccgugcugaagggccuguacaacuucgccaccugcggccuggugggccuggugaccuuccugcugcugugcggcagaagcugcaccaccagccuguacaagggcguguacgagcugcagacccuggagcugaacauggagacccugaacaugaccaugccccugagcugcaccaagaacaacagccaccacuacaucauggugggcaacgagaccggccuggagcugacccugaccaacaccagcaucaucaaccacaaguucugcaaccugagcgacgcccacaagaagaaccuguacgaccacgcccugaugagcaucaucagcaccuuccaccugagcauccccaacuucaaccaguacgaggccaugagcugcgacuucaacggcggcaagaucagcgugcaguacaaccugagccacagcuacgccggcgacgccgccaaccacugcggcaccguggccaacggcgugcugcagaccuucaugagaauggccuggggcggcagcuacaucgcccuggacagcggcagaggcaacugggacugcaucaugaccagcuaccaguaccugaucauccagaacaccaccugggaggaccacugccaguucagcagacccagccccaucggcuaccugggccugcugagccagagaaccagagacaucuacaucagcagaagacugcugggcaccuucaccuggacccugagcgacagcgagggcgaggacacccccggcggcuacugccugaccagauggaugcugaucgaggccgagcugaagugcuucggcaacaccgccguggccaagugcaacgagaagcacgacgaggaguucugcgacaugcugagacuguucgacuucaacaagcaggccauccagagacugaaggccgaggcccagaugagcauccagcugaucaacaaggccgugaacgcccugaucaacgaccagcugaucaugaagaaccaccugagagacaucaugggcauccccuacugcaacuacagcaaguacugguaccugaaccacaccaccaccggcagaaccagccugcccaagugcuggcuggugagcaacggcagcuaccugaacgagacccacuucagcgacgacaucgagcagcaggccgacaacaugaucaccgagaugcugcagaaggaguacauggagagacagggcaagaccccccugggccugguggaccuguucguguucagcaccagcuucuaccugaucagcaucuuccugcaccuggugaagauccccacccacagacacaucgugggcaagagcugccccaagccccacagacugaaccacaugggcaucugcagcugcggccuguacaagcagcccggcgugcccgugaaguggaagagaugaggacuagucccuguucccagagcccacuuuuuuuucuuuuuuugaaauaaaauagccugucuuucagaucucaaaggcucuuuucagagccaccaaaaaaaaaaaaaaaaaaaaaaaaaaaaaaaaaaaaaaaaaaaaaaaaaaaaaaaaaaaaaaaaagaauu

SEQ ID NO: 14404 - RNA, 1736 nt, Artificial Sequence
  mRNA product Design a-2 (hSL-A64-N5) comprising derived and/or modified sequence from LASV(LM765-SLE-2012;Clade IV)__AIT17814__GPC (opt4)
aggagaguccgcucagccagguugcagaagcggcuuagcguguguccuaaucuucucucugcguguagguaggccugugccgcaaacaagcuuaccaugggccagaucgugaccuucuuccaggaggugccccacgugaucgaggaggugaugaacaucgugcugaucgcccugagcauccuggccgugcugaagggccuguacaacuucgccaccugcggccuggugggccuggugaccuuccugcugcugugcggcagaagcugcaccaccagccuguacaagggcguguacgagcugcagacccuggagcugaacauggagacccugaacaugaccaugccccugagcugcaccaagaacaacagccaccacuacaucauggugggcaacgagaccggccuggagcugacccugaccaacaccagcaucaucgaccacaaguucugcaaccugagcgacgcccacagaaagaaccuguacgaccacgcccugaugagcaucaucagcaccuuccaccugagcauccccaacuucaaccaguacgaggccaugagcugcgacuucaacggcggcaagaucagcgugcaguacaaccugagccacagcuacgccaaggacgccgccgaccacugcggcaccguggccaacggcgugcugcagaccuucaugagaauggccuggggcggcagcuacaucgcccuggacagcggcagaggcagaugggacugcaucaugaccagcuaccaguaccugaucauccagaacaccaccugggaggaccacugccaguucagcagacccagccccaucggcuaccugggccugcugagccagagaaccagagacaucuacaucagcagaagacugcugggcaccuucaccuggacccugagcgacagcgagggcaaggacacccccggcggcuacugccugaccagauggaugcugaucgaggccgagcugaagugcuucggcaacaccgccguggccaagugcaacgagaagcacgacgaggaguucugcgacaugcugagacuguucgacuucaacaagcaggccauccagagacugaaggccgaggcccagaugagcauccagcugaucaacaaggccgugaacgcccugaucaacgaccagcugaucaugaagaaccaccugagagacaucaugggcauccccuacugcaacuacagcaaguacugguaccugaaccacaccaccaccggcaagaccagccugcccaagugcuggcuggugagcaacggcagcuaccugaacgagacccacuucagcgacgacaucgagcagcaggccgacaacaugaucaccgagaugcugcagaaggaguacauggagagacagggcaagaccccccugggccugguggaccuguucguguucagcaccagcuucuaccugaucagcaucuuccugcaccuggugaagauccccacccacagacacaucgugggcaagcccugccccaagccccacagacugaaccacaugggcaucugcagcugcggccuguacaagcagcccggcgugcccgugaaguggaagagaugaggacuagucccuguucccagagcccacuuuuuuuucuuuuuuugaaauaaaauagccugucuuucagaucucaaaggcucuuuucagagccaccaaaaaaaaaaaaaaaaaaaaaaaaaaaaaaaaaaaaaaaaaaaaaaaaaaaaaaaaaaaaaaaaagaauu

SEQ ID NO: 14405 - RNA, 1736 nt, Artificial Sequence
  mRNA product Design a-2 (hSL-A64-N5) comprising derived and/or modified sequence from LASV(LM776-SLE-2012;Clade IV)__AIT17824__GPC (opt4)
aggagaguccgcucagccagguugcagaagcggcuuagcguguguccuaaucuucucucugcguguagguaggccugugccgcaaacaagcuuaccaugggccagaucgugaccuucuuccaggaggugccccacgugaucgaggaggugaugaacaucgugcugaucgcccugagcauccuggccgugcugaagggccuguacaacuucgccaccugcggccuggugggccuggugaccuuccugcugcugugcggcagaagcugcaccaccagcguguacaagggcguguacgagcugcagacccuggagcugaacauggagacccugaacaugaccaugccccugagcugcaccaagaacaacagccaccacuacaucauggugggcaacgagaccggccuggagcugacccugaccaacaccagcaucaucaaccacaaguucugcaaccugagcgacgcccacaagaagaaccuguacgaccacgcccugaugagcaucaucagcaccuuccaccugagcauccccaacuucaaccaguacgaggccaugagcugcgacuucaacggcggcaagaucagcgugcaguacaaccugagccacagcuacgccggcgacgccgccaaccacugcggcaccguggccaacggcgugcugcagaccuucaugagaauggccuggggcggcagcuacaucgcccuggacagcggccacggcaagugggacugcaucaugaccagcuaccaguaccugaucauccagaacaccaccugggaggaccacugccaguucagcagacccagccccaucggcuaccugggccugcugagccagagaaccagagacaucuacaucagcagaagacugcugggcaccuucaccuggacccugagcgacagcgagggcaaggacacccccggcggcuacugccugaccagauggaugcugaucgaggccgagcugaagugcuucggcaacaccgccguggccaagugcaacgagaagcacgacgaggaguucugcgacaugcugagacuguucgacuucaacaagcaggccauccagagacugaaggccgaggcccagaugagcauccagcugaucaacaaggccgugaacgcccugaucaacgaccagcugaucaugaagaaccaccugagagacaucaugggcauccccuacugcaacuacagcaaguacugguaccugaaccacaccaccaccggcaagaccagccugcccaagugcuggcuggugagcaacggcagcuaccugaacgagacccacuucagcgacgacaucgagcagcaggccgacaacaugaucaccgagaugcugcagaaggaguacauggagagacagggcaagaccccccugggccugguggaccuguucguguucagcaccagcuucuaccugaucagcaucuuccugcaccuggugaagauccccacccacagacacaucgugggcaagagcugccccaagccccacagacugaaccacaugggcaucugcagcugcggccuguacaagcagcccggcgugcccgugagauggaagagaugaggacuagucccuguucccagagcccacuuuuuuuucuuuuuuugaaauaaaauagccugucuuucagaucucaaaggcucuuuucagagccaccaaaaaaaaaaaaaaaaaaaaaaaaaaaaaaaaaaaaaaaaaaaaaaaaaaaaaaaaaaaaaaaaagaauu

SEQ ID NO: 14406 - RNA, 1736 nt, Artificial Sequence
  mRNA product Design a-2 (hSL-A64-N5) comprising derived and/or modified sequence from LASV(Mad39;Clade IV)__ANH09722__GPC (opt4)
aggagaguccgcucagccagguugcagaagcggcuuagcguguguccuaaucuucucucugcguguagguaggccugugccgcaaacaagcuuaccaugggccagaucgugaccuucuuccaggaggugccccacgugaucgaggaggugaugaacaucgugcugaucgcccugagcauccuggccgugcugaagggccuguacaacguggccaccugcggccugaucggccuggugaccuuccugcugcugugcggcagaagcugcaccaccacccuguacaagggcguguacgagcugcaggcccuggagcugaacauggagacccugaacaugaccaugccccugagcugcaccaagaacaacagccaccacuacaucagagugggcaacgagaccggccuggagcugacccugaccaacaccagccugaucaaccacaaguucugcaaccugagcgacgcccacaagaagaaccuguacgaccacgcccugaugagcaucaucagcaccuuccaccugagcauccccaacuucaaccaguacgaggccaugagcugcgacuucaacgacggcaagaucagcgugcaguacaaccugagccacaccuacgccggcgacaccgccaaccacugcggcaccguggccaacggcgugcugcagaccuucaugagaauggccuggggcggcagcuacaucgcccuggacagcggcagaggcggcugggacugcaucaugaccagcuaccaguaccugaucauccagaacaccaccugggaggaccacugccaguucagcagacccagccccaucggcuaccugggccugcugagccagagaaccagagacaucuacaucagcagaagacugcugggcaccuucaccuggacccugagcgacagcgagggcaaggacacccccggcggcuacugccugaccagauggaugcugaucgaggccgagcugaagugcuucggcaacaccgccguggccaagugcaacgagaagcacgacgaggaguucugcgacaugcugagacuguucgacuucaacaagcaggccauccagagacugaaggccgaggcccagaugagcauccagcugaucaacaaggccgugaacgcccugaucaacgaccagcugaucaugaagaaccaccugagagacaucaugggcauccccuacugcaacuacagcaaguacugguaccugaaccacaccgugaccggcaagaccagccugcccaagugcuggcuggugagcaacggcagcuaccugaacgagacccacuucagcgacgacaucgagcagcaggccgacaacaugaucaccgagaugcugcagaaggaguacauggagagacagggcaagaccccccugggccugguggaccuguucguguucagcaccagcuucuaccugaucagcaucuuccugcaccuggugaagauccccacccacagacacguggugggcaagcccugccccaagccccacagacugaaccacaugggcaucugcagcugcggcuucuacaagcagcccggcgugcccgugagauggaagagaugaggacuagucccuguucccagagcccacuuuuuuuucuuuuuuugaaauaaaauagccugucuuucagaucucaaaggcucuuuucagagccaccaaaaaaaaaaaaaaaaaaaaaaaaaaaaaaaaaaaaaaaaaaaaaaaaaaaaaaaaaaaaaaaaagaauu

SEQ ID NO: 14407 - RNA, 1736 nt, Artificial Sequence
  mRNA product Design a-2 (hSL-A64-N5) comprising derived and/or modified sequence from LASV(Z0947-SLE-2011;Clade IV)__AIT17840__GPC (opt4)
aggagaguccgcucagccagguugcagaagcggcuuagcguguguccuaaucuucucucugcguguagguaggccugugccgcaaacaagcuuaccaugggccagaucgugaccuucuuccaggaggugccccacgugaucgaggaggugaugaacaucgugcugaucgcccugagcauccuggccgugcugaagggccuguacaacuucgccaccugcggccuggugggccuggugaccuuccugcugcugugcggcagaagcugcaccaucagccuguacaagggcguguacgagcugcagacccuggagcugaacauggagacccugaacaugaccaugccccugagcugcaccaagaacaacagccaccacuacaucauggugggcaacgagaccggccuggagcugacccugaccaacaccagcaucaucaaccacaaguucugcaaccugagcgacgcccacaagaagaaccuguacgaccacgcccugaugagcaucaucagcaccuuccaccugagcauccccaacuucaaccaguacgaggccaugagcugcgacuucaacggcggcaagaucagcgugcaguacaaccugagccacagcuacgccggcgacgccgccaaccacugcggcaccguggccaacggcgugcugcagaccuucaugagaauggccuggggcggcagcuacaucgcccuggacagcggcagagacagaugggacugcaucaugaccagcuaccaguaccugaucauccagaacaccaccugggaggaccacugccaguucagcagacccagccccaucggcuaccugggccugcugagccagagaaccagagacaucuacaucagcagaagacugcugggcaccuucaccuggacccugagcgacagcgagggcaaggacacccccggcggcuacugccugaccagauggaugcugaucgaggccgagcugaagugcuucggcaacaccgccguggccaagugcaacgagaagcacgacgaggaguucugcgacaugcugagacuguucgacuucaacaagcaggccauccagagacugaaggccgaggcccagaugagcauccagcugaucaacaaggccgugaacgcccugaucaacgaccagcugaucaugaagaaccaccugagagacaucaugggcauccccuacugcaacuacagcaaguacugguaccugaaccacaccaccaccggcaagaccagccugcccaagugcuggcuggugagcaacggcagcuaccugaacgagacccacuucagcgacgacaucgagcagcaggccgacaacaugaucaccgagaugcugcagaaggaguacauggagagacagggcaagaccccccugggccugguggaccuguucguguucagcaccagcuucuaccugaucagcaucuuccugcaccuggugaagauccccacccacagacacaucgugggcaagcccugccccaagccccacagacugaaccacaugggcaucugcagcugcggccuguacaagcagcccggcgugcccgugaaguggaagagaugaggacuagucccuguucccagagcccacuuuuuuuucuuuuuuugaaauaaaauagccugucuuucagaucucaaaggcucuuuucagagccaccaaaaaaaaaaaaaaaaaaaaaaaaaaaaaaaaaaaaaaaaaaaaaaaaaaaaaaaaaaaaaaaaagaauu

SEQ ID NO: 14408 - RNA, 1736 nt, Artificial Sequence
  mRNA product Design a-2 (hSL-A64-N5) comprising derived and/or modified sequence from LASV(Josiah;Clade IV)__NP_694870__GPC (opt5)
aggagaguccgcucagccagguugcagaagcggcuuagcguguguccuaaucuucucucugcguguagguaggccugugccgcaaacaagcuuaccaugggccagaucgugaccuucuuucaagaggucccccacguuauugaagaggugaugaacaucgugcugauugcccucagcguccuggcugugcuuaaggggcuguacaauuucgccacaugcggacucguuggccuggugacguuucuucugcucugugggagauccugcaccacaucucuguauaaaggagucuacgaacugcagacccucgagcugaacauggaaacacuuaauaugaccaugccucugagcuguacaaagaacaauucccaucacuauaucauggugggcaacgagaccgggcucgagcugacgcuuaccaauacaucuauuaucaaccauaaauucugcaaucugagcgacgcgcacaagaaaaaccucuacgaucaugcucugauguccaucauuucuaccuuucaccugagcaucccgaauuucaaccaguaugaagccauguccugugacuuuaauggaggcaagauuagcguucaguacaaccucucucacuccuaugccggcgaugcugccaaucauugcgggacaguggcuaacggaguccugcaaaccuucaugcggauggccuggggcgggagcuacaucgcgcuugacucuggacgcggcaacugggauuguauuaugacguccuaccaguaucugaucauucagaauacaaccugggaggaccacugccaguuuagcagacccucuccuaucggguaccucggacugcuuucccaacggacacgcgauaucuauauuagcagacggcugcucggcaccuucaccuggacacuguccgacucugaaggcaaggauacgcccgggggauacugucugacccgcuggaugcucaucgaggccgagcugaaaugcuuuggcaacacagcuguggccaaguguaaugaaaaacaugacgaggaguucugcgauaugcuuagacuguuugacuucaacaagcaggcuauucagcggcucaaagccgaagcgcagaugagcauccaacugauuaauaaggccgugaacgcucuuaucaaugaucagcugaucaugaagaaccaccuccgcgacauuauggggaucccuuauugcaauuacuccaaauauugguaccugaaccacaccacaaccggaagaacgagccugcccaaguguuggcucgucucuaauggcuccuaccugaacgaaacacauuucagcgacgauauugagcagcaagccgacaauaugaucaccgagaugcuucagaaagaauauauggagcggcaggggaagaccccucugggacucguugaucuguuuguguucucuaccagcuuuuaccugauuuccaucuuccuucaccucgugaaaaucccgacacaucgccacauugucggcaagucuugccccaaaccucauagacugaaccacaugggcaucuguagcugcgggcuguauaagcagcccggagugccuguuaaguggaaacggugaggacuagucccuguucccagagcccacuuuuuuuucuuuuuuugaaauaaaauagccugucuuucagaucucaaaggcucuuuucagagccaccaaaaaaaaaaaaaaaaaaaaaaaaaaaaaaaaaaaaaaaaaaaaaaaaaaaaaaaaaaaaaaaaagaauu

SEQ ID NO: 14409 - RNA, 1733 nt, Artificial Sequence
  mRNA product Design a-2 (hSL-A64-N5) comprising derived and/or modified sequence from LASV(LP;Clade I)__AAF86701__GPC (opt5)
aggagaguccgcucagccagguugcagaagcggcuuagcguguguccuaaucuucucucugcguguagguaggccugugccgcaaacaagcuuaccaugggccagaucauuaccuucuuucaagaggugccccacgucaucgaagagguuaugaacauugugcugaucgcccucagccugcuugcuauucugaaggggcucuacaauaucgccacaugcggaaucauuggccugguggcguuccuuuuucugugugggaaauccugcucucucacgcugaagggaggcuaugaacugcagacccucgagcugaacauggaaacacuuaauaugaccaugccucugagcuguaccaaaaacuccucucaucacuacaucagagucgggaaugagacaggacucgagcugacacuuaccaacacgagcauuaucaaucauaaguucugcaaccuguccgacgcucacaaaaagaaucucuaugaucaugcccugaugucuauuaucagcaccuuucaccuguccauuccgaacuucaaucaguacgaagccaugagcugugacuuuaacggcggcaagaucucugugcaguauaaucucucccacagcuacgcuggggaugccgcugagcauugcggaacaguugccaacggcgugcugcaaaccuucaugcggauggcguggggagggcgcuauaucgcccuugacucuggcaaagggaauugggauuguauuaugacauccuaccaguaccugaucauucagaacaccacgugggaagaccacugccaguuuagcagacccucuccuaucggauaucucggccugcuuucccaacggacacgcgauauuuacaucagcagacggcugcucggcaccuucacauggacccuguccgacucugaggggaacgagacccccggaggcuauugucugacacgcuggaugcucaucgaagcugagcugaagugcuuugggaauacggccgucgcuaaauguaacgaaaagcaugaugaggaguucugcgacaugcuuagacuguuugauuucaauaaacaggccauucggcgccucaaggcggaagcccagaugagcauccagcugauuaacaaggcugugaaugcccuuaucaacgaccaacugauuaugaaaaaucaccucagagauaucaugggaaucccuuacugcaacuauuccaaguacugguaucugaaucacaccagcucuggccggacaucccugcccaaauguuggcucauuagcaacgggucuuaccugaaugagacccaguucagcgacgacaucgaacagcaagcugauaacaugauuacagagaugcuucagaaggaauacaucgagcgccagggaaaaaccccucugggccucguugacauuuuuaucuucuccacgucuuuuuaucugauuagcaucuuccugcaucuuaucaagauuccgacacacagacauaucgugggcaaacccugcccuaagccccaccggcucaaucauaugggggucuguuccugcggacuguacaagcacccuggcgugcccaccaaauggaagcgcugaggacuagucccuguucccagagcccacuuuuuuuucuuuuuuugaaauaaaauagccugucuuucagaucucaaaggcucuuuucagagccaccaaaaaaaaaaaaaaaaaaaaaaaaaaaaaaaaaaaaaaaaaaaaaaaaaaaaaaaaaaaaaaaaagaauu

SEQ ID NO: 14410 - RNA, 1733 nt, Artificial Sequence
  mRNA product Design a-2 (hSL-A64-N5) comprising derived and/or modified sequence from LASV(803213;Clade II)__AAF86703__GPC (opt5)
aggagaguccgcucagccagguugcagaagcggcuuagcguguguccuaaucuucucucugcguguagguaggccugugccgcaaacaagcuuaccaugggccagaucauuaccuucuuucaagaggugccccacgucaucgaagagguuaugaacauugugcugaucgcccucagccugcuugcuauucugaaggggaucuacaauguggccacaugcggacucuucggccugaucuccuuucuucugcucugugggagaucuugcagcgucacguauaaaggaguguacgaacugcagacccuggagcucaacauggcgaaucugaacaugacaaugccucuuuccuguaccaagaauaacucucaucacuauauuaugguuggcaaugaaacagggcuggagcucacccugacaaacaccagcaucauuaaucauaaauucugcaaccuuuccgacgcucacaagaaaaaucuguacgaucaugcccucaugucuaucauuagcacguuucaccuguccaucccgaacuucaaucaguaugaggccaugagcugugacuuuaacggaggcaagauuucugugcaguacaaucugucccacagcuucgcugucgaugccgcuaaccauugcggcaccaucgccaacggggugcuccaaacauuuaugcggauggcguggggaggcucuuauaucgcccuggacuccgggaagggaaauugggauuguauuaugaccagcuaccaguaccuuaucauucagaacacaaccugggaagaccacugccaguucucucgccccuccccuaucggcuaucuggggcuccugagccaaagaacgcgggauauuuacaucucccgcagacuucugggaacauuuaccuggacacucucugacagcgagggcaaugaagcucccggcggguauugucugacccgguggaugcugaucgaggccgagcucaaaugcuucggaaacaccgcuguugccaaguguaaugaaaaacaugaugaggaauuuugcgacaugcugcgccuuuucgauuucaacaagcaggcgauuaaaagacugaagacagaggcccagauguccauccagcucauuaauaaggcugugaacgcccugaucaaugaccaacuuauuaugaaaaaccaucugcgggauaucaugggcaucccuuacugcaauuauagccgcuacugguaucucaaccacacggucaccgggaagacaucucugcccagauguuggcugguguccaauggaagcuaccucaacgaaacccacuuuucugacgacauugagcagcaggcugauaauaugaucacagagaugcugcaaaaagaauacauggaccggcagggcaagaccccucuugggcugguggaucucuucgucuuuagcacguccuucuaucugauuucuaucuuucugcaccuuguuaaaauuccgacacaucgccacaucgugggaaagcccugcccuaaaccccauagacucaaccacaugggcauuuguagcugcggccuguacaagcacccuggggugcccgucaaguggaaacggugaggacuagucccuguucccagagcccacuuuuuuuucuuuuuuugaaauaaaauagccugucuuucagaucucaaaggcucuuuucagagccaccaaaaaaaaaaaaaaaaaaaaaaaaaaaaaaaaaaaaaaaaaaaaaaaaaaaaaaaaaaaaaaaaagaauu

SEQ ID NO: 14411 - RNA, 1733 nt, Artificial Sequence
  mRNA product Design a-2 (hSL-A64-N5) comprising derived and/or modified sequence from LASV(GA391;Clade III)__CAA36645__GPC (opt5)
aggagaguccgcucagccagguugcagaagcggcuuagcguguguccuaaucuucucucugcguguagguaggccugugccgcaaacaagcuuaccaugggccagaucgugaccuucuuucaagaggucccccacguuauugaagaggugaugaacaucgugcugauugcccucagcauccuggcuauucuuaaggggcuguacaaugucgccacaugcggacucaucggccuggugacguuccuucugcucuccgggagaucuuguagccugaucuauaaaggaaccuacgaacugcagacacucgagcugaacauggaaacccuuaauaugacaaugccucuguccugcaccaagaacaauucucaucacuauauucggguuggcaacgagacagggcucgagcugacccuuacgaauaccagcauccugaaccauaaauuuuguaaucucuccgacgcgcacaagcgcaaccuguacgaucauucucugaugagcauuaucuccacauuccaccucagcauuccgaauuuuaaccaguaugaagcuaugucuugcgacuucaauggaggcaaaaucaccgugcaguacaaccugucccacagcuuugccgucgaugccgcuggccauugugggacacuugccaauggagugcugcaaaccuucaugagaauggcuuggggcgggucuuauauugcccucgacuccggacggggcaacugggauugcaucaugacgagcuaccaguaccugaucauucagaacacaaccugggacgaucacugucaguuuucucgccccuccccuaucggguaucuuggacugcucagccaaagaacacgggacauuuacaucucccgcagacugcugggcaccuucaccuggacacucucugauagcgagggcaaugaaacgcccgggggauauugccugacccgguggaugcuuauugaggcggagcugaaguguuuuggcaacacagccguugcuaagugcaaugaaaaacaugacgaggaguucugugauaugcuccgccuguuugacuucaacaagcaggccaucagacggcuuaaaaccgaagcucagauguccauccagcugauuaauaaggccgugaacgcgcucaucaaugaucaacugauuaugaaaaaccaucugcgcgacaucauggggauuccuuacugcaauuauagcagauacugguaucucaaccacacaucuaccggaaagacgucccugccccggugcuggcuuaucagcaauggcucuuaccugaacgaaacaaaguucagcgacgauaucgagcagcaggccgacaauaugauuaccgagaugcuccaaaaagaauacaucgaucgccaggggaagaccccucugggacuggucgaccuuuuuguguucuccacaucuuuuuaucucauuagcaucuuccugcaccuggugaaaauuccgacccacagacauaucgucggcaagcccuguccuaaaccccaccggcucaaccauaugggcauuugcuccugugggcuguacaagcagccuggaguucccgugagauggaaacgcugaggacuagucccuguucccagagcccacuuuuuuuucuuuuuuugaaauaaaauagccugucuuucagaucucaaaggcucuuuucagagccaccaaaaaaaaaaaaaaaaaaaaaaaaaaaaaaaaaaaaaaaaaaaaaaaaaaaaaaaaaaaaaaaaagaauu

SEQ ID NO: 14412 - RNA, 1736 nt, Artificial Sequence
  mRNA product Design a-2 (hSL-A64-N5) comprising derived and/or modified sequence from LASV(AV;Clade V)__CCA30314__GPC (opt5)
aggagaguccgcucagccagguugcagaagcggcuuagcguguguccuaaucuucucucugcguguagguaggccugugccgcaaacaagcuuaccaugggccagaucgugaccuucuuucaagaggucccccacguuauugaagaggugaugaacaucgugcugauugcccucagcauccuggcuguccuuaaggggcuguacaauauugccacaugcggacucaucggccugaucacguuccuucugcucugugggagauccugcucuagcaaccuguauaaaggaguguacgaacugcagucccucgaccugaauauggagacccuuaacaugacaaugccucugucuuguaccaagaauaacagccaucacuauauucggguuggcaaugauacagggcucgaacugacccuuacaaacaccuccauccugaaucauaaauuuugcaaccucucugacgcgcacaagaaagaucuguacgaccaugcucugaugagcauuaucuccacguuccaccucagcauuccgaauuuuaaccaguaugaggccaugucuugugauuucaauggaggcaagaucuccgugcaguacaaccugagccacucuuaugccauugacgcugccaaucauugcggcaccgucgcuaacgggauccuucaaacauuuaugcgcauggccuggggaggcuccuacaucgcgcuggauagcgggagaggaaacugggacuguauuaugaccucuuaccaguaucucaucauucagaauacaaccugggagaaccacugccaguucucccggcccagcccuaucggcuaccuggggcuucugucccaacgcacgagagauauuuauaucucucggcgccuccugggaacauuuaccuggacacugagcgacuccgaaggcaaugccacccccggcggguacugucucaccagauggaugcugaucgaggcugaacuuaagugcuucggaaacacagccguggcuaaauguaaugagaagcaugaugaggaauuuugcgacaugcugcgccucuucgauuuuaacaaacaggccauuagccggcugaagucugaggcgcagauguccauccagcuuauuaauaaagccguuaacgcucugaucaaugaccaacucauuaugaagaaccaccugagagacaucaugggcaucccuuauugcaauuacagcaaguauugguaccugaaccacacgauuaccgggaaaacaucucuccccaaguguuggcuggugagcaauggauccuaccuuaacgaaacccauuucucugaugacaucgagcagcaggccgauaauaugauuacagaaaugcugcaaaaagaguauauggagcggcagggcaagaccccucucgggcuggucgaccuguucguguuuagcacguccuucuaccuuaucagcauuuuucuccgccuggugaaaaucccgacacacagacauauugucggaaagcccugcccuaaaccccaccggcugaaccauaugggcaucuguucuugcggccucuauaagcagccugggguucccgugcgcuggaagagaugaggacuagucccuguucccagagcccacuuuuuuuucuuuuuuugaaauaaaauagccugucuuucagaucucaaaggcucuuuucagagccaccaaaaaaaaaaaaaaaaaaaaaaaaaaaaaaaaaaaaaaaaaaaaaaaaaaaaaaaaaaaaaaaaagaauu

SEQ ID NO: 14413 - RNA, 1733 nt, Artificial Sequence
  mRNA product Design a-2 (hSL-A64-N5) comprising derived and/or modified sequence from LASV(Togo/2016/7082;Clade VI)__AMR44577__GPC (opt5)
aggagaguccgcucagccagguugcagaagcggcuuagcguguguccuaaucuucucucugcguguagguaggccugugccgcaaacaagcuuaccaugggccagaucauuaccuucuuucaagaggugccccacgucaucgaagagguuaugaacauugugcugaucgcccucagccugcuugcuauucugaaggggguguacaaugucgccacaugcggaaucaucggccucgugacguuccuguuucuuugugggagauccugcucucugauuuauaaaggaagcuacgaacuccagacccuggagcugaacauggaaacacucaauaugaccaugccucuguccuguacaaagaacucuagccaucacuauauccggguuggcaaugagaccgggcuugagcugacacucaccaacacguccauuaucaaucauaaauucugcaaccugucugacgcgcacaagcgcaaucuuuacgaucaugcucugaugagcauucucuccaccuuucaccugagcaucccgaacuucaaucaguaugaagccaugucuugugacuuuaacggaggcaaaauuuccgugcaguacaaucugagccacgccuaugcugucgaugccgcugagcauugcggcacaguggccaacgggguucuccaaaccuucaugagaauggcguggggaggcucuuacaucgcccuggacuccgggcggggaaauugggauuguaucaugacaagcuaccaguaucuuauuauccagaacaccacgugggaagaccacugccaguuuucucgccccuccccuauuggcuaccuggggcuccugagccaaagaacacgggauaucuauauuucccgcagacuucugggaaccuucacauggacccucucugacagcgagggcaacgagacccccggcggguacugucugacacgguggaugcugaucgaagcugagcucaagugcuuuggaaauacggccguggcuaaguguaacgaaaaacaugaugaggaguucugcgacaugcugcgccuuuuugauuucaauaagcaggccauccagagacugaaauccgaagcgcagaugagcauucaacucaucaacaaggccgucaaugcucugauuaacgaccagcuuaucaugaaaaaucaucugcgggauaugaugggcauuccuuauugcaacuacucuaaguauugguaccucaaucacaccuccagcgggcgcacaucucugcccaaguguuggcuggugagcaacggauccuaccucaaugagacccacuucucugacgacaucgaacagcaagccgauaacaugaucacagagaugcugcagaaagaauauauugacagacagggcaagaccccucuugggcugguggaucucuuugucuucagcacguccuuuuaccugaucagcauuuuccugcaccuuaucaaaauuccgacacaucggcacaucguuggaaagcccugcccuaaaccccaucgccucaaucacaugggcauuuguucuugcggccuguauaagcagccuggggugcccaccagauggaaacggugaggacuagucccuguucccagagcccacuuuuuuuucuuuuuuugaaauaaaauagccugucuuucagaucucaaaggcucuuuucagagccaccaaaaaaaaaaaaaaaaaaaaaaaaaaaaaaaaaaaaaaaaaaaaaaaaaaaaaaaaaaaaaaaaagaauu

SEQ ID NO: 14414 - RNA, 1733 nt, Artificial Sequence
  mRNA product Design a-2 (hSL-A64-N5) comprising derived and/or modified sequence from LASV(KAK-428;Clade n.d. (VII))__ANH09740__GPC (opt5)
aggagaguccgcucagccagguugcagaagcggcuuagcguguguccuaaucuucucucugcguguagguaggccugugccgcaaacaagcuuaccaugggccagaucgugaccuucuuucaagaggucccccacguuauugaagaggugaugaacaucgugcugauugcccucagccugcuugcuauccugaaggggcucuacaauuucgccacaugcggagucauuggccugaucacguuucuucugcucugugggagauccugcucugcgaccuauaaaggacaguacgaacugcagacacuggagcucaacauggaaagccugaauaugaccaugccucuuuccuguacaaagaacaauucucaucacuauauccgggcuggcaacaauaccgggcuggagcucacacugaccaacacgagcauuaucucccauaaauucugcaaucuuucugacgcccacaagaaaaaccuguacgaucauacccucaugagcauuaucacaaccuuucaccuguccauuccgaauuucaaccaguaugaggccaugagcugugacuuuaauggaggcaagaucucuauucaauacaaccugucccacagcuaugcuggcgaugccgcucagcauugcgggacaguggccaauggaguucuccagaccuucaugcgcauggcguggggcgggucuuaccuggcccuugacuccggaagacggggcugggauuguaucaucagcucuuaccaguaucugauuauccaaaacacgacaugggacgaucacugccaguuuucccgccccagcccuauuggguaccucggauucgugucccagaagaccagagacaucuauauuucucggcgccugcuuggcacauuuaccuggacccugagcgauuccgaaggccaugacaugcccgggggauacugucucacaagauggaugcugaucgaggcugaucugaaaugcuucggcaacacggccgucgcuaaguguaaugaaaaacacgacgaggaguuuugcgauauguggcgccucuucgacuucaacaagcaggccauccaacggcugaaagcggaagcccagaugaauauucagcuuaucaacaaggcugugaaugcccugauuaacgaccaacucaugaugaagaaucaccugagagauaucauggggauuccuuauugcaacuacagcaaauuuugguaucuuaauaacaccacaaccggacggacaucucugccccgcuguuggcucaucuccaauggcagcuaccugaacgagacccauuucucugacgauaucgaacagcaggcugacaauaugauuacggagaugcugcagaaggaauacauggauagacaagggaaaacaccucucggacugguugaccuuuuuguguucagcaccuccuuuuaucugaucaccauuuuccuccaccuggucaagaucccgacacaucggcacauugugggcaaacccugcccuaagccccaucgccugaaccacaugggcaucuguucuugcgggcuuuacaaacagccuggagugcccgucagauggaagcggugaggacuagucccuguucccagagcccacuuuuuuuucuuuuuuugaaauaaaauagccugucuuucagaucucaaaggcucuuuucagagccaccaaaaaaaaaaaaaaaaaaaaaaaaaaaaaaaaaaaaaaaaaaaaaaaaaaaaaaaaaaaaaaaaagaauu

SEQ ID NO: 14415 - RNA, 1733 nt, Artificial Sequence; identical to SEQ ID NO: 14409
  mRNA product Design a-2 (hSL-A64-N5) comprising derived and/or modified sequence from LASV(Pinneo-NIG-1969;Clade I)__AIT17836__GPC (opt5)

SEQ ID NO: 14416 - RNA, 1733 nt, Artificial Sequence
  mRNA product Design a-2 (hSL-A64-N5) comprising derived and/or modified sequence from LASV(ISTH0009-NIG-2011;Clade II)__AIT17404__GPC (opt5)
aggagaguccgcucagccagguugcagaagcggcuuagcguguguccuaaucuucucucugcguguagguaggccugugccgcaaacaagcuuaccaugggccagaucauuaccuucuuucaagaggugccccacgucaucgaagagguuaugaacauugugcugaucgcccucagccugcuugcuauucugaaggggaucuacaauguggccacaugcggacucuucggccuggucuccuuucuucugcucugugggagaucuugcagcacgaccuauaaaggaguguacgaacugcagacacuggagcucgacauggcgucccugaacaugaccaugccucuuucuuguacaaagaauaacagccaucacuauaucaugguuggcaaugaaaccgggcuggagcucacacugaccaacacguccauuaucaaucauaaauucugcaaccuuucugaugcucacaagaaaaaucuguacgaccaugcccucaugagcauuaucuccaccuuucaccugagcauuccgaacuucaaucaguaugaggccaugucuugugauuuuaacggaggcaagaucuccgugcaguacaaucugagccacgcuuaugccgucgacgcugccaaccauugcggcacaauugcgaauggggugcuccaaaccuucaugcggauggccuggggaggcucuuacaucgcucuggauuccgggaagggaagcugggacuguaucaugacaucuuaccaguaucuuauuauccagaacaccacgugggaagaucacugccaguuuucccgccccagcccuauuggcuaccuggggcuccugucccaaagaacacgggacaucuauauuucucgcagacuucugggaaccuucacauggacccucagcgauuccgagggcaacgaaacccccggcggguacugucugacacgguggaugcugaucgaggccgagcucaaaugcuuuggaaauacggcuguugccaaguguaacgaaaaacaugacgaggaguucugcgauaugcugcgccuuuuugacuucaauaagcaggcgaucagacggcugaaaaccgaagcccagaugagcauucagcucaucaacaaggcugugaaugcccugauuaacgaucaacuuaucaugaagaaucaucugcgcgacauuaugggcaucccuuauugcaacuacucuaaauauugguaccucaaucacacagucaccgggaagacaucccugcccagauguuggcuggugagcaacggaucuuaccucaaugaaacccacuucagcgacgauaucgagcagcaggcugacaacaugauuacggagcugcuucaaaaagaauauauggaucggcagggcaagacaccucuggggcucguggaccuguuugucuucuccaccucuuuuuaccugaucagcauuuuccuucaccucaucaaaauuccgacccaucgccacaucacaggaaagcccugcccuaaaccccauagacugaaucacaugggcauuuguuccugcggccuguauaagcacccugggguucccgugaaguggaaacggugaggacuagucccuguucccagagcccacuuuuuuuucuuuuuuugaaauaaaauagccugucuuucagaucucaaaggcucuuuucagagccaccaaaaaaaaaaaaaaaaaaaaaaaaaaaaaaaaaaaaaaaaaaaaaaaaaaaaaaaaaaaaaaaaagaauu

SEQ ID NO: 14417 - RNA, 1733 nt, Artificial Sequence
  mRNA product Design a-2 (hSL-A64-N5) comprising derived and/or modified sequence from LASV(ISTH2010-NIG-2012;Clade II)__AIT17482__GPC (opt5)
aggagaguccgcucagccagguugcagaagcggcuuagcguguguccuaaucuucucucugcguguagguaggccugugccgcaaacaagcuuaccaugggccagaucauuaccuucuuucaagaggugccccacgucaucgaagagguuaugaacauugugcugaucgcccucagccugcuugcuauucugaaggggaucuacaauguggccacaugcggacucuucggccuggucuccuuucuucugcucugugggagaucuugcagcacgaccuauaaaggaguguacgaacugcagacacuggagcucgacauggcgucccugaacaugaccaugccucuuucuuguacaaagaauaacagccaucacuauaucaugguuggcaaugaaaccgggcuggagcucacacugaccaacacguccauuaucaaucauaaauucugcaaccuuucugaugcucacaagaaaaaucuguacgaccaugcccucaugagcauuaucuccaccuuucaccugagcauuccgaacuucaaucaguaugaggccaugucuugugauuuuaacggaggcaagaucuccgugcaguacaaucugagccacgcuuaugccgucgacgcugccaaccauugcggcacaauugcgaauggggugcuccaaaccuucaugcggauggccuggggaggcucuuacaucgcucuggauuccgggaagggaagcugggacuguaucaugacaucuuaccaguaucuuauuauccagaacauuaccugggaagaucacugccaguuuucccgccccagcccuaucggcuaccuggggcuccugucccaaagaacgcgggacauuuauaucucucgcagacuucugggaacauucaccuggacacucagcgauuccgagggcaacgaaacccccggcggguacugucugacccgguggaugcugaucgaggccgagcucaaaugcuuuggaaauacagcuguugccaaguguaacgaaaaacaugacgaggaguucugcgauaugcugcgccuuuuugacuucaauaagcaggcgauuagacggcugaaaacggaagcccagaugagcauccagcucauuaacaaggcugugaaugcccugaucaacgaucaacuuauuaugaagaaucaucugcgcgacaucaugggcaucccuuauugcaacuacucuaaauauugguaccucaaucacaccgucacagggaagaccucccugcccagauguuggcuggugagcaacggaucuuaccucaaugaaacacacuucagcgacgauauugagcagcaggcugacaacaugaucaccgagcugcuucaaaaagaauauauugaucggcagggcaagacgccucuggggcucguggaccuguuugucuucuccacaucuuuuuaccugaucagcauuuuccuucaccucguuaaaaucccgacccaucgccacguggugggaaagcccugcccuaaaccccauagacugaaucacaugggcauuuguuccugcggccuguauaagcacccugggguccccgugaaguggaaacggugaggacuagucccuguucccagagcccacuuuuuuuucuuuuuuugaaauaaaauagccugucuuucagaucucaaaggcucuuuucagagccaccaaaaaaaaaaaaaaaaaaaaaaaaaaaaaaaaaaaaaaaaaaaaaaaaaaaaaaaaaaaaaaaaagaauu

SEQ ID NO: 14418 - RNA, 1733 nt, Artificial Sequence
  mRNA product Design a-2 (hSL-A64-N5) comprising derived and/or modified sequence from LASV(Lassa virus/H.sapiens-wt/NGA/2015/ISTH_0543;Clade II)__AVO03639__GPC (opt5)
aggagaguccgcucagccagguugcagaagcggcuuagcguguguccuaaucuucucucugcguguagguaggccugugccgcaaacaagcuuaccaugggccagaucauuaccuucuuucaagaggugccccacgucaucgaagagguuaugaacauugugcugaucgcccucagccugcuugcuauucugaaggggaucuacaauguggccacaugcggacucuucggccuggucuccuuucuucugcucugugggagaucuugcagcacgaccuauaaaggaguguacgaacugcagacacuggagcucgacauggcgaaccugaauaugaccaugccucuuuccuguacaaagaacaauucucaucacuauaucaugguuggcaacgaaaccgggcuggagcucacacugaccaauacgagcauuaucaaccauaaauucugcaaucuuuccgaugcucacaagaaaaaccuguacgaccaugcccucaugucuauuaucagcaccuuucaccuguccauuccgaauuucaaccaguaugaggccaugagcugugauuuuaauggaggcaagaucucugugcaguacaaccugucccacacauaugcugucgacgccgcuaaucauugcggcaccauugccaacggggugcuccaaacauucaugcggauggcguggggaggcagcuacaucgcccuggauucugggaagggauccugggacuguaucaugaccagcuaccaguaucuuguuauucagaacacgacaugggaagaucacugccaguuuucucgccccuccccuaucggcuaccuggggcuccugagccaaagaacccgggacauuuauaucucccgcagacuucugggaacauucaccuggacccucucugauagcgagggcaaugaaacacccggcggguacugucugacgcgguggaugcugauugaggcugagcucaaaugcuuuggaaacaccgccguggcuaaguguaaugaaaaacaugacgaggaguucugcgauaugcugcgccuuuuugacuucaacaagcaggccaucagacggcugaaaacagaagcgcagauguccauccagcucauuaauaaggccgucaacgcucugaucaaugaucaacuuauuaugaagaaccaucugcgcgacaucaugggcauuccuuauugcaauuacagcaaauauugguaccucaaccacaccgugacagggaagaccucucugcccagauguuggcugguguccaauggaagcuaccucaacgaaacgcacuucucugacgauaucgagcagcaggccgacaauaugaucacagagcugcuucaaaaagaauauauugaucggcagggcaagaccccucuggggcucgucgaccuguuuguuuucagcaccuccuuuuaccugaucucuauuuuccuucaccucgugaaaaucccgacacaucgccacauuaccggaaagcccugcccuaaaccccauagacugaaccacaugggcaucuguagcugcggccuguauaagcacccuggggugcccgucaaguggaaacggugaggacuagucccuguucccagagcccacuuuuuuuucuuuuuuugaaauaaaauagccugucuuucagaucucaaaggcucuuuucagagccaccaaaaaaaaaaaaaaaaaaaaaaaaaaaaaaaaaaaaaaaaaaaaaaaaaaaaaaaaaaaaaaaaagaauu

SEQ ID NO: 14419 - RNA, 1733 nt, Artificial Sequence
  mRNA product Design a-2 (hSL-A64-N5) comprising derived and/or modified sequence from LASV(Lassa virus/H.sapiens-wt/NGA/2016/ISTH_0009;Clade II)__AVO03571__GPC (opt5)
aggagaguccgcucagccagguugcagaagcggcuuagcguguguccuaaucuucucucugcguguagguaggccugugccgcaaacaagcuuaccaugggccagaucauuaccuucuuucaagaggugccccacgucaucgaagagguuaugaacauugugcugaucgcccucagccugcuugcuauucugaaggggaucuacaauguggccacaugcggacuccugggccuugucuccuuccugcuccugugugggagaucuugcagcacgaccuauaaaggaguguacgaacugcagacacucgagcuggacauggcgucccuuaacaugaccaugccucugucuuguacaaagaauaacagccaucacuauaucaugguuggcaaugaaaccgggcucgagcugacacuuaccaacacguccauuaucaaucauaaauuuugcaaccugucugaugcucacaagaaaaaucucuacgaccaugcccugaugagcauuaucuccaccuuccaccugagcauuccgaacuuuaaucaguaugaggccaugucuugugauuucaacggaggccggaucuccgugcaguacaaucucagccacucuuaugcugucgacgccgcuaaccauugcggcacaauugccaauggggugcugcaaaccuuuaugcgcauggcguggggaggcuccuacaucgcccuugauagcgggaagggaucuugggacuguaucaugacauccuaccaguaucugauuauccagaacaccacgugggaagaucacugccaguucagcagacccuccccuauuggcuaccucgggcugcuuucucaacggacacgcgacaucuauauuagcagacggcugcucggaaccuuuacauggacccuguccgauagcgagggcaacgaaacccccggcggguacugucugacacgcuggaugcucaucgaggcugagcugaagugcuucggaaauacggccguugcuaaauguaacgaaaagcaugacgaggaauuuugcgauaugcuuagacuguucgacuuuaauaaacaggccauccggcgccucaagaccgaggcgcagaugucuauucagcugaucaacaaagccgugaaugcucuuauuaacgaucaacugaucaugaagaaucaccucagagacauuaugggcaucccuuauugcaacuacuccaaguauugguaccugaaucacacagucaccgggaaaacaagccugccccgguguuggcucgugucuaacggaagcuaccugaaugaaacccauuucuccgacgauaucgagcagcaggccgacaacaugauuacggagcuucugcaaaaggaauauaucgaucgccagggcaaaacaccucucgggcugguggaccuguucgucuuuucuaccagcuucuaccuuauuuccaucuuucuccaccugguuaagauuccgacccauagacacaucacaggaaaacccugcccuaagccccaucggcugaaucacaugggcauuuguagcugcggccucuauaaccacccuggggugcccgugaaauggaagcgcugaggacuagucccuguucccagagcccacuuuuuuuucuuuuuuugaaauaaaauagccugucuuucagaucucaaaggcucuuuucagagccaccaaaaaaaaaaaaaaaaaaaaaaaaaaaaaaaaaaaaaaaaaaaaaaaaaaaaaaaaaaaaaaaaagaauu

SEQ ID NO: 14420 - RNA, 1733 nt, Artificial Sequence
  mRNA product Design a-2 (hSL-A64-N5) comprising derived and/or modified sequence from LASV(Lassa virus/H.sapiens-wt/NGA/2016/ISTH_0017;Clade II)__AVO03567__GPC (opt5)
aggagaguccgcucagccagguugcagaagcggcuuagcguguguccuaaucuucucucugcguguagguaggccugugccgcaaacaagcuuaccaugggccagaucauuaccuucuuucaagaggugccccacgucaucgaagagguuaugaacauugugcugaucgcccucagccugcuugcuauucugaaggggaucuacaauguggccacaugcggacucuucggccuggucuccuuucuucugcucugugggagaucuugcagcacgaccuauaaaggaguguacgaacugcagacacuggagcucgacauggcgucccugaacaugaccaugccucuuucuuguacaaagaauaacagccaucacuauaucaugguuggcaaugaaaccgggcuggagcucacacugaccaacacguccauuaucaaucauaaauucugcaaccuuucugaugcucacaagaaaaaucuguacgaccaugcccucaugagcauuaucuccaccuuucaccugagcauuccgaacuucaaucaguaugaggccaugucuugugauuuuaacggaggcaagaucuccgugcaguacaaucugagccacacauaugcuauugacgccgcuaaccauugcggcaccaucgccaaugggguccuccaaacauucaugcggauggcguggggaggcucuuacaucgcccuggauuccgggaagggaagcugggacuguauuaugaccucuuaccaguaucuuaucauucagaacacgacaugggaagaucacugccaguuuucccgccccagcccuaucggcuaccuggggcuccugucccaaagaacccgggacauuuauaucucucgcagacuucugggaacauucaccuggacccucagcgauuccgagggcaacgaaacacccggcggguacugucugacgcgguggaugcugaucgaggcugagcucaaaugcuuuggaaauaccgccguggcuaaguguaacgaaaaacaugacgaggaguucugcgauaugcugcgccuuuuugacuucaauaagcaggccauuagacggcugaaaacagaagcgcagaugagcauccagcucauuaacaaggccguuaaugcucugaucaacgaucaacuuauuaugaagaaucaucugcgcgacaucaugggcaucccuuauugcaacuacucuaaauauugguaccucaaucacaccgugacagggaagaccucccugcccagauguuggcuggucagcaacggaucuuaccucaaugaaacgcacuucagcgacgauauugagcagcaggccgacaacaugaucacagagcugcuucaaaaagaauauauggaucggcagggcaagaccccucuggggcucguggaccuguuuguguucuccaccucuuuuuaccugauuagcaucuuccuucaccucguccgcauuccgacacauagacacguuaucggaaaacccugcccuaagccccaucggcugaaucacaugggcauuuguuccugcggccuguauaaacacccuggggugcccgugaaguggaagcgcugaggacuagucccuguucccagagcccacuuuuuuuucuuuuuuugaaauaaaauagccugucuuucagaucucaaaggcucuuuucagagccaccaaaaaaaaaaaaaaaaaaaaaaaaaaaaaaaaaaaaaaaaaaaaaaaaaaaaaaaaaaaaaaaaagaauu

SEQ ID NO: 14421 - RNA, 1733 nt, Artificial Sequence
  mRNA product Design a-2 (hSL-A64-N5) comprising derived and/or modified sequence from LASV(Lassa virus/H.sapiens-wt/NGA/2018/ISTH_0959;Clade II)__AVV65099__GPC (opt5)
aggagaguccgcucagccagguugcagaagcggcuuagcguguguccuaaucuucucucugcguguagguaggccugugccgcaaacaagcuuaccaugggccagaucauuaccuucuuucaagaggugccccacgucaucgaagagguuaugaacauugugcugaucgcccucagccugcuugcuauucugaaggggaucuacaauguggucacaugcggacucuucggccugguguccuuucuucugcucugugggagaucuugcagcacgaccuauaaaggaguuuacgaacugcagacacuggagcucgacauggccucccugaacaugaccaugccucuuucuuguacaaagaauaacagccaucacuauaucauggugggcaaugaaaccgggcuggagcucacacugaccaacacguccauuaucaaucauaaauucugcaaccuuucugaugcgcacaagaaaaaucuguacgaccaugcucucaugagcauuaucuccaccuuucaccugagcauuccgaacuucaaucaguaugaggccaugucuugugauuuuaacggaggcaagaucuccguccaguacaaucugagccacgccuaugcuauugacgccgcuaaccauugcggcacaaucgccaauggggugcuccaaaccuucaugcggauggcguggggaggcucuuacaucgcccuggauuccgggaagggaagcugggacuguauuaugacaucuuaccaguaucuuaucauucagaacaccacgugggaagaucacugccaguuuucccgccccagcccuaucggcuaccuggggcuccugucccaaagaacacgggacauuuauaucucucgcagacuucugggaaccuucacauggacccucagcgauuccgagggcaacgaaacccccggcggguacugucugacacgguggaugcugaucgaggcugagcucaaaugcuuuggaaauacggccguugcuaaguguaacgaaaaacaugacgaggaguucugcgauaugcugcgccuuuuugacuucaauaagcaggccauuagacggcugaaaaccgaagcgcagaugagcauccagcucauuaacaaggccgugaaugcucugaucaacgaucaacuuauuaugaagaaucaucugcgcgacaucaugggcaucccuuauugcaacuacucuaaauauugguaccucaaucacacagucaccgggaagacaucccugcccagauguuggcuggugagcaacggaucuuaccucaaugaaacccacuucagcgacgauauugagcagcaggccgacaacaugaucacggagcugcuucaaaaagaauauauugaucggcagggcaagacaccucuggggcucguggaccuguuugucuucuccaccucuuuuuaccugaucagcauuuuccuucaccucguuaaaaucccgacccaucgccacgugauuggaaagcccugcccuaaaccccauagacugaaucacaugggcaucuguuccugcggccuguauaagcacccuggggugcccgucaaguggaaacggugaggacuagucccuguucccagagcccacuuuuuuuucuuuuuuugaaauaaaauagccugucuuucagaucucaaaggcucuuuucagagccaccaaaaaaaaaaaaaaaaaaaaaaaaaaaaaaaaaaaaaaaaaaaaaaaaaaaaaaaaaaaaaaaaagaauu

SEQ ID NO: 14422 - RNA, 1733 nt, Artificial Sequence
  mRNA product Design a-2 (hSL-A64-N5) comprising derived and/or modified sequence from LASV(LASV003-NIG-2008;Clade II)__AIT17580__GPC (opt5)
aggagaguccgcucagccagguugcagaagcggcuuagcguguguccuaaucuucucucugcguguagguaggccugugccgcaaacaagcuuaccaugggccagaucauuaccuucuuucaagaggugccccacgucaucgaagagguuaugaacauugugcugaucgcccucagccugcuugcuauucugaaggggaucuacaauguggccacaugcggacucuucggccuggucuccuuucuucugcucugugggagaucuugcagcacgaccuauaaaggaguguacgaacugcagacacuggagcucgacauggcgucccugaacaugaccaugccucuuucuuguacaaagaauaacagccaucacuauaucaugguuggcaaugaaaccgggcuggagcucacacugaccaacacguccauuaucaaucauaaauucugcaaccuuucugaugcucacaagaaaaaucuguacgaccaugcccucaugagcauuaucuccaccuuucaccugagcauuccgaacuucaaucaguaugaggccaugucuugugauuuuaacggaggcaagaucuccgugcaguacaaucugagccacacauaugcugucgacgccgcuaaccauugcggcaccauugccaauggggugcuccaaacauucaugcggauggcguggggaggcucuuacaucgcccuggauuccgggaagggaagcugggacuguaucaugaccucuuaccaguaucuuauuauccagaacacgacaugggaagaucacugccaguuuucccgccccagcccuauuggcuaccuggggcuccugucccaaagaacccgggacaucuauauuucucgcagacuucugggaacauucaccuggacccucagcgauuccgagagcaacgaaacacccggcggcuacugucugacgcgguggaugcugaucgaggcugagcucaaaugcuuugggaauaccgccguugcuaaguguaacgaaaaacaugacgaggaguucugcgauaugcugcgccuuuuugacuucaauaagcaggccaucagacggcugaaagcggaagcccagaugucuauucagcucaucaacaaggcugugaaugcccugauuaacgaucaacuuaucaugaagaaucaucugcgcgacauuaugggaaucccuuauugcaacuacuccaaauauugguaccucaaucacacagucaccggcagaacaagccugccccgguguuggcuggugucuaacgggagcuaccucaaugaaacccacuucuccgacgauaucgagcagcaggcugacaacaugauuacggagcugcuucaaaaggaauauauggaucgccagggaaaaacaccucugggccucguggaccuguuugucuucucuaccagcuuuuaccugaucuccauuuuccuucaccucguuaagaucccgacccauagacacgugauugggaaacccugcccuaagccccaucggcugaaucacaugggaaucuguagcugcggccuguauaaacacccuggcgugcccgucaaguggaagcgcugaggacuagucccuguucccagagcccacuuuuuuuucuuuuuuugaaauaaaauagccugucuuucagaucucaaaggcucuuuucagagccaccaaaaaaaaaaaaaaaaaaaaaaaaaaaaaaaaaaaaaaaaaaaaaaaaaaaaaaaaaaaaaaaaagaauu

SEQ ID NO: 14423 - RNA, 1733 nt, Artificial Sequence
  mRNA product Design a-2 (hSL-A64-N5) comprising derived and/or modified sequence from LASV(LASV035-NIG-2009;Clade II)__AIT17588__GPC (opt5)
aggagaguccgcucagccagguugcagaagcggcuuagcguguguccuaaucuucucucugcguguagguaggccugugccgcaaacaagcuuaccaugggccagaucauuaccuucuuucaagaggugccccacgucaucgaagagguuaugaacauugugcugaucgcccucagccugcuugcuauucugaaggggaucuacaauguggccacaugcggacucuucggccuggucuccuuucuucugcucugugggagaucuugcagcacgaccuauaaaggaguguacgaacugcagacacuggagcucgacauggcgucccugaacaugaccaugccucuuucuuguacaaagaauaacagccaucacuauaucaugguuggcaaugaaaccgggcuggagcucacacugaccaacacguccauuaucaaucauaaauucugcaaccuuucugaugcucacaagaaaaaucuguacgaccaugcccucaugagcauuaucuccaccuuucaccugagcauuccgaacuucaaucaguaugaggccaugucuugugauuuuaacggaggcaagaucuccgugcaguacaaucugagccacgcuuaugccgucgacgcugccaaccauugcggcacaauugcgaauggggugcuccaaaccuucaugcggauggccuggggaggcucuuacaucgcucuggauuccgggaagggaagcugggacuguaucaugacaucuuaccaguaucuuauuauccagaacaccacgugggaagaucacugccaguuuucccgccccagcccuauuggcuaccuggggcuccugucccaaagaacacgggacaucuauauuucucgcagacuucugggaaccuucacauggacccucagcgauuccgagggcaacgaaacccccggcggguacugucugacacgguggaugcugaucgaggccgagcucaaaugcuuuggaaauacggcuguugccaaguguaacgaaaaacaugacgaggaguucugcgauaugcugcgccuuuuugacuucaauaagcaggcgaucagacggcugaaagccgaagcucagaugagcauucagcucaucaacaaggccgugaaugcucugauuaacgaucaacuuaucaugaagaaucaucugcgcgacauuaugggcaucccuuauugcaacuacucuaaauauugguaccucaaucacaccgucacagggaagaccucccugcccagauguuggcuggugagcaacggaucuuaccucaaugaaacacacuucagcgacgauaucgagcagcaggccgacaacaugauuaccgagcugcuucaaaaagaauauaucgaucggcagggcaagacgccucuggggcucguggaccuguuugucuucuccacaucuuuuuaccugauuagcaucuuccuucaccucguuaaaauuccgacccaucgccacgugaucggaaagcccugcccuaaaccccauagacugaaucacaugggcauuuguuccugcggccuguauaagcacccuggggugcccgucaaguggaaacggugaggacuagucccuguucccagagcccacuuuuuuuucuuuuuuugaaauaaaauagccugucuuucagaucucaaaggcucuuuucagagccaccaaaaaaaaaaaaaaaaaaaaaaaaaaaaaaaaaaaaaaaaaaaaaaaaaaaaaaaaaaaaaaaaagaauu

SEQ ID NO: 14424 - RNA, 1733 nt, Artificial Sequence
  mRNA product Design a-2 (hSL-A64-N5) comprising derived and/or modified sequence from LASV(LASV1000-NIG-2009;Clade II)__AIT17782__GPC (opt5)
aggagaguccgcucagccagguugcagaagcggcuuagcguguguccuaaucuucucucugcguguagguaggccugugccgcaaacaagcuuaccaugggccagaucauuaccuucuuucaagaggugccccacgucaucgaagagguuaugaacauugugcugaucgcccucagccugcuugcuauucugaaggggaucuacaauguggccacaugcggacucuucggccuggucuccuuucuucugcucugugggagaucuugcagcacgaccuauaaaggaguguacgaacugcagacacuggagcucgacauggcgucccugaacaugaccaugccucuuucuuguacaaagaauaacagccaucacuauaucaugguuggcaaugaaaccgggcuggagcucacacugaccaacacguccauuaucaaucauaaauucugcaaccuuucugaugcucacaagaaaaaucuguacgaccaugcccucaugagcauuaucuccaccuuucaccugagcauuccgaacuucaaucaguaugaggccaugucuugugauuuuaacggaggcaagaucuccgugcaguacaaucugagccacacauaugcugucgacgccgcuaaccauugcggcaccauugccaauggggugcuccaaacauucaugcggauggcguggggaggcucuuacaucgcccuggauuccgggaagggaagcugggacuguaucaugaccucuuaccaguaucuuauuauccagaacacgacaugggaagaucacugccaguuuucccgccccagcccuauuggcuaccuggggcuccugucccaaagaacccgggacaucuauauuucucgcagacuucugggaacauucaccuggacccucagcgauuccgagggcaacgaaacacccggcggguacugucugacgcgguggaugcugaucgaggcugagcucaaaugcuuuggaaauaccgccguugcuaaguguaacgaaaaacaugacgaggaguucugcgauaugcugcgccuuuuugacuucaauaagcaggccaucaaaagacugaagacagaagcgcagaugagcauucagcucaucaacaaggccgugaaugcucugauuaacgaucaacuuaucaugaaaaaucaucugcgggacauuaugggcaucccuuauugcaacuacucuaaguauugguaccucaaucacaccgucacagggaaaaccucccugccccgcuguuggcuggugagcaacggaucuuaccucaaugaaacgcacuucagcgacgauaucgagcagcaggccgacaacaugauuacagagcugcuucaaaaggaauauaucgauagacagggcaaaaccccucuggggcucguggaccuguuugucuucuccaccucuuuuuaccugauuagcaucuuccuucaccucguuaagauuccgacacaucggcacguggugggaaaacccugcccuaagccccaucgccugaaucacaugggcaucuguuccugcggccuguauaagcacccugggguccccgugaaauggaagagaugaggacuagucccuguucccagagcccacuuuuuuuucuuuuuuugaaauaaaauagccugucuuucagaucucaaaggcucuuuucagagccaccaaaaaaaaaaaaaaaaaaaaaaaaaaaaaaaaaaaaaaaaaaaaaaaaaaaaaaaaaaaaaaaaagaauu

SEQ ID NO: 14425 - RNA, 1733 nt, Artificial Sequence
  mRNA product Design a-2 (hSL-A64-N5) comprising derived and/or modified sequence from LASV(LASV221-NIG-2010;Clade II)__AIT17624__GPC (opt5)
aggagaguccgcucagccagguugcagaagcggcuuagcguguguccuaaucuucucucugcguguagguaggccugugccgcaaacaagcuuaccaugggccagaucauuaccuucuuucaagaggugccccacgucaucgaagagguuaugaacauugugcugaucgcccucagccugcuugcuauucugaaggggaucuacaauguggccacaugcggacucuucggccuggucuccuuucuucugcucugugggagaucuugcagcacgaccuauaaaggaguguacgaacugcagacacuggagcucgacauggcgucccugaacaugaccaugccucuuucuuguacaaagaauaacagccaucacuauaucaugguuggcaaugaaaccgggcuggagcucacacugaccaacacguccauuaucaaucauaaauucugcaaccuuucugaugcucacaagaaaaaucuguacgaccaugcccucaugagcauuaucuccaccuuucaccugagcauuccgaacuucaaucaguaugaggccaugucuugugauuuuaacggaggcaagaucuccgugcaguacaaucugagccacacauaugcuauugacgccgcuaaccauugcggcaccaucgccaaugggguccuccaaacauucaugcggauggcguggggaggcucuuacaucgcccuggauuccgggaagggaagcugggacuguauuaugaccucuuaccaguaucuuaucauucagaacacgacaugggaagaucacugccaguuuucccgccccagcccuaucggcuaccuggggcuccugucccaaagaacccgggacauuuauaucucucgcagacuucugggaacauucaccuggacccucagcgauuccgagggcaacgaaacacccggcggguacugucugacgcgguggaugcugaucgaggcugagcucaaaugcuuuggaaauaccgccguggcuaaguguaacgaaaaacaugacgaggaguucugcgauaugcugcgccuuuuugacuucaauaagcaggccauuagacggcugaaaacagaagcgcagaugagcauccagcucauuaacaaggccguuaaugcucugaucaacgaucaacuuauuaugaagaaucaucugcgcgacaucaugggcaucccuuauugcaacuacucuaaauauugguaccucaaucacaccgugacagggaagaccucccugcccagauguuggcuggucagcaacggaucuuaccucaaugaaacgcacuucagcgacgauauugagcagcaggccgacaacaugaucacagagaugcugcaaaaagaauauauggaucggcagggcaagaccccucuugggcugguggaccucuuuguguucuccaccucuuuuuaccugauuagcaucuuccugcaccuugucaaaauuccgacacaucgccacguuaucggaaagcccugcccuaaaccccauagacucaaucacaugggcauuuguuccugcggccuguauaagcacccuggggugcccgugaaguggaaacggugaggacuagucccuguucccagagcccacuuuuuuuucuuuuuuugaaauaaaauagccugucuuucagaucucaaaggcucuuuucagagccaccaaaaaaaaaaaaaaaaaaaaaaaaaaaaaaaaaaaaaaaaaaaaaaaaaaaaaaaaaaaaaaaaagaauu

SEQ ID NO: 14426 - RNA, 1733 nt, Artificial Sequence
  mRNA product Design a-2 (hSL-A64-N5) comprising derived and/or modified sequence from LASV(LASV237-NIG-2010;Clade II)__AIT17638__GPC (opt5)
aggagaguccgcucagccagguugcagaagcggcuuagcguguguccuaaucuucucucugcguguagguaggccugugccgcaaacaagcuuaccaugggccagaucauuaccuucuuucaagaggugccccacgucaucgaagagguuaugaacauugugcugaucgcccucagccugcuugcuauucugaaggggaucuacaauguggccacaugcggacucuucggccuggucuccuuucuucugcucugugggagaucuugcagcacgaccuauaaaggaguguacgaacugcagacacuggagcucgacauggcgucccugaacaugaccaugccucuuucuuguacaaagaauaacagccaucacuauaucaugguuggcaaugaaaccgggcuggagcucacacugaccaacacguccauuaucaaucauaaauucugcaaccuuucugaugcucacaagaaagaccuguacgaucaugcccucaugagcauuaucuccaccuuucaccugagcauuccgaauuucaaccaguaugaggccaugucuugugacuuuaauggaggcaagaucuccgugcaguacaaccugagccacacauaugcugucgaugccgcuaaucauugcggcaccauugccaacggggugcuccaaacauucaugcggauggcguggggaggcucuuacaucgcccuggacuccgggaagggaagcugggauuguaucaugaccucuuaccaguaucuuauuauccagaauacgacaugggaagaccacugccaguuuucccgccccagcccuauuggcuaccuggggcuccugucccaaagaacccgggauaucuauauuucucgcagacuucugggaacauucaccuggacccucagcgacuccgagggcaacgaaacacccggcggguacugucugacgcgguggaugcugaucgaggcugagcucaaaugcuuuggaaacaccgccguugcuaaguguaaugaaaaacaugaugaggaguucugcgacaugcugcgccuuuuugauuucaacaagcaggccaucagacggcugaaaacagaagcgcagaugagcauucagcucaucaauaaggccgugaacgcucugauuaaugaccaacuuaucaugaagaaccaucugcgcgacauuaugggcaucccuuauugcaauuacucuaaauauugguaccucaaccacaccgucacagggaagaccucccugcccagauguuggcuggugagcaauggaucuuaccucaacgaaacgcacuucagcgaugacaucgagcagcaggccgauaauaugauuacagagcugcuucaaaaagaauauauggaccggcagggcaagaccccucuggggcucguggaucuguuugucuucuccaccucuuuuuaccugaucagcauuuuccuucaccucaucaaaauuccgacacaucgccacaucaccggaaagcccugcccuaaaccccauagacugaaccacaugggcauuuguuccugcggccuguauaagcacccugggguucccgugaaguggaaacggugaggacuagucccuguucccagagcccacuuuuuuuucuuuuuuugaaauaaaauagccugucuuucagaucucaaaggcucuuuucagagccaccaaaaaaaaaaaaaaaaaaaaaaaaaaaaaaaaaaaaaaaaaaaaaaaaaaaaaaaaaaaaaaaaagaauu

SEQ ID NO: 14427 - RNA, 1733 nt, Artificial Sequence
  mRNA product Design a-2 (hSL-A64-N5) comprising derived and/or modified sequence from LASV(LASV253-NIG-2011;Clade II)__AIT17670__GPC (opt5)
aggagaguccgcucagccagguugcagaagcggcuuagcguguguccuaaucuucucucugcguguagguaggccugugccgcaaacaagcuuaccaugggccagaucauuaccuucuuucaagaggugccccacgucaucgaagagguuaugaacauugugcugaucgcccucagccugcuugcuauucugaaggggaucuacaauguggccacaugcggacucuucggccuggucuccuuucuucugcucugugggagaucuugcagcacgaccuauaaaggaguguacgaacugcagacacuggagcucgacauggcgucccugaacaugaccaugccucuuucuuguacaaagaauaacagccaucacuauaucaugguuggcaaugaaaccgggcuggagcucacacugaccaacacguccauuaucaaucauaaauucugcaaccuuucugaugcucacaagaaaaaucuguacgaccaugcccucaugagcauuaucuccaccuuucaccugagcauuccgaacuucaaucaguaugaggccaugucuugugauuuuaacggaggcaagaucuccgugcaguacaaucugagccacacauaugcugucgacgccgcuaaccauugcggcaccauugccaauggggugcuccaaacauucaugcggauggcguggggaggcucuuacaucgcccuggauuccgggaagggaagcugggacuguaucaugaccucuuaccaguaucuuauuauccagaacacgacaugggaagaucacugccaguuuucccgccccagcccuauuggcuaccuggggcuccugucccaaagaacccgggacaucuauauuucucgcagacuucugggaacauucaccuggacccucagcgauuccgagggcaacgaaacacccggcggguacugucugacgcgguggaugcugaucgaggcugagcucaaaugcuuuggaaauaccgccguugcuaaguguaacgaaaaacaugacgaggaguucugcgauaugcugcgccuuuuugacuucaauaagcaggccaucagacggcugaaagcggaagcccagaugagcauucagcucaucaacaaggcugugaaugcccugauuaacgaucaacuuaucaugaagaaucaucugcgcgacauuaugggcaucccuuauugcaacuacucuaaauauugguaccucaaucacacagucaccgggagaacaucccugccccgguguuggcuggugagcaacggaucuuaccucaaugaaacccacuucagcgacgauaucgagcagcaggcugacaacaugauuacggagcugcuucaaaaggaauauaucgaucgccagggcaaaacaccucuggggcucguggaccuguuugucuucuccaccucuuuuuaccugauuagcaucuuccuucaccucguuaagauuccgacccauagacacaucauuggaaaacccugcccuaagccccaucggcugaaucacaugggcaucuguuccugcggccuguauaaacacccuggggugcccgugaaguggaagcgcugaggacuagucccuguucccagagcccacuuuuuuuucuuuuuuugaaauaaaauagccugucuuucagaucucaaaggcucuuuucagagccaccaaaaaaaaaaaaaaaaaaaaaaaaaaaaaaaaaaaaaaaaaaaaaaaaaaaaaaaaaaaaaaaaagaauu

SEQ ID NO: 14428 - RNA, 1733 nt, Artificial Sequence
  mRNA product Design a-2 (hSL-A64-N5) comprising derived and/or modified sequence from LASV(LASV254-NIG-2011;Clade II)__AIT17674__GPC (opt5)
aggagaguccgcucagccagguugcagaagcggcuuagcguguguccuaaucuucucucugcguguagguaggccugugccgcaaacaagcuuaccaugggccagaucauuaccuucuuucaagaggugccccacgucaucgaagagguuaugaacauugugcugaucgcccucagccugcuugcuauucugaaggggaucuacaauguggccacaugcggacucuucggccuggucuccuuucuucugcucugugggagaucuugcagcacgaccuauaaaggaguguacgaacugcagacacuggagcucgacaugaccaaccugaauaugacaaugccucuuuccuguaccaagaacaauucucaucacuauaucaugguuggcaacgaaacagggcuggagcucacccugacgaauaccagcauuaucaaccauaaauucugcaaucuuuccgaugcgcacaagaaaaaccuguacaaucaugcucucaugucuauuaucagcacauuucaccuguccauuccgaacuucaaucaguaugaggccaugagcugugacuuuaacggaggcaagaucucugugcaguacaaucugucccacagcuaugccgucgaugcugccaaccauugcggcaccauugcuaacggggugcuccaaacauucaugcggauggccuggggaggcucuuacaucgcgcuggacuccgggaagggaaauugggauuguaucaugaccagcuaccaguaucuuauuauccagaacacgacaugggaagaccacugccaguuuucucgccccuccccuauuggcuaccuggggcuccugagccaaagaacccgggauaucuauauuucccgcagacuucugggaacauucaccuggacccucucugacagcgagggcaaugaaacacccggcggguacugucugacgcgguggaugcugaucgaggccgagcucaaaugcuuuggaaacaccgcuguugccaaguguaaugaaaaacaugaugaggaguucugcgacaugcugcgccuuuuugauuucaacaagcaggcuaucagacggcugaaaacagaagcccaggcgaauauucagcucaucaacaaggccgugaaugcucugauuaacgaccaacuuaucaugaagaaucaucugcgcgauauuaugggcaucccuuauugcaacuacuccaaauauugguaccucaaucacaccgucacagggaagaccagccugcccagauguuggcuggugucuaacggauccuaccucaaugaaacgcacuucagcgacgacaucgagcagcaggccgauaacaugauuacagagcugcuucaaaaagaauauauggaccggcagggcaagaccccucuggggcucguggaucuguuugucuucucuaccagcuuuuaccugaucuccauuuuccuucaccucguuaaaaucccgacacaucgccacgugauuggaaagcccugcccuaaaccccauagacugaaccacaugggcaucuguucuugcggccuguauaagcacccuggggugcccgucaaguggaaacggugaggacuagucccuguucccagagcccacuuuuuuuucuuuuuuugaaauaaaauagccugucuuucagaucucaaaggcucuuuucagagccaccaaaaaaaaaaaaaaaaaaaaaaaaaaaaaaaaaaaaaaaaaaaaaaaaaaaaaaaaaaaaaaaaagaauu

SEQ ID NO: 14429 - RNA, 1733 nt, Artificial Sequence
  mRNA product Design a-2 (hSL-A64-N5) comprising derived and/or modified sequence from LASV(Nig08-A19;Clade III)__ADU56618__GPC (opt5)
aggagaguccgcucagccagguugcagaagcggcuuagcguguguccuaaucuucucucugcguguagguaggccugugccgcaaacaagcuuaccaugggccagaucgugaccuucuuucaagaggucccccacguuauugaagaggugaugaacaucgugcugauugcccucagcauccuggcuauucuuaaggggcuguacaauaucgccacaugcggacucaucggccuggucacguuccuucugcucuccgggagaucuuguagcaugaccuauaaaggaguguacgaacugcagacacuggagcucaacaugaauacccugaacaugacaaugccucuuuccugcaccaagaauaacucucaucacuauauuaugguuggcaaugaaacagggcuggagcucacccugacgaacaccagccuucugcaucacaaauuuuguaaucucuccgacgcgcauaagaaaaaccuguacgaucacacacugaugucuaucauuagcaccuuccaccucuccaucccgaauuuuaaccaguaugaggcuaugagcugcgacuucaauggaggcaagauuacagugcaguacaaccugucucauuccuaugccaucgaugccgcuaaucacuguggcaccgucgccaacggggugcuucaaacguuuaugcggauggcuuggggaggcagcuacauugcccuggacucugggcgcggaaagugggauugcaucaugacauccuaccaguaucucaucauucagaacaccacaugggaagaccauugucaguucagcagacccucuccuaucggcuaccuggggcuucugucccaacggacccgcgauauuuauaucagcagacggcuccugggaaccuuuacauggacgcuguccgacucugagggcaaugaaacccccggcggguacugccucacacgcuggaugcugauugaggcggagcuuaaauguuucggaaacaccgccguugcuaagugcaaugaaaaacacgaugaggaauuuugugacaugcugagacucuucgauuuuaacaagcaggccauccggcgccugaaagcugaggcccagaugagcauccagcuuauuaauaaggcggugaacgcccugaucaaugaccaacucauuaugaagaaccaccugagagauaucaugggcauuccuuauugcaauuacuccaaauauugguaccugaaccauacaagcaccgggcggacgucucucccccgcugcuggcuggucuccaauggaagcuaccuuaacgaaacacacuucucugacgacaucgagcagcaggcugauaauaugaucaccgagaugcugcaaaaggaauaucucgacagacagggcaaaaccccucuggggcugguggaucuuuucguguuuagcacauccuucuaccucauuucuaucuuucugcaucuggucaagauuccgacccaccggcauaucguuggaaaacccuguccuaagccccaccgccucaaccacaugggcauuugcagcuguggccuguauaaacagccuggggugcccgugagauggaagcggugaggacuagucccuguucccagagcccacuuuuuuuucuuuuuuugaaauaaaauagccugucuuucagaucucaaaggcucuuuucagagccaccaaaaaaaaaaaaaaaaaaaaaaaaaaaaaaaaaaaaaaaaaaaaaaaaaaaaaaaaaaaaaaaaagaauu

SEQ ID NO: 14430 - RNA, 1736 nt, Artificial Sequence
  mRNA product Design a-2 (hSL-A64-N5) comprising derived and/or modified sequence from LASV(G1180-SLE-2010;Clade IV)__AIT17168__GPC (opt5)
aggagaguccgcucagccagguugcagaagcggcuuagcguguguccuaaucuucucucugcguguagguaggccugugccgcaaacaagcuuaccaugggccagaucgugaccuucuuucaagaggucccccacguuauugaagaggugaugaacaucgugcugauugcccucagcauccuggcuguccuuaaggggcuguacaauuucgccacaugcggacucgugggccugcuuacguuucugcuccugugugggagauccugcaccgcgucucgguauaaaggaguuuacgaacugcagacacucgagcugaacauggaaacccuuaauaugacaaugccucugagcuguaccaagaacaauucccaucacuauauuauggugggcaacgagacagggcucgagcugacccuuacgaauaccucuaucaucaaccauaaauucugcaaucugagcgacgcucacaagaaaaaccucuacgaucaugcccugauguccauuaucucuacauuucaccugagcauuccgaauuucaaccaguaugaagccauguccugugacuuuaauggaggcaagaucagcguccaguacaaccucucucacuccuaugcuggcgaugccgcuaaucauugcgggaccguggccaacggaguucugcaaacauucaugcgcauggcguggggcgggagcuacauugcccuugacucuggacacggcuccugggauuguaucaugaccagcuaccaguaucugauuauccagaacacgacaugggaggaccauugccaguuuucuagacccuccccuaucggguaccucggacugcuuagccaacggacccgcgauauuuauaucuccagacggcugcucggcacauucaccuggacccugucugacagcgaaggcaaggauacacccgggggauacugucugacgcgcuggaugcucauugaggcugagcugaaaugcuuuggcaauaccgccguggcuaaguguaacgaaaaacacgacgaggaguucugcgauaugcuuagacuguuugacuucaauaagcaggccauccagcggcucaaagcggaagcccagauguccauucaacugaucaacaaggcugucaaugcccuuaucaacgaucagcugauuaugaagaaucaccuccgcgacaucauggggauuccuuauugcaacuacagcaaauauugguaccugaaucauacaaccacaggaaagaccucucugcccaaauguuggcucguguccaacggcagcuaccugaaugaaacgcacuucucugacgauaucgagcagcaagcugacaacaugauuacagagaugcuucagaaggaauauauggagagacaggggaaaaccccucugggacucguggaucuguuugucuucagcaccuccuuuuaccugaucucuaucuuccuucaucucguuaagauuccgacacaccggcauaucgugggcaaaagcugccccaagccucaccgccugaaucacaugggcauuuguuccugcgggcuguauaagcagcccggagugccugucaaauggaagagaugaggacuagucccuguucccagagcccacuuuuuuuucuuuuuuugaaauaaaauagccugucuuucagaucucaaaggcucuuuucagagccaccaaaaaaaaaaaaaaaaaaaaaaaaaaaaaaaaaaaaaaaaaaaaaaaaaaaaaaaaaaaaaaaaagaauu

SEQ ID NO: 14431 - RNA, 1736 nt, Artificial Sequence
  mRNA product Design a-2 (hSL-A64-N5) comprising derived and/or modified sequence from LASV(G1442-SLE-2011;Clade IV)__AIT17180__GPC (opt5)
aggagaguccgcucagccagguugcagaagcggcuuagcguguguccuaaucuucucucugcguguagguaggccugugccgcaaacaagcuuaccaugggccagaucgugaccuucuuucaagaggucccccacguuauugaagaggugaugaacaucgugcugauugcccucagcauccuggcuguccuuaaggggcuguacaauguggccacaugcggacucauuggccugguuacguuccuucugcucugugggagauccugcaccacaacccuguauaaaggaguguacgaacugcagacacucgagcugaacauggaaacccuuaauaugacaaugccucugucuuguaccaagaacaauagccaucacuauauccgggucggcaacgagacggggcucgagcugacccuuacaaauaccuccaucauuaaccauaaauuuugcaaucugucugacgcgcacaagaaaaaccucuacgaucaugcucugaugagcaucauuuccacauuccaccugucuaucccgaauuuuaaccaguaugaagccaugagcugugacuucaauggaggcaagauuuccgugcaguacaaccucagccacucuuaugccggcgaugcugccaaucauugcgggaccguugcuaacggagugcugcaaacguuuaugcgcauggccuggggcggguccuacaucgcgcuugacagcggaagaggcaacugggauuguauuaugacaucuuaccaguaucugaucauccagaauaccacaugggacgaucacugccaguucucccggcccagcccuauuggguaccucggacugcuuucucaacgcaccagagacgucuauaucucccggcgccugcucggcaccuuuacauggacgcugagcgauuccgagggcaaggacacccccgggggauacugucugacaagauggaugcucauugaagccgagcugaaaugcuucggcaacaccgcuguggccaaguguaaugagaaacaugaugaagaguuuugcgacaugcuucggcuguucgauuuuaacaagcaggcuauccagcgccucaaagccgaagcgcagaugucuauucaacugaucaauaaggccgugaacgcucuuaucaaugaccagcugauuaugaagaaccaccucagagacaucauggggauuccuuauugcaauuacagcaaauauugguaccugaacaauacagccaccggaaagacgucccugcccaaauguuggcucaucagcaacggcucuuaccugaaugagacacacuucuccgaugacauugaacaggaggcugauaacaugaucaccgagaugcuucaaaaggaauauauggagcggcaggggaaaaccccucugggacucgucgaccuguucguuuuuagcacaucuuucuaccugaucagcauuuuucuucaucucgugaagaucccgacccaccgccauauugugggcaaauccugccccaagccucacagacugaaucauaugggcaucuguucuugcgggcuguauaagcagcccggagucccugugcgguggaaacgcugaggacuagucccuguucccagagcccacuuuuuuuucuuuuuuugaaauaaaauagccugucuuucagaucucaaaggcucuuuucagagccaccaaaaaaaaaaaaaaaaaaaaaaaaaaaaaaaaaaaaaaaaaaaaaaaaaaaaaaaaaaaaaaaaagaauu

SEQ ID NO: 14432 - RNA, 1736 nt, Artificial Sequence
  mRNA product Design a-2 (hSL-A64-N5) comprising derived and/or modified sequence from LASV(G3010-SLE-2013;Clade IV)__AIT17344__GPC (opt5)
aggagaguccgcucagccagguugcagaagcggcuuagcguguguccuaaucuucucucugcguguagguaggccugugccgcaaacaagcuuaccaugggccagaucgugaccuucuuucaagaggucccccacguuauugaagaggugaugaacaucgugcugauugcccucagcauccuggcuguccuuaaggggcuguacaauuucgccacaugcggacucgugggccugguuacguuucuucugcucugugggagauccugcaccacaucucuguauaaaggaguguacgaacugcagacccucgagcugaacauggaaacacuuaauaugaccaugccucugagcuguacaaagaacaauucccaucacuauauuauggucggcaacgagaccgggcucgagcugacgcuuaccaauacaucuaucaucaaccauaaauucugcaaucugagcgacgcgcacaagaaaaaccucuacaaucaugcucugauguccauuaucucuaccuuucaccugagcauuccgaacuucaaucaguaugaagccauguccugugauuuuaacggaggcaagaucagcgugcaguacaaucucucucacuccuaugccggcgacgcugccagccauugcgggacaguugcuaacggagugcugcaaaccuucaugcggauggccuggggcgggucuuacauugcgcuugauuccggauacggcaagugggacuguaucaugacgagcuaucaguaccugauuauccagaacacaaccugggaggaucacugccaguuuucucgccccuccccuaucggguaucucggacugcuuagccaaagaacacgggacauuuacaucucccgcagacugcucggcaccuucaccuggacacugucugauagcgaaggcaaagacacgcccgggggauauugucugacccgguggaugcucauugaggccgagcugaagugcuuuggcaauacagcugucgccaaauguaacgaaaagcaugaugaggaguucugcgacaugcuucgccuguuugauuucaauaaacaggcuauccagagacucaagaccgaagcccagauguccauucaacugaucaacaaggcggugaaugcccuuaucaacgaccagcugauuaugaaaaaucaccuccgggauaucauggggauuccuuacugcaacuauagcaaguacugguaccugaaucacacaaccacgggaaaaacaucucugcccaaguguuggcucguguccaacggcagcuaucugaaugaaacccauuucucugacgacaucgagcagcaagcugauaacaugauuaccgagaugcuucagaaagaauacauggagcgccaggggaagacaccucugggacucgucgaccuguuuguuuucagcaccuccuuuuaucugaucucuaucuuccuucaccucgugaaaauuccgacacauagacacaucgugggcaagagcugccccaagccucaucggcugaaucacaugggcauuuguuccugcgggcuguacaaacagcccggagucccugugcgcuggaagagaugaggacuagucccuguucccagagcccacuuuuuuuucuuuuuuugaaauaaaauagccugucuuucagaucucaaaggcucuuuucagagccaccaaaaaaaaaaaaaaaaaaaaaaaaaaaaaaaaaaaaaaaaaaaaaaaaaaaaaaaaaaaaaaaaagaauu

SEQ ID NO: 14433 - RNA, 1736 nt, Artificial Sequence
  mRNA product Design a-2 (hSL-A64-N5) comprising derived and/or modified sequence from LASV(G502-SLE-2009;Clade IV)__AIT17126__GPC (opt5)
aggagaguccgcucagccagguugcagaagcggcuuagcguguguccuaaucuucucucugcguguagguaggccugugccgcaaacaagcuuaccaugggccagaucgugaccuucuuucaagaggucccccacguuauugaagaggugaugaacaucgugcugauugcccucagcauccuggcuguccuuaaggggcuguacaauuucgccacaugcggacucgugggccugcuuacguuucugcuccugugugggagauccugcaccacaggacuguauaaaggcguuuacgaacuccagacccuggagcuuaacauggaaacacugaauaugaccaugccucucucuuguacaaagaacaauagccaucacuauauuaugguggggaacgagaccggacuggagcuuacgcugaccaauacauccaucaucaaccauaaauucugcaaucucucugacgcgcacaagaaaaaccuguacgaucaugcucugaugagcauuaucuccaccuuucaccucucuauuccgaauuucaaccaguaugaagccaugagcugugacuuuaauggcggcaagaucuccguccaguacaaccugagccacucuuaugccggggaugcugccgaccauugcggaacaguggcuaauggcguucuucaaaccuucaugcggauggccuggggaggguccuacauugcgcuggauagcggccgcgggagaugggacuguaucaugacgucuuaccaguaucucauuauccagaacacaaccugggaggaucacugccaguuuucccggcccagcccuaucggauaccugggccuucugucucaacgcacaagagacauuuauaucucccggcgccuccugggcaccuucaccuggacacugagcgauuccgaagggaaggacacgcccggaggcuacugucucaccagauggaugcugauugaggccgagcuuaaaugcuuugggaacacagcuguggccaaguguaaugaaaaacaugaugaggaguucugcgacaugcugcggcucuuugauuucaacaagcaggcuauccagcgccugaaagccgaagcgcagaugucuauucaacuuaucaauaaggccgucaacgcucugaucaaugaccagcucgugaugaagaaccaccugagagacauuaugggaaucccuuauugcaauuacagccgguauugguaccugaaccacaccacaaccggccgcacgucccuccccaaauguuggcuggugagcaaugggucuuaccuuaacgaaacacauuucuccgaugacauugagcagcaagccgauaauaugaucaccgagaugcugcagaaggaauauauggagagacagggaaaaaccccucucggccuggucgaccuguuuguuuucagcacaucuuuuuaccuuauuagcaucuuccuccaccuggugaagaucccgacccaucggcacauugugggcaaauccugccccaagccucaucgccugaaccacauggggaucuguucuugcggacucuauaaacagcccggcgucccugugaaguggaagagaugaggacuagucccuguucccagagcccacuuuuuuuucuuuuuuugaaauaaaauagccugucuuucagaucucaaaggcucuuuucagagccaccaaaaaaaaaaaaaaaaaaaaaaaaaaaaaaaaaaaaaaaaaaaaaaaaaaaaaaaaaaaaaaaaagaauu

SEQ ID NO: 14434 - RNA, 1736 nt, Artificial Sequence
  mRNA product Design a-2 (hSL-A64-N5) comprising derived and/or modified sequence from LASV(G733-SLE-2010;Clade IV)__AIT17154__GPC (opt5)
aggagaguccgcucagccagguugcagaagcggcuuagcguguguccuaaucuucucucugcguguagguaggccugugccgcaaacaagcuuaccaugggccagaucgugaccuucuuucaagaggucccccacguuauugaagaggugaugaacaucgugcugauugcccucagcauccuggcuguccuuaaggggcuguacaauuucgccacaugcggaauugugggccucguuuccuuucugcuucugugugggagaucuugcacgaccagccucuauaaaggaguguacgaacugcagacacuggagcucaacauggaaacccugaauaugacaaugccucuuuccuguaccaagaacaauucucaucacuauaucauggucggcaacgagacagggcuggagcucacccugacgaauaccagcaucauuaaccauaaauucugcaaucuuuccgacgcgcacaagaaaaaccuguacgaucaugcucucaugucuaucauuagcacauuucaccuguccaucccgaauuucaaccaguaugaagccaugagcugugacuuuaauggaggcaagauuucugugcaguacaaccugucccacagcuaugccggcgaugcugccaaucauugcgggaccaucgcuaacggaguucuccaaacauucaugcggauggccuggggcgggucuuacauugcgcuggacuccggacgcgauagaugggacuguaucaugaccagcuaccaguaucuuaucauucagaacacgacaugggaggaucacugccaguuuucucggcccuccccuaucggcuaccuggggcuccugagccaacgcaccagagacauuuauaucucccggcgccuucugggaacauucaccuggacccucucugauagcgaaggcaaggacacacccggcggguacugucugacgagauggaugcugauugaggccgagcucaaaugcuuuggaaauaccgcuguggccaaguguaacgaaaaacaugaugaggaguucugcgacaugcugcggcuuuuugauuucaauaagcaggcuauccagcgccugaaagccgaagcgcagauguccauccaacucauuaacaaggccgucaaugcucugaucaacgaccagcuuauuaugaagaaucaccugagagacaucaugggcauuccuuauugcaacuacagcaaauauugguaccucaaucacacaaccacagggaagaccucucugcccaaauguuggcugguguccaacggaagcuaccucaaugaaacgcauuucucugaugacaucgagcagcaagccgauaacaugaucacagagaugcugcagaaggaauauauggagcggcagggcaaaaccccucuugggcugguggaccucuuugucuucagcaccuccuuuuaccugauuucuaucuuccugcaccuuguuaagauuccgacacaucgccacguggugggaaaaagcugccccaagccucauagacucaaucacaugggcaucuguuccugcggccuguaugggcagcccggagucccugugaaguggaaacggugaggacuagucccuguucccagagcccacuuuuuuuucuuuuuuugaaauaaaauagccugucuuucagaucucaaaggcucuuuucagagccaccaaaaaaaaaaaaaaaaaaaaaaaaaaaaaaaaaaaaaaaaaaaaaaaaaaaaaaaaaaaaaaaaagaauu

SEQ ID NO: 14435 - RNA, 1736 nt, Artificial Sequence
  mRNA product Design a-2 (hSL-A64-N5) comprising derived and/or modified sequence from MOPV/LASV reassortant(IGS-1;Clade IV)__AFY05576__GPC (opt5)
aggagaguccgcucagccagguugcagaagcggcuuagcguguguccuaaucuucucucugcguguagguaggccugugccgcaaacaagcuuaccaugggccagaucgugaccuucuuucaagaggucccccacguuauugaagaggugaugaacaucgugcugauugcccucagcguccuggcugugcuuaaggggcuguacaauuucgccacaugcggacucguuggccuggugacguuucuucugcucugugggagauccugcaccacaucucuguauaaaggagucuacgaacugcagacccucgagcugaacauggaaacacuuaauaugaccaugccucugagcuguacaaagaacaauucccaucacuauaucauggugggcaacgagaccgggcucgagcugacgcuuaccaauacaucuauuaucaaccauaaauucugcaaucugagcgacgcgcacaagaaaaaccucuacgaucaugcucugauguccaucauuucuaccuuucaccugagcaucccgaauuucaaccaguaugaagccauguccugugacuuuaauggaggcaagauuagcguucaguacaaccucucucacuccuaugccggcgaugcugccaaucauugcgggacaguggcuaacggaguccugcaaaccuucaugcggauggccuggggcgggagcuacaucgcgcuugacucuggacgcggcaacugggauuguauuaugacguccuaccaguaucugaucauucagaauacaaccugggaggaccacugccaguuuagcagacccucuccuaucggguaccucggacugcuuucccaacggacacgcgauaucuauauuagcagacggcugcucggcaccuucaccuggacacuguccgacucugaaggcgaggauacgcccgggggauacugucugacccgcuggaugcucaucgaggccgaacugaagugcuuuggcaacacagcuguggccaaauguaaugagaagcaugacgaagaguucugcgauaugcuuagacuguuugacuucaacaaacaggcuauucagcggcucaaggccgaagcgcagaugagcauccaacugauuaauaaagccgugaacgcucuuaucaaugaucagcugaucaugaagaaccaccuccgcgacauuauggggaucccuuauugcaauuacuccaaguauugguaccugaaccacaccacaaccggaagaacgagccugcccaaauguuggcucgucucuaauggcuccuaccugaacgagacacauuucagcgacgauauugagcagcaagccgacaauaugaucaccgaaaugcuucagaaggaguauauggaacggcaggggaaaaccccucugggacucguugaucuguuuguguucucuaccagcuuuuaccugauuuccaucuuccuucaccucgugaagaucccgacacaucgccacauugucggcaaaucuugccccaagccucauagacugaaccacaugggcaucuguagcugcgggcuguauaaacagcccggagugccuguuaaguggaagcggugaggacuagucccuguucccagagcccacuuuuuuuucuuuuuuugaaauaaaauagccugucuuucagaucucaaaggcucuuuucagagccaccaaaaaaaaaaaaaaaaaaaaaaaaaaaaaaaaaaaaaaaaaaaaaaaaaaaaaaaaaaaaaaaaagaauu

SEQ ID NO: 14436 - RNA, 1736 nt, Artificial Sequence
  mRNA product Design a-2 (hSL-A64-N5) comprising derived and/or modified sequence from LASV(LM765-SLE-2012;Clade IV)__AIT17814__GPC (opt5)
aggagaguccgcucagccagguugcagaagcggcuuagcguguguccuaaucuucucucugcguguagguaggccugugccgcaaacaagcuuaccaugggccagaucgugaccuucuuucaagaggucccccacguuauugaagaggugaugaacaucgugcugauugcccucagcauccuggcuguccuuaaggggcuguacaauuucgccacaugcggacucgugggccugguuacguuucuucugcucugugggagauccugcaccacaucucuguauaaaggaguguacgaacugcagacccucgagcugaacauggaaacacuuaauaugaccaugccucugagcuguacaaagaacaauucccaucacuauauuauggucggcaacgagaccgggcucgagcugacgcuuaccaauacaucuaucaucgaccauaaauucugcaaccugagcgaugcgcaccggaagaaucucuacgaccaugcucugauguccauuaucucuaccuuucaccugagcauuccgaacuucaaucaguaugaagccauguccugugauuuuaacggaggcaaaaucagcgugcaguacaaucucucucacuccuaugccaaggacgcugccgaucauugcggcacaguugcuaacggggugcugcaaaccuucaugcgcauggccuggggaggcagcuacauugcgcuugacucugggagaggacggugggauuguaucaugacguccuaccaguaucugauuauccagaauacaaccugggaggaccacugccaguuuagccgccccucuccuaucggcuaccucgggcugcuuucccaaagaacacgggauauuuauaucagccgcagacugcucggaaccuucaccuggacacuguccgacucugaaggcaaggauacgcccggcggguacugucugacccgguggaugcucauugaggccgagcugaaaugcuuuggaaacacagcugucgccaaguguaacgaaaaacaugacgaggaguucugcgauaugcuucgccuguuugacuucaauaagcaggcuauccagagacucaaagccgaagcgcagaugagcauucaacugaucaacaaggccgugaaugcucuuaucaacgaccagcugauuaugaagaaucaccuccgggauaucaugggcauuccuuauugcaacuacuccaaauauugguaccugaaucacaccacaaccgggaagacgagccugcccaaauguuggcucgugucuaacggauccuaccugaaugaaacacauuucagcgacgauaucgagcagcaagccgacaacaugauuaccgagaugcuucagaaggaauauauggagcgccagggcaaaaccccucuggggcucgucgaucuguuuguuuucucuaccagcuuuuaccugaucuccaucuuccuucaccucgugaagauuccgacacauagacacaucgugggaaaacccugcccuaagccccaucggcugaaucacaugggcauuuguucuugcggccuguauaagcagccugggguccccgugaaauggaagcgcugaggacuagucccuguucccagagcccacuuuuuuuucuuuuuuugaaauaaaauagccugucuuucagaucucaaaggcucuuuucagagccaccaaaaaaaaaaaaaaaaaaaaaaaaaaaaaaaaaaaaaaaaaaaaaaaaaaaaaaaaaaaaaaaaagaauu

SEQ ID NO: 14437 - RNA, 1736 nt, Artificial Sequence
  mRNA product Design a-2 (hSL-A64-N5) comprising derived and/or modified sequence from LASV(LM776-SLE-2012;Clade IV)__AIT17824__GPC (opt5)
aggagaguccgcucagccagguugcagaagcggcuuagcguguguccuaaucuucucucugcguguagguaggccugugccgcaaacaagcuuaccaugggccagaucgugaccuucuuucaagaggucccccacguuauugaagaggugaugaacaucgugcugauugcccucagcauccuggcuguccuuaaggggcuguacaauuucgccacaugcggacucgugggccugguuacguuucuucugcucugugggagauccugcaccacaucuguguauaaaggagucuacgaacugcagacccuggagcucaacauggaaacacugaauaugaccaugccucuuagcuguacaaagaacaauucccaucacuauauuauggugggcaacgagaccgggcuggagcucacgcugaccaauacaucuaucaucaaccauaaauucugcaaucuuagcgacgcgcacaagaaaaaccuguacgaucaugcucucauguccauuaucucuaccuuucaccugagcauuccgaauuucaaccaguaugaagccauguccugugacuuuaauggaggcaagaucagcguucaguacaaccugucucacuccuaugccggcgaugcugccaaucauugcgggacaguggcuaacggaguccuccaaaccuucaugcggauggccuggggcgggagcuacauugcgcuggacucuggacacggcaagugggauuguaucaugacguccuaccaguaucuuauuauccagaacacaaccugggaggaccauugccaguuuagccgccccucuccuaucggguaccugggacuccugucccaaagaacacgggauauuuauaucagccgcagacuucugggcaccuucaccuggacacucuccgacucugaaggcaaagauacgcccgggggauacugucugacccgguggaugcugauugaggccgagcucaagugcuuuggcaauacagcuguggccaaauguaacgaaaagcacgacgaggaguucugcgauaugcugcgccuuuuugacuucaauaaacaggcuauccagagacugaaggccgaagcgcagaugagcauucaacucaucaacaaggccgugaaugcucugaucaacgaucagcuuauuaugaaaaaucaucugcgggacaucauggggauuccuuauugcaacuacuccaaguauugguaccucaaucacaccacaaccggaaaaacgagccugcccaaguguuggcuggucucuaacggcuccuaccucaaugaaacacacuucagcgacgauaucgagcagcaagccgacaacaugauuaccgagaugcugcagaaagaauauauggagcgccaggggaagaccccucuuggacugguugaucucuuuguguucucuaccagcuuuuaccugaucuccaucuuccugcaucuugugaaaauuccgacacacagacauaucgucggcaagucuugccccaagccucaccggcucaaucacaugggcauuuguagcugcgggcuguauaaacagcccggagugccuguucgcuggaagagaugaggacuagucccuguucccagagcccacuuuuuuuucuuuuuuugaaauaaaauagccugucuuucagaucucaaaggcucuuuucagagccaccaaaaaaaaaaaaaaaaaaaaaaaaaaaaaaaaaaaaaaaaaaaaaaaaaaaaaaaaaaaaaaaaagaauu

SEQ ID NO: 14438 - RNA, 1736 nt, Artificial Sequence
  mRNA product Design a-2 (hSL-A64-N5) comprising derived and/or modified sequence from LASV(Mad39;Clade IV)__ANH09722__GPC (opt5)
aggagaguccgcucagccagguugcagaagcggcuuagcguguguccuaaucuucucucugcguguagguaggccugugccgcaaacaagcuuaccaugggccagaucgugaccuucuuucaagaggucccccacguuauugaagaggugaugaacaucgugcugauugcccucagcauccuggcuguccuuaaggggcuguacaauguggccacaugcggacucauuggccugguuacguuccuucugcucugugggagauccugcaccacaacccuguauaaaggaguguacgaacugcaggcgcucgagcugaacauggaaacacuuaauaugaccaugccucugucuuguacaaagaacaauagccaucacuauauccgggucggcaacgagaccgggcucgagcugacgcuuaccaauacaucccugaucaaccauaaauuuugcaaucucucugacgcucacaagaaaaaccuguacgaucaugcccugaugagcauuaucuccaccuuccaccucucuauuccgaauuuuaaccaguaugaagccaugagcugugacuucaaugauggaaagaucuccgugcaguacaaccugagccacacauaugcuggcgacaccgccaaucauugcggcacgguugcuaacggggugcuucaaacauuuaugcgcauggccuggggaggcucuuacauugcgcuggauuccgggagaggaggcugggacuguaucaugaccagcuaccaguaucucauuauccagaacacaaccugggaggaucacugccaguucucucggcccuccccuaucggguaccugggacuucugagccaacgcaccagagacauuuauaucucucggcgccuccugggcacauuuacguggacccuguccgauagcgaaggcaaggacacacccgggggauacugucucaccagauggaugcugauugaggccgagcuuaaaugcuucggcaauacagcugucgccaaguguaacgaaaaacaugaugaggaauuuugcgacaugcugcgccucuucgauuuuaauaagcaggcuauccagcggcugaaagccgaggcgcagauguccauucaacuuaucaacaaggccgugaaugcucugaucaacgaccagcucauuaugaagaaucaccugagagacaucauggggauuccuuauugcaacuacucuaaauauugguaccugaaucacaccgugacgggaaagacaagccuccccaaauguuggcuggucuccaacggcagcuaccuuaaugaaacccauuucucugaugacaucgagcagcaagccgauaacaugauuaccgagaugcugcagaaggaauauauggagcggcaggggaaaacaccucucggacugguugaccuguucguguuuuccaccagcuucuaccuuaucucuaucuuucuccaccuggugaagauuccgacacaucgccacgucgugggcaaacccugcccuaagccccauagacugaaucacaugggcaucuguagcugcggguucuauaagcagccuggaguucccgugcgguggaaacgcugaggacuagucccuguucccagagcccacuuuuuuuucuuuuuuugaaauaaaauagccugucuuucagaucucaaaggcucuuuucagagccaccaaaaaaaaaaaaaaaaaaaaaaaaaaaaaaaaaaaaaaaaaaaaaaaaaaaaaaaaaaaaaaaaagaauu

SEQ ID NO: 14439 - RNA, 1736 nt, Artificial Sequence
  mRNA product Design a-2 (hSL-A64-N5) comprising derived and/or modified sequence from LASV(Z0947-SLE-2011;Clade IV)__AIT17840__GPC (opt5)
aggagaguccgcucagccagguugcagaagcggcuuagcguguguccuaaucuucucucugcguguagguaggccugugccgcaaacaagcuuaccaugggccagaucgugaccuucuuucaagaggucccccacguuauugaagaggugaugaacaucgugcugauugcccucagcauccuggcuguccuuaaggggcuguacaauuucgccacaugcggacucgugggccugguuacguuucuucugcucugugggagauccugcaccauuucucuguauaaaggaguguacgaacugcagacacucgagcugaacauggaaacccuuaauaugacaaugccucugagcuguaccaagaacaauucccaucacuauaucauggucggcaacgagacagggcucgagcugacccuuacgaauaccucuaucauuaaccauaaauucugcaaucugagcgacgcgcacaagaaaaaccucuacgaucaugcucugauguccaucauuucuacauuucaccugagcaucccgaauuucaaccaguaugaagccauguccugugacuuuaauggaggcaagauuagcgugcaguacaaccucucucacuccuaugccggcgaugcugccaaucauugcgggaccguugcuaacggagugcugcaaacauucaugcggauggccuggggcgggagcuacaucgcgcuugacucuggacgcgauagaugggacuguauuaugaccuccuaccaguaucugaucauccagaacacgacaugggaggaucacugccaguuuagccggcccucuccuauuggcuaccucgggcugcuuucccaacgcaccagagacaucuauauuagccggcgccugcucggaacauucaccuggacccuguccgauucugaaggcaaggacacacccggcggguacugucugacgagauggaugcucaucgaggccgagcugaaaugcuuuggaaauaccgcugucgccaaguguaacgaaaaacaugaugaggaguucugcgacaugcuucggcuguuugauuucaauaagcaggcuauucagcgccucaaagccgaagcgcagaugagcauccaacugaucaacaaggccgugaaugcucuuauuaacgaccagcugaucaugaagaaucaccucagagacauuaugggcaucccuuauugcaacuacuccaaauauugguaccugaaucacacaaccacagggaagaccagccugcccaaauguuggcucgugucuaacggauccuaccugaaugaaacgcauuucagcgaugacauugagcagcaagccgauaacaugaucacagagaugcuucagaaggaauauauggagcggcagggcaaaaccccucuggggcucgucgaccuguuuguuuucucuaccagcuuuuaccugaucuccauuuuccuucaccucgugaagaucccgacacaucgccacauugugggaaaacccugcccuaagccccauagacugaaucacaugggcaucuguucuugcggccuguauaagcagccugggguccccgugaaauggaagcggugaggacuagucccuguucccagagcccacuuuuuuuucuuuuuuugaaauaaaauagccugucuuucagaucucaaaggcucuuuucagagccaccaaaaaaaaaaaaaaaaaaaaaaaaaaaaaaaaaaaaaaaaaaaaaaaaaaaaaaaaaaaaaaaaagaauu

SEQ ID NO: 14440 - RNA, 1767 nt, Artificial Sequence
  mRNA product Design a-2 (hSL-A100) comprising derived and/or modified sequence from LASV(Josiah;Clade IV)__NP_694870__GPC (opt1)
aggagaguccgcucagccagguugcagaagcggcuuagcguguguccuaaucuucucucugcguguagguaggccugugccgcaaacaagcuuaccaugggccagaucgugaccuucuuccaggaggucccccacgugaucgaggaggugaugaacaucguccugaucgcccucagcgugcuggccgugcugaaggggcucuacaacuucgcgaccugcggccuggucgggcuggugacguuccuccugcugugcggccgcuccugcaccaccagccucuacaaggggguguacgagcugcagacccuggagcucaacauggagacgcugaacaugaccaugccgcuguccugcaccaagaacaacagccaccacuacaucauggucggcaacgagaccggccucgagcugacgcugaccaacaccuccaucaucaaccacaaguucugcaaccucagcgacgcccacaagaagaaccuguacgaccacgcccugauguccaucaucagcaccuuccaccucuccauccccaacuucaaccaguacgaggccaugagcugcgacuucaacgggggcaagaucuccgugcaguacaaccugagccacuccuacgccggggacgcggccaaccacugcggcacgguggccaacgggguccugcagaccuucaugcggauggccuggggcggcagcuacaucgcgcucgacuccgggcgcggcaacugggacugcaucaugaccagcuaccaguaccugaucauccagaacaccacgugggaggaccacugccaguucucccggcccagccccaucggguaccugggccuccugucccagcgcacccgggacaucuacaucagccgccggcugcucggcaccuucaccuggacgcugagcgacuccgaggggaaggacaccccgggcggguacugccugacccgcuggaugcucaucgaggccgagcugaagugcuucggcaacaccgccguggccaagugcaacgagaagcacgacgaggaguucugcgacaugcugcggcuguucgacuucaacaagcaggccauccagcgccugaaggcggaggcccagaugagcauccagcugaucaacaaggccgugaacgcccucaucaacgaccagcugaucaugaagaaccaccuccgggacaucauggggauccccuacugcaacuacuccaaguacugguaccucaaccacacgaccaccggccgcaccagccugcccaagugcuggcuggucuccaacggcagcuaccucaacgagacgcacuucuccgacgacaucgagcagcaggccgacaacaugaucaccgagaugcugcagaaggaguacauggagcggcaggggaagacgccccugggccucguggaccuguucguguucagcaccuccuucuaccugaucagcaucuuccugcaccucgucaagaucccgacccaccgccacaucguggggaaguccugccccaagccccaccggcugaaccacaugggcaucugcagcugcgggcuguacaagcagcccggcgugccggucaaguggaagcgcugaggacuagucccuguucccagagcccacuuuuuuuucuuuuuuugaaauaaaauagccugucuuucagaucucaaaggcucuuuucagagccaccaaaaaaaaaaaaaaaaaaaaaaaaaaaaaaaaaaaaaaaaaaaaaaaaaaaaaaaaaaaaaaaaaaaaaaaaaaaaaaaaaaaaaaaaaaaaaaaaaaaaa

SEQ ID NO: 14441 - RNA, 1764 nt, Artificial Sequence
  mRNA product Design a-2 (hSL-A100) comprising derived and/or modified sequence from LASV(LP;Clade I)__AAF86701__GPC (opt1)
aggagaguccgcucagccagguugcagaagcggcuuagcguguguccuaaucuucucucugcguguagguaggccugugccgcaaacaagcuuaccaugggccagaucaucaccuucuuccaggaggugccccacgucaucgaggaggugaugaacaucgugcugaucgcccucagccugcuggccauccucaaggggcuguacaacaucgcgaccugcggcaucaucgggcuggucgccuuccucuuccugugcggcaaguccugcagccugacgcucaagggcggguacgagcugcagacccuggagcucaacauggagacccugaacaugaccaugccgcuguccugcacgaagaacagcucccaccacuacauccgcgugggcaacgagaccgggcucgagcugacccugaccaacacgagcaucaucaaccacaaguucugcaaccucuccgacgcccacaagaagaaccuguacgaccacgcccugaugagcaucaucuccaccuuccaccucagcauccccaacuucaaccaguacgaggccauguccugcgacuucaacggcgggaagaucagcgugcaguacaaccugucccacagcuacgcgggcgacgccgccgagcacugcgggaccgucgccaacggcgugcugcagaccuucaugcggauggcguggggcgggcgcuacaucgcccucgacuccggcaaggggaacugggacugcaucaugacgagcuaccaguaccugaucauccagaacaccaccugggaggaccacugccaguucucccggcccagccccaucggcuaccugggccuccugucccagcgcacccgggacaucuacaucagccgccggcugcucgggacguucaccuggacccugagcgacuccgagggcaacgagacccccgggggcuacugccugacgcgcuggaugcucaucgaggccgagcugaagugcuucgggaacaccgccguggccaagugcaacgagaagcacgacgaggaguucugcgacaugcugcggcuguucgacuucaacaagcaggcgauccgccggcugaaggccgaggcccagaugagcauccagcugaucaacaaggccgucaacgcccucaucaacgaccagcugaucaugaagaaccaccuccgcgacaucaugggcauccccuacugcaacuacuccaaguacugguaccucaaccacaccagcuccggccggaccagccugcccaagugcuggcugaucuccaacgggagcuaccucaacgagacgcaguucuccgacgacaucgagcagcaggcggacaacaugaucaccgagaugcugcagaaggaguacaucgagcgccagggcaagaccccgcuggggcucguggacaucuucaucuucagcaccuccuucuaccugaucagcaucuuccugcaccugaucaagaucccgacgcaccggcacaucgugggcaagcccugccccaagccccaccgccucaaccacaugggggucugcuccugcggccuguacaagcacccgggcgugcccaccaaguggaagcggugaggacuagucccuguucccagagcccacuuuuuuuucuuuuuuugaaauaaaauagccugucuuucagaucucaaaggcucuuuucagagccaccaaaaaaaaaaaaaaaaaaaaaaaaaaaaaaaaaaaaaaaaaaaaaaaaaaaaaaaaaaaaaaaaaaaaaaaaaaaaaaaaaaaaaaaaaaaaaaaaaaaaa

SEQ ID NO: 14442 - RNA, 1764 nt, Artificial Sequence
  mRNA product Design a-2 (hSL-A100) comprising derived and/or modified sequence from LASV(803213;Clade II)__AAF86703__GPC (opt1)
aggagaguccgcucagccagguugcagaagcggcuuagcguguguccuaaucuucucucugcguguagguaggccugugccgcaaacaagcuuaccaugggccagaucaucaccuucuuccaggaggugccccacgucaucgaggaggugaugaacaucgugcugaucgcccucagccugcuggccauccucaaggggaucuacaacgucgcgaccugcggccuguucgggcugaucuccuuccuccugcugugcggccgcagcugcuccgugacguacaaggggguguacgagcuccagacccuggagcugaacauggccaaccucaacaugaccaugccgcugagcugcaccaagaacaacucccaccacuacaucauggucggcaacgagacgggccuggagcucacccugaccaacaccagcaucaucaaccacaaguucugcaaccuguccgacgcccacaagaagaaccucuacgaccacgcccugaugagcaucaucuccacguuccaccugagcauccccaacuucaaccaguacgaggccauguccugcgacuucaacgggggcaagaucagcgugcaguacaaccucucccacagcuucgcgguggacgccgccaaccacugcgggaccaucgccaacggcguccugcagaccuucaugcggauggcguggggcggguccuacaucgcccuggacagcggcaaggggaacugggacugcaucaugaccuccuaccaguaccucaucauccagaacacgaccugggaggaccacugccaguucagccgccccucccccaucggcuaccuggggcugcucagccagcggacccgcgacaucuacaucagccggcgccugcugggcaccuucacguggacccucuccgacagcgagggcaacgaggcccccgggggcuacugccugacccgguggaugcugaucgaggccgagcucaagugcuucgggaacaccgccguggcgaagugcaacgagaagcacgacgaggaguucugcgacaugcugcgccuguucgacuucaacaagcaggccaucaagcggcucaagacggaggcccagauguccauccagcugaucaacaaggccgugaacgcccugaucaacgaccagcucaucaugaagaaccaccuccgcgacaucaugggcauccccuacugcaacuacagccgguacugguaccugaaccacaccgucaccgggaagaccucccugccccgcugcuggcuggugagcaacggcuccuaccugaacgagacgcacuucagcgacgacaucgagcagcaggcggacaacaugaucaccgagaugcuccagaaggaguacauggaccggcagggcaagaccccgcuggggcugguggaccucuucgucuucuccaccagcuucuaccugaucuccaucuuccugcaccuggugaagaucccgacgcaccgccacaucgugggcaagcccugccccaagccccaccggcucaaccacauggggaucugcagcugcggccuguacaagcacccggggguccccgugaaguggaagcgcugaggacuagucccuguucccagagcccacuuuuuuuucuuuuuuugaaauaaaauagccugucuuucagaucucaaaggcucuuuucagagccaccaaaaaaaaaaaaaaaaaaaaaaaaaaaaaaaaaaaaaaaaaaaaaaaaaaaaaaaaaaaaaaaaaaaaaaaaaaaaaaaaaaaaaaaaaaaaaaaaaaaaa

SEQ ID NO: 14443 - RNA, 1764 nt, Artificial Sequence
  mRNA product Design a-2 (hSL-A100) comprising derived and/or modified sequence from LASV(GA391;Clade III)__CAA36645__GPC (opt1)
aggagaguccgcucagccagguugcagaagcggcuuagcguguguccuaaucuucucucugcguguagguaggccugugccgcaaacaagcuuaccaugggccagaucgugaccuucuuccaggaggucccccacgugaucgaggaggugaugaacaucguccugaucgcccucagcauccuggccauccugaaggggcucuacaacguggcgaccugcggccugaucgggcuggugacguuccuccugcuguccggccgcagcugcucccucaucuacaaggggaccuacgagcugcagacccuggagcucaacauggagacccugaacaugacgaugccgcugagcugcaccaagaacaacucccaccacuacauccgggucggcaacgagaccggccucgagcugacccugacgaacaccagcauccucaaccacaaguucugcaaccuguccgacgcccacaagcgcaaccuguacgaccacagccucauguccaucaucagcaccuuccaccuguccauccccaacuucaaccaguacgaggccaugagcugcgacuucaacgggggcaagaucaccgugcaguacaaccugucccacagcuucgccguggacgccgcggggcacugcggcacgcucgccaacgggguccugcagaccuucaugcggauggccuggggcggcuccuacaucgcccuggacagcgggcgcggcaacugggacugcaucaugaccuccuaccaguaccucaucauccagaacaccacgugggacgaccacugccaguucagccggcccucccccaucggguaccugggccugcucagccagcgcacccgggacaucuacaucagccgccggcugcugggcaccuucaccuggacgcucuccgacagcgaggggaacgagaccccgggcggguacugccugacccgcuggaugcugaucgaggcggagcucaagugcuucggcaacaccgccguggccaagugcaacgagaagcacgacgaggaguucugcgacaugcugcggcuguucgacuucaacaagcaggccauccgccggcucaagacggaggcccagauguccauccagcugaucaacaaggcggugaacgcccugaucaacgaccagcucaucaugaagaaccaccuccgcgacaucauggggauccccuacugcaacuacagccgguacugguaccugaaccacaccuccaccggcaagaccagccugccccgcugcuggcugaucuccaacggcagcuaccugaacgagacgaaguucuccgacgacaucgagcagcaggccgacaacaugaucaccgagaugcuccagaaggaguacaucgaccggcaggggaagacgccccugggccuggucgaccuguucguguucagcaccuccuucuaccucaucagcaucuuccugcaccuggugaagaucccgacccaccgccacaucgucgggaagcccugccccaagccccaccggcucaaccacaugggcaucugcuccugcgggcuguacaagcagccgggcgugcccgugcgcuggaagcggugaggacuagucccuguucccagagcccacuuuuuuuucuuuuuuugaaauaaaauagccugucuuucagaucucaaaggcucuuuucagagccaccaaaaaaaaaaaaaaaaaaaaaaaaaaaaaaaaaaaaaaaaaaaaaaaaaaaaaaaaaaaaaaaaaaaaaaaaaaaaaaaaaaaaaaaaaaaaaaaaaaaaa

SEQ ID NO: 14444 - RNA, 1767 nt, Artificial Sequence
  mRNA product Design a-2 (hSL-A100) comprising derived and/or modified sequence from LASV(AV;Clade V)__CCA30314__GPC (opt1)
aggagaguccgcucagccagguugcagaagcggcuuagcguguguccuaaucuucucucugcguguagguaggccugugccgcaaacaagcuuaccaugggccagaucgugaccuucuuccaggaggucccccacgugaucgaggaggugaugaacaucguccugaucgcccucagcauccuggccgugcugaaggggcucuacaacaucgcgaccugcggccugaucgggcugaucacguuccuccugcugugcggccgcuccugcagcuccaaccucuacaaggggguguacgagcugcagagccuggaccucaacauggagacccugaacaugaccaugccgcuguccugcaccaagaacaacagccaccacuacauccgggucggcaacgacacgggccucgagcugacccugaccaacaccuccauccucaaccacaaguucugcaaccugagcgacgcccacaagaaggaccuguacgaccacgcccucauguccaucaucagcacguuccaccuguccauccccaacuucaaccaguacgaggccaugagcugcgacuucaacgggggcaagaucuccgugcaguacaaccugagccacuccuacgccaucgacgcggccaaccacugcgggaccguggccaacggcauccuccagaccuucaugcgcauggccuggggcgggagcuacaucgcgcuggacuccggccgggggaacugggacugcaucaugaccagcuaccaguaccugaucauccagaacacgaccugggagaaccacugccaguucucccgccccagccccaucggcuaccucgggcugcugagccagcggacccgcgacaucuacaucucccggcgccuccugggcaccuucacguggacccugagcgacuccgagggcaacgccacccccgggggcuacugccucacccgguggaugcugaucgaggccgagcugaagugcuucgggaacacggccgucgccaagugcaacgagaagcacgacgaggaguucugcgacaugcuccgccuguucgacuucaacaagcaggcgaucagccggcugaaguccgaggcccagaugagcauccagcucaucaacaaggccgugaacgcccugaucaacgaccagcugaucaugaagaaccaccuccgcgacaucaugggcauccccuacugcaacuacuccaaguacugguaccugaaccacaccaucaccgggaagaccagccugcccaagugcuggcucguguccaacggcagcuaccugaacgagacgcacuucuccgacgacaucgagcagcaggccgacaacaugaucaccgagaugcugcagaaggaguacauggagcggcagggcaagaccccgcucgggcuggucgaccuguucguguucagcaccuccuucuaccugaucagcaucuuccuccgccuggugaagaucccgacgcaccggcacaucgucggcaagcccugccccaagccccaccgccugaaccacauggggaucugcuccugcggccucuacaagcagccgggggugcccgugcgguggaagcgcugaggacuagucccuguucccagagcccacuuuuuuuucuuuuuuugaaauaaaauagccugucuuucagaucucaaaggcucuuuucagagccaccaaaaaaaaaaaaaaaaaaaaaaaaaaaaaaaaaaaaaaaaaaaaaaaaaaaaaaaaaaaaaaaaaaaaaaaaaaaaaaaaaaaaaaaaaaaaaaaaaaaaa

SEQ ID NO: 14445 - RNA, 1764 nt, Artificial Sequence
  mRNA product Design a-2 (hSL-A100) comprising derived and/or modified sequence from LASV(Togo/2016/7082;Clade VI)__AMR44577__GPC (opt1)
aggagaguccgcucagccagguugcagaagcggcuuagcguguguccuaaucuucucucugcguguagguaggccugugccgcaaacaagcuuaccaugggccagaucaucaccuucuuccaggaggugccccacgucaucgaggaggugaugaacaucgugcugaucgcccucagccugcuggccauccucaagggggucuacaacguggcgaccugcggcaucaucgggcuggugacguuccuguuccucugcggccgcuccugcagccugaucuacaagggguccuacgagcugcagacccucgagcugaacauggagacccugaacaugaccaugccgcucagcugcacgaagaacuccagccaccacuacauccgggucggcaacgagaccggccuggagcugacccucaccaacacguccaucaucaaccacaaguucugcaaccugagcgacgcccacaagcgcaaccuguacgaccacgcccucauguccauccugagcaccuuccaccuguccauccccaacuucaaccaguacgaggccaugagcugcgacuucaacgggggcaagaucuccgugcaguacaaccucagccacgccuacgcgguggacgccgccgagcacugcgggaccgucgccaacggcgugcugcagaccuucaugcggauggcguggggcggguccuacaucgcccuggacagcggccgcgggaacugggacugcaucaugacguccuaccaguaccucaucauccagaacaccaccugggaggaccacugccaguucagccggcccucccccaucggcuaccuggggcugcucagccagcgcacccgggacaucuacaucagccgccggcugcugggcacguucaccuggacccucuccgacagcgagggcaacgagacccccgggggcuacugccugacgcgcuggaugcugaucgaggccgagcucaagugcuucgggaacaccgccguggccaagugcaacgagaagcacgacgaggaguucugcgacaugcugcggcuguucgacuucaacaagcaggcgauccagcgccucaaguccgaggcccagaugagcauccagcugaucaacaaggccgucaacgcccugaucaacgaccagcucaucaugaagaaccaccuccgggacaugaugggcauccccuacugcaacuacuccaaguacugguaccugaaccacaccagcuccgggcgcaccagccugcccaagugcuggcugguguccaacggcagcuaccugaacgagacgcacuucuccgacgacaucgagcagcaggccgacaacaugaucaccgagaugcuccagaaggaguacaucgaccggcagggcaagaccccgcuggggcugguggaccucuucgucuucagcaccuccuucuaccugaucagcaucuuccugcaccugaucaagaucccgacgcaccgccacaucgugggcaagcccugccccaagccccaccggcucaaccacauggggaucugcuccugcggccuguacaagcagccgggggugcccacccgcuggaagcggugaggacuagucccuguucccagagcccacuuuuuuuucuuuuuuugaaauaaaauagccugucuuucagaucucaaaggcucuuuucagagccaccaaaaaaaaaaaaaaaaaaaaaaaaaaaaaaaaaaaaaaaaaaaaaaaaaaaaaaaaaaaaaaaaaaaaaaaaaaaaaaaaaaaaaaaaaaaaaaaaaaaaa

SEQ ID NO: 14446 - RNA, 1764 nt, Artificial Sequence
  mRNA product Design a-2 (hSL-A100) comprising derived and/or modified sequence from LASV(KAK-428;Clade n.d. (VII))__ANH09740__GPC (opt1)
aggagaguccgcucagccagguugcagaagcggcuuagcguguguccuaaucuucucucugcguguagguaggccugugccgcaaacaagcuuaccaugggccagaucgugaccuucuuccaggaggucccccacgugaucgaggaggugaugaacaucguccugaucgcccucagccugcuggccauccucaaggggcuguacaacuucgcgaccugcggcgugaucgggcugaucacguuccuccugcugugcggccgcuccugcagcgccaccuacaaggggcaguacgagcuccagacccuggagcugaacauggagucccucaacaugaccaugccgcugagcugcacgaagaacaacucccaccacuacauccgggccggcaacaacaccggccuggagcucacccugaccaacacgagcaucaucucccacaaguucugcaaccugagcgacgcccacaagaagaaccucuacgaccacacccugauguccaucaucaccaccuuccaccugagcauccccaacuucaaccaguacgaggccauguccugcgacuucaacgggggcaagaucagcauccaguacaaccucucccacagcuacgcgggggacgccgcccagcacugcggcacgguggccaacgggguccugcagaccuucaugcgcauggcguggggcggcuccuaccuggcccucgacagcgggcggcgcggcugggacugcaucaucuccagcuaccaguaccugaucauccagaacaccaccugggacgaccacugccaguucucccggcccagccccaucggguaccugggcuucgugagccagaagacgcgcgacaucuacaucucccggcgccuccugggcaccuucaccuggacccugagcgacuccgaggggcacgacaugccgggcggguacugccucacgcgguggaugcugaucgaggccgaccugaagugcuucggcaacaccgccguggccaagugcaacgagaagcacgacgaggaguucugcgacauguggcgccucuucgacuucaacaagcaggcgauccagcggcugaaggccgaggcccagaugaacauccagcugaucaacaaggccgucaacgcccucaucaacgaccagcugaugaugaagaaccaccuccgcgacaucauggggauccccuacugcaacuacagcaaguucugguaccugaacaacaccaccacgggccggaccucccugccccgcugcuggcugaucagcaacggcuccuaccucaacgagacccacuucagcgacgacaucgagcagcaggcggacaacaugaucaccgagaugcugcagaaggaguacauggaccggcaggggaagacgccccugggccucguggaccuguucguguucuccaccagcuucuaccugaucaccaucuuccuccaccuggucaagaucccgacccaccgccacaucguggggaagcccugccccaagccccaccggcugaaccacaugggcaucugcuccugcgggcuguacaagcagccgggcgugcccguccgcuggaagcggugaggacuagucccuguucccagagcccacuuuuuuuucuuuuuuugaaauaaaauagccugucuuucagaucucaaaggcucuuuucagagccaccaaaaaaaaaaaaaaaaaaaaaaaaaaaaaaaaaaaaaaaaaaaaaaaaaaaaaaaaaaaaaaaaaaaaaaaaaaaaaaaaaaaaaaaaaaaaaaaaaaaaa

SEQ ID NO: 14447 - RNA, 1764 nt, Artificial Sequence; identical to SEQ ID NO: 14441
  mRNA product Design a-2 (hSL-A100) comprising derived and/or modified sequence from LASV(Pinneo-NIG-1969;Clade I)__AIT17836__GPC (opt1)

SEQ ID NO: 14448 - RNA, 1764 nt, Artificial Sequence
  mRNA product Design a-2 (hSL-A100) comprising derived and/or modified sequence from LASV(ISTH0009-NIG-2011;Clade II)__AIT17404__GPC (opt1)
aggagaguccgcucagccagguugcagaagcggcuuagcguguguccuaaucuucucucugcguguagguaggccugugccgcaaacaagcuuaccaugggccagaucaucaccuucuuccaggaggugccccacgucaucgaggaggugaugaacaucgugcugaucgcccucagccugcuggccauccucaaggggaucuacaacgucgcgaccugcggccuguucgggcugguguccuuccuccugcugugcggccgcagcugcuccacgaccuacaaggggguguacgagcuccagacccuggagcuggacauggccagccucaacaugaccaugccgcuguccugcacgaagaacaacagccaccacuacaucauggucggcaacgagaccggccuggagcucacccugaccaacacguccaucaucaaccacaaguucugcaaccugagcgacgcccacaagaagaaccucuacgaccacgcccugauguccaucaucagcaccuuccaccuguccauccccaacuucaaccaguacgaggccaugagcugcgacuucaacgggggcaagaucuccgugcaguacaaccucagccacgcguacgccguggacgccgccaaccacugcgggaccaucgcgaacggcguccugcagaccuucaugcggauggccuggggcggguccuacaucgcccuggacagcggcaagggguccugggacugcaucaugacgagcuaccaguaccucaucauccagaacaccaccugggaggaccacugccaguucucccgccccagccccaucggcuaccuggggcugcucagccagcggacccgcgacaucuacaucucccggcgccugcugggcacguucaccuggacccucagcgacuccgagggcaacgagacccccgggggcuacugccugacgcgguggaugcugaucgaggccgagcucaagugcuucgggaacaccgccguggcgaagugcaacgagaagcacgacgaggaguucugcgacaugcugcgccuguucgacuucaacaagcaggccauccggcgccucaagaccgaggcccagaugagcauccagcugaucaacaaggccgugaacgcccugaucaacgaccagcucaucaugaagaaccaccuccgggacaucaugggcaucccguacugcaacuacuccaaguacugguaccugaaccacaccgucacggggaagaccagccugccccgcugcuggcugguguccaacggcagcuaccugaacgagacccacuucuccgacgacaucgagcagcaggcggacaacaugaucaccgagcuccugcagaaggaguacauggaccggcagggcaagacgccccuggggcucguggaccuguucgucuucagcaccuccuucuaccugaucagcaucuuccugcaccucaucaagaucccgacccaccgccacaucaccggcaagcccugccccaagccccaccggcugaaccacauggggaucugcuccugcggccuguacaagcacccgggggugcccgugaaguggaagcgcugaggacuagucccuguucccagagcccacuuuuuuuucuuuuuuugaaauaaaauagccugucuuucagaucucaaaggcucuuuucagagccaccaaaaaaaaaaaaaaaaaaaaaaaaaaaaaaaaaaaaaaaaaaaaaaaaaaaaaaaaaaaaaaaaaaaaaaaaaaaaaaaaaaaaaaaaaaaaaaaaaaaaa

SEQ ID NO: 14449 - RNA, 1764 nt, Artificial Sequence
  mRNA product Design a-2 (hSL-A100) comprising derived and/or modified sequence from LASV(ISTH2010-NIG-2012;Clade II)__AIT17482__GPC (opt1)
aggagaguccgcucagccagguugcagaagcggcuuagcguguguccuaaucuucucucugcguguagguaggccugugccgcaaacaagcuuaccaugggccagaucaucaccuucuuccaggaggugccccacgucaucgaggaggugaugaacaucgugcugaucgcccucagccugcuggccauccucaaggggaucuacaacgucgcgaccugcggccuguucgggcugguguccuuccuccugcugugcggccgcagcugcuccacgaccuacaaggggguguacgagcuccagacccuggagcuggacauggccagccucaacaugaccaugccgcuguccugcacgaagaacaacagccaccacuacaucauggucggcaacgagaccggccuggagcucacccugaccaacacguccaucaucaaccacaaguucugcaaccugagcgacgcccacaagaagaaccucuacgaccacgcccugauguccaucaucagcaccuuccaccuguccauccccaacuucaaccaguacgaggccaugagcugcgacuucaacgggggcaagaucuccgugcaguacaaccucagccacgcguacgccguggacgccgccaaccacugcgggaccaucgcgaacggcguccugcagaccuucaugcggauggccuggggcggguccuacaucgcccuggacagcggcaagggguccugggacugcaucaugacgagcuaccaguaccucaucauccagaacaucaccugggaggaccacugccaguucucccgccccagccccaucggcuaccuggggcugcucagccagcggacccgcgacaucuacaucucccggcgccugcugggcaccuucacguggacccucagcgacuccgagggcaacgagacccccgggggcuacugccugacccgguggaugcugaucgaggccgagcucaagugcuucgggaacacggccguggcgaagugcaacgagaagcacgacgaggaguucugcgacaugcugcgccuguucgacuucaacaagcaggccauccggcgccucaagaccgaggcccagaugagcauccagcugaucaacaaggccgugaacgcccugaucaacgaccagcucaucaugaagaaccaccuccgggacaucaugggcauccccuacugcaacuacuccaaguacugguaccugaaccacaccgucaccgggaagacgagccugccccgcugcuggcugguguccaacggcagcuaccugaacgagacccacuucuccgacgacaucgagcagcaggcggacaacaugaucaccgagcuccugcagaaggaguacaucgaccggcagggcaagaccccgcuggggcucguggaccuguucgucuucagcacguccuucuaccugaucagcaucuuccugcaccucgugaagaucccgacccaccgccacguggucggcaagcccugccccaagccccaccggcugaaccacauggggaucugcuccugcggccuguacaagcacccgggggugcccgugaaguggaagcgcugaggacuagucccuguucccagagcccacuuuuuuuucuuuuuuugaaauaaaauagccugucuuucagaucucaaaggcucuuuucagagccaccaaaaaaaaaaaaaaaaaaaaaaaaaaaaaaaaaaaaaaaaaaaaaaaaaaaaaaaaaaaaaaaaaaaaaaaaaaaaaaaaaaaaaaaaaaaaaaaaaaaaa

SEQ ID NO: 14450 - RNA, 1764 nt, Artificial Sequence
  mRNA product Design a-2 (hSL-A100) comprising derived and/or modified sequence from LASV(Lassa virus/H.sapiens-wt/NGA/2015/ISTH_0543;Clade II)__AVO03639__GPC (opt1)
aggagaguccgcucagccagguugcagaagcggcuuagcguguguccuaaucuucucucugcguguagguaggccugugccgcaaacaagcuuaccaugggccagaucaucaccuucuuccaggaggugccccacgucaucgaggaggugaugaacaucgugcugaucgcccucagccugcuggccauccucaaggggaucuacaacgucgcgaccugcggccuguucgggcugguguccuuccuccugcugugcggccgcagcugcuccacgaccuacaaggggguguacgagcuccagacccuggagcuggacauggccaaccucaacaugaccaugccgcugagcugcacgaagaacaacucccaccacuacaucauggucggcaacgagaccggccuggagcucacccugaccaacacgagcaucaucaaccacaaguucugcaaccuguccgacgcccacaagaagaaccucuacgaccacgcccugaugagcaucaucuccaccuuccaccugagcauccccaacuucaaccaguacgaggccauguccugcgacuucaacgggggcaagaucagcgugcaguacaaccucucccacaccuacgcgguggacgccgccaaccacugcgggaccaucgccaacggcguccugcagacguucaugcggauggcguggggcgggagcuacaucgcccuggacuccggcaaggggagcugggacugcaucaugaccuccuaccaguaccucgugauccagaacaccaccugggaggaccacugccaguucagccgccccucccccaucggcuaccuggggcugcucagccagcggacgcgcgacaucuacaucagccggcgccugcugggcaccuucaccuggacccucuccgacagcgagggcaacgagacgcccgggggcuacugccugacccgguggaugcugaucgaggccgagcucaagugcuucgggaacaccgccguggccaagugcaacgagaagcacgacgaggaguucugcgacaugcugcgccuguucgacuucaacaagcaggcgauccggcgccucaagaccgaggcccagauguccauccagcugaucaacaaggccgucaacgcccugaucaacgaccagcucaucaugaagaaccaccuccgggacaucaugggcauccccuacugcaacuacagcaaguacugguaccugaaccacacggugaccgggaagaccucccugccccgcugcuggcuggugagcaacggcuccuaccugaacgagacccacuucagcgacgacaucgagcagcaggccgacaacaugaucacggagcuccugcagaaggaguacaucgaccggcagggcaagaccccgcuggggcucgucgaccuguucguguucuccaccagcuucuaccugaucuccaucuuccugcaccucgugaagaucccgacccaccgccacaucacgggcaagcccugccccaagccccaccggcugaaccacauggggaucugcagcugcggccuguacaagcacccggggguccccgugaaguggaagcgcugaggacuagucccuguucccagagcccacuuuuuuuucuuuuuuugaaauaaaauagccugucuuucagaucucaaaggcucuuuucagagccaccaaaaaaaaaaaaaaaaaaaaaaaaaaaaaaaaaaaaaaaaaaaaaaaaaaaaaaaaaaaaaaaaaaaaaaaaaaaaaaaaaaaaaaaaaaaaaaaaaaaaa

SEQ ID NO: 14451 - RNA, 1764 nt, Artificial Sequence
  mRNA product Design a-2 (hSL-A100) comprising derived and/or modified sequence from LASV(Lassa virus/H.sapiens-wt/NGA/2016/ISTH_0009;Clade II)__AVO03571__GPC (opt1)
aggagaguccgcucagccagguugcagaagcggcuuagcguguguccuaaucuucucucugcguguagguaggccugugccgcaaacaagcuuaccaugggccagaucaucaccuucuuccaggaggugccccacgucaucgaggaggugaugaacaucgugcugaucgcccucagccugcuggccauccucaaggggaucuacaacgucgcgaccugcggccugcuggggcucguguccuuccugcugcucugcggccgcagcugcuccacgaccuacaaggggguguacgagcugcagacccuggagcucgacauggccagccugaacaugaccaugccgcuguccugcacgaagaacaacagccaccacuacaucauggucggcaacgagaccggccucgagcugacccugaccaacacguccaucaucaaccacaaguucugcaaccucagcgacgcccacaagaagaaccuguacgaccacgcccugauguccaucaucagcaccuuccaccucuccauccccaacuucaaccaguacgaggccaugagcugcgacuucaacgggggccggaucuccgugcaguacaaccugagccacuccuacgcgguggacgccgccaaccacugcgggaccaucgccaacggcguccugcagaccuucaugcgcauggcguggggcgggagcuacaucgcccucgacuccggcaaggggagcugggacugcaucaugacguccuaccaguaccugaucauccagaacaccaccugggaggaccacugccaguucagccggcccagccccaucggcuaccuggggcuccugucccagcgcacccgggacaucuacaucagccgccggcugcucggcacguucaccuggacccuguccgacagcgagggcaacgagacccccgggggcuacugccugacgcgcuggaugcucaucgaggccgagcugaagugcuucgggaacaccgccguggccaagugcaacgagaagcacgacgaggaguucugcgacaugcugcggcuguucgacuucaacaagcaggcgauccgccggcugaagaccgaggcccagauguccauccagcugaucaacaaggccgugaacgcccucaucaacgaccagcugaucaugaagaaccaccuccgcgacaucaugggcaucccguacugcaacuacagcaaguacugguaccucaaccacaccgucacggggaagaccucccugccccggugcuggcuggugagcaacggcuccuaccucaacgagacccacuucagcgacgacaucgagcagcaggccgacaacaugaucaccgagcugcugcagaaggaguacaucgaccgccagggcaagacgccccucgggcugguggaccuguucgucuucuccaccagcuucuaccugaucuccaucuuccuccaccuggugaagaucccgacccaccggcacaucaccggcaagcccugccccaagccccaccgccugaaccacauggggaucugcagcugcggccucuacaaccacccgggggugcccgucaaguggaagcggugaggacuagucccuguucccagagcccacuuuuuuuucuuuuuuugaaauaaaauagccugucuuucagaucucaaaggcucuuuucagagccaccaaaaaaaaaaaaaaaaaaaaaaaaaaaaaaaaaaaaaaaaaaaaaaaaaaaaaaaaaaaaaaaaaaaaaaaaaaaaaaaaaaaaaaaaaaaaaaaaaaaaa

SEQ ID NO: 14452 - RNA, 1764 nt, Artificial Sequence
  mRNA product Design a-2 (hSL-A100) comprising derived and/or modified sequence from LASV(Lassa virus/H.sapiens-wt/NGA/2016/ISTH_0017;Clade II)__AVO03567__GPC (opt1)
aggagaguccgcucagccagguugcagaagcggcuuagcguguguccuaaucuucucucugcguguagguaggccugugccgcaaacaagcuuaccaugggccagaucaucaccuucuuccaggaggugccccacgucaucgaggaggugaugaacaucgugcugaucgcccucagccugcuggccauccucaaggggaucuacaacgucgcgaccugcggccuguucgggcugguguccuuccuccugcugugcggccgcagcugcuccacgaccuacaaggggguguacgagcuccagacccuggagcuggacauggccagccucaacaugaccaugccgcuguccugcacgaagaacaacagccaccacuacaucauggucggcaacgagaccggccuggagcucacccugaccaacacguccaucaucaaccacaaguucugcaaccugagcgacgcccacaagaagaaccucuacgaccacgcccugauguccaucaucagcaccuuccaccuguccauccccaacuucaaccaguacgaggccaugagcugcgacuucaacgggggcaagaucuccgugcaguacaaccucagccacaccuacgcgaucgacgccgccaaccacugcgggaccaucgccaacggcgugcugcagacguucaugcggauggcguggggcggguccuacaucgcccuggacagcggcaagggguccugggacugcaucaugaccagcuaccaguaccucaucauccagaacaccaccugggaggaccacugccaguucucccgccccagccccaucggcuaccuggggcugcucagccagcggacgcgcgacaucuacaucucccggcgccugcugggcaccuucaccuggacccucagcgacuccgagggcaacgagacgcccgggggcuacugccugacccgguggaugcugaucgaggccgagcucaagugcuucgggaacaccgccgucgccaagugcaacgagaagcacgacgaggaguucugcgacaugcugcgccuguucgacuucaacaagcaggcgauccggcgccucaagaccgaggcccagaugagcauccagcugaucaacaaggccgugaacgcccugaucaacgaccagcucaucaugaagaaccaccuccgggacaucaugggcauccccuacugcaacuacuccaaguacugguaccugaaccacacggugaccgggaagaccagccugccccgcugcuggcuggucuccaacggcagcuaccugaacgagacccacuucuccgacgacaucgagcagcaggccgacaacaugaucacggagcuccugcagaaggaguacauggaccggcagggcaagaccccgcuggggcucguggaccuguucguguucagcaccuccuucuaccugaucagcaucuuccugcaccucguccgcaucccgacccaccggcacgugaucggcaagcccugccccaagccccaccgccugaaccacauggggaucugcuccugcggccuguacaagcacccgggggugcccgucaaguggaagcggugaggacuagucccuguucccagagcccacuuuuuuuucuuuuuuugaaauaaaauagccugucuuucagaucucaaaggcucuuuucagagccaccaaaaaaaaaaaaaaaaaaaaaaaaaaaaaaaaaaaaaaaaaaaaaaaaaaaaaaaaaaaaaaaaaaaaaaaaaaaaaaaaaaaaaaaaaaaaaaaaaaaaa

SEQ ID NO: 14453 - RNA, 1764 nt, Artificial Sequence
  mRNA product Design a-2 (hSL-A100) comprising derived and/or modified sequence from LASV(Lassa virus/H.sapiens-wt/NGA/2018/ISTH_0959;Clade II)__AVV65099__GPC (opt1)
aggagaguccgcucagccagguugcagaagcggcuuagcguguguccuaaucuucucucugcguguagguaggccugugccgcaaacaagcuuaccaugggccagaucaucaccuucuuccaggaggugccccacgucaucgaggaggugaugaacaucgugcugaucgcccucagccugcuggccauccucaaggggaucuacaacgucgugaccugcggccuguucgggcugguguccuuccuccugcugugcggccgcagcugcuccacgaccuacaagggggucuacgagcuccagacccuggagcuggacauggcgagccucaacaugaccaugccgcuguccugcacgaagaacaacagccaccacuacaucauggugggcaacgagaccggccuggagcucacccugaccaacacguccaucaucaaccacaaguucugcaaccugagcgacgcccacaagaagaaccucuacgaccacgcccugauguccaucaucagcaccuuccaccuguccauccccaacuucaaccaguacgaggccaugagcugcgacuucaacgggggcaagaucuccgugcaguacaaccucagccacgccuacgcgaucgacgccgccaaccacugcgggaccaucgccaacggcguccugcagaccuucaugcggauggcguggggcggguccuacaucgcccuggacagcggcaagggguccugggacugcaucaugacgagcuaccaguaccucaucauccagaacaccaccugggaggaccacugccaguucucccgccccagccccaucggcuaccuggggcugcucagccagcggacccgcgacaucuacaucucccggcgccugcugggcacguucaccuggacccucagcgacuccgagggcaacgagacccccgggggcuacugccugacgcgguggaugcugaucgaggccgagcucaagugcuucgggaacaccgccguggccaagugcaacgagaagcacgacgaggaguucugcgacaugcugcgccuguucgacuucaacaagcaggcgauccggcgccucaagaccgaggcccagaugagcauccagcugaucaacaaggccgugaacgcccugaucaacgaccagcucaucaugaagaaccaccuccgggacaucaugggcaucccguacugcaacuacuccaaguacugguaccugaaccacaccgucacggggaagaccagccugccccgcugcuggcugguguccaacggcagcuaccugaacgagacccacuucuccgacgacaucgagcagcaggccgacaacaugaucaccgagcuccugcagaaggaguacaucgaccggcagggcaagacgccccuggggcucguggaccuguucgucuucagcaccuccuucuaccugaucagcaucuuccugcaccucgugaagaucccgacccaccgccacgugaucggcaagcccugccccaagccccaccggcugaaccacauggggaucugcuccugcggccuguacaagcacccggggguccccgugaaguggaagcgcugaggacuagucccuguucccagagcccacuuuuuuuucuuuuuuugaaauaaaauagccugucuuucagaucucaaaggcucuuuucagagccaccaaaaaaaaaaaaaaaaaaaaaaaaaaaaaaaaaaaaaaaaaaaaaaaaaaaaaaaaaaaaaaaaaaaaaaaaaaaaaaaaaaaaaaaaaaaaaaaaaaaaa

SEQ ID NO: 14454 - RNA, 1764 nt, Artificial Sequence
  mRNA product Design a-2 (hSL-A100) comprising derived and/or modified sequence from LASV(LASV003-NIG-2008;Clade II)__AIT17580__GPC (opt1)
aggagaguccgcucagccagguugcagaagcggcuuagcguguguccuaaucuucucucugcguguagguaggccugugccgcaaacaagcuuaccaugggccagaucaucaccuucuuccaggaggugccccacgucaucgaggaggugaugaacaucgugcugaucgcccucagccugcuggccauccucaaggggaucuacaacgucgcgaccugcggccuguucgggcugguguccuuccuccugcugugcggccgcagcugcuccacgaccuacaaggggguguacgagcuccagacccuggagcuggacauggccagccucaacaugaccaugccgcuguccugcacgaagaacaacagccaccacuacaucauggucggcaacgagaccggccuggagcucacccugaccaacacguccaucaucaaccacaaguucugcaaccugagcgacgcccacaagaagaaccucuacgaccacgcccugauguccaucaucagcaccuuccaccuguccauccccaacuucaaccaguacgaggccaugagcugcgacuucaacgggggcaagaucuccgugcaguacaaccucagccacaccuacgcgguggacgccgccaaccacugcgggaccaucgccaacggcguccugcagacguucaugcggauggcguggggcggguccuacaucgcccuggacagcggcaagggguccugggacugcaucaugaccagcuaccaguaccucaucauccagaacaccaccugggaggaccacugccaguucucccgccccagccccaucggcuaccuggggcugcucagccagcggacgcgcgacaucuacaucucccggcgccugcugggcaccuucaccuggacccucagcgacuccgagagcaacgagacgccgggcggguacugccugacccgguggaugcugaucgaggccgagcucaagugcuucggcaacaccgccguggccaagugcaacgagaagcacgacgaggaguucugcgacaugcugcgccuguucgacuucaacaagcaggcgauccggcgccucaaggccgaggcccagauguccauccagcugaucaacaaggccgugaacgcccugaucaacgaccagcucaucaugaagaaccaccuccgggacaucauggggauccccuacugcaacuacagcaaguacugguaccugaaccacaccgucacgggccgcaccucccugccccggugcuggcuggugagcaacggguccuaccugaacgagacccacuucagcgacgacaucgagcagcaggcggacaacaugaucaccgagcuccugcagaaggaguacauggaccgccagggcaagacgccccugggccucguggaccuguucgucuucuccaccagcuucuaccugaucuccaucuuccugcaccucgugaagaucccgacccaccggcacgugaucgggaagcccugccccaagccccaccgccugaaccacaugggcaucugcagcugcgggcuguacaagcacccgggcguccccgugaaguggaagcggugaggacuagucccuguucccagagcccacuuuuuuuucuuuuuuugaaauaaaauagccugucuuucagaucucaaaggcucuuuucagagccaccaaaaaaaaaaaaaaaaaaaaaaaaaaaaaaaaaaaaaaaaaaaaaaaaaaaaaaaaaaaaaaaaaaaaaaaaaaaaaaaaaaaaaaaaaaaaaaaaaaaaa

SEQ ID NO: 14455 - RNA, 1764 nt, Artificial Sequence
  mRNA product Design a-2 (hSL-A100) comprising derived and/or modified sequence from LASV(LASV035-NIG-2009;Clade II)__AIT17588__GPC (opt1)
aggagaguccgcucagccagguugcagaagcggcuuagcguguguccuaaucuucucucugcguguagguaggccugugccgcaaacaagcuuaccaugggccagaucaucaccuucuuccaggaggugccccacgucaucgaggaggugaugaacaucgugcugaucgcccucagccugcuggccauccucaaggggaucuacaacgucgcgaccugcggccuguucgggcugguguccuuccuccugcugugcggccgcagcugcuccacgaccuacaaggggguguacgagcuccagacccuggagcuggacauggccagccucaacaugaccaugccgcuguccugcacgaagaacaacagccaccacuacaucauggucggcaacgagaccggccuggagcucacccugaccaacacguccaucaucaaccacaaguucugcaaccugagcgacgcccacaagaagaaccucuacgaccacgcccugauguccaucaucagcaccuuccaccuguccauccccaacuucaaccaguacgaggccaugagcugcgacuucaacgggggcaagaucuccgugcaguacaaccucagccacgcguacgccguggacgccgccaaccacugcgggaccaucgcgaacggcguccugcagaccuucaugcggauggccuggggcggguccuacaucgcccuggacagcggcaagggguccugggacugcaucaugacgagcuaccaguaccucaucauccagaacaccaccugggaggaccacugccaguucucccgccccagccccaucggcuaccuggggcugcucagccagcggacccgcgacaucuacaucucccggcgccugcugggcacguucaccuggacccucagcgacuccgagggcaacgagacccccgggggcuacugccugacgcgguggaugcugaucgaggccgagcucaagugcuucgggaacaccgccguggcgaagugcaacgagaagcacgacgaggaguucugcgacaugcugcgccuguucgacuucaacaagcaggccauccggcgccucaaggccgaggcccagaugagcauccagcugaucaacaaggccgugaacgcgcugaucaacgaccagcucaucaugaagaaccaccuccgggacaucaugggcauccccuacugcaacuacuccaaguacugguaccugaaccacaccgucaccgggaagacgagccugccccgcugcuggcugguguccaacggcagcuaccugaacgagacccacuucuccgacgacaucgagcagcaggccgacaacaugaucaccgagcuccugcagaaggaguacaucgaccggcagggcaagaccccgcuggggcucguggaccuguucgucuucagcacguccuucuaccugaucagcaucuuccugcaccucgugaagaucccgacccaccgccacgugaucggcaagcccugccccaagccccaccggcugaaccacauggggaucugcuccugcggccuguacaagcacccggggguccccgugaaguggaagcgcugaggacuagucccuguucccagagcccacuuuuuuuucuuuuuuugaaauaaaauagccugucuuucagaucucaaaggcucuuuucagagccaccaaaaaaaaaaaaaaaaaaaaaaaaaaaaaaaaaaaaaaaaaaaaaaaaaaaaaaaaaaaaaaaaaaaaaaaaaaaaaaaaaaaaaaaaaaaaaaaaaaaaa

SEQ ID NO: 14456 - RNA, 1764 nt, Artificial Sequence
  mRNA product Design a-2 (hSL-A100) comprising derived and/or modified sequence from LASV(LASV1000-NIG-2009;Clade II)__AIT17782__GPC (opt1)
aggagaguccgcucagccagguugcagaagcggcuuagcguguguccuaaucuucucucugcguguagguaggccugugccgcaaacaagcuuaccaugggccagaucaucaccuucuuccaggaggugccccacgucaucgaggaggugaugaacaucgugcugaucgcccucagccugcuggccauccucaaggggaucuacaacgucgcgaccugcggccuguucgggcugguguccuuccuccugcugugcggccgcagcugcuccacgaccuacaaggggguguacgagcuccagacccuggagcuggacauggccagccucaacaugaccaugccgcuguccugcacgaagaacaacagccaccacuacaucauggucggcaacgagaccggccuggagcucacccugaccaacacguccaucaucaaccacaaguucugcaaccugagcgacgcccacaagaagaaccucuacgaccacgcccugauguccaucaucagcaccuuccaccuguccauccccaacuucaaccaguacgaggccaugagcugcgacuucaacgggggcaagaucuccgugcaguacaaccucagccacaccuacgcgguggacgccgccaaccacugcgggaccaucgccaacggcguccugcagacguucaugcggauggcguggggcggguccuacaucgcccuggacagcggcaagggguccugggacugcaucaugaccagcuaccaguaccucaucauccagaacaccaccugggaggaccacugccaguucucccgccccagccccaucggcuaccuggggcugcucagccagcggacgcgcgacaucuacaucucccggcgccugcugggcaccuucaccuggacccucagcgacuccgagggcaacgagacgcccgggggcuacugccugacccgguggaugcugaucgaggccgagcucaagugcuucgggaacaccgccguggccaagugcaacgagaagcacgacgaggaguucugcgacaugcugcgccuguucgacuucaacaagcaggcgaucaagcggcucaagaccgaggcccagaugagcauccagcugaucaacaaggccgugaacgcccugaucaacgaccagcucaucaugaagaaccaccuccgcgacaucaugggcauccccuacugcaacuacuccaaguacugguaccugaaccacacggucaccgggaagaccagccugccccggugcuggcugguguccaacggcagcuaccugaacgagacccacuucuccgacgacaucgagcagcaggccgacaacaugaucacggagcuccugcagaaggaguacaucgaccgccagggcaagaccccgcuggggcucguggaccuguucgucuucagcaccuccuucuaccugaucagcaucuuccugcaccucgugaagaucccgacccaccggcacguggucggcaagcccugccccaagccccaccgccugaaccacauggggaucugcuccugcggccuguacaagcacccgggggugcccgugaaguggaagcggugaggacuagucccuguucccagagcccacuuuuuuuucuuuuuuugaaauaaaauagccugucuuucagaucucaaaggcucuuuucagagccaccaaaaaaaaaaaaaaaaaaaaaaaaaaaaaaaaaaaaaaaaaaaaaaaaaaaaaaaaaaaaaaaaaaaaaaaaaaaaaaaaaaaaaaaaaaaaaaaaaaaaa

SEQ ID NO: 14457 - RNA, 1764 nt, Artificial Sequence
  mRNA product Design a-2 (hSL-A100) comprising derived and/or modified sequence from LASV(LASV221-NIG-2010;Clade II)__AIT17624__GPC (opt1)
aggagaguccgcucagccagguugcagaagcggcuuagcguguguccuaaucuucucucugcguguagguaggccugugccgcaaacaagcuuaccaugggccagaucaucaccuucuuccaggaggugccccacgucaucgaggaggugaugaacaucgugcugaucgcccucagccugcuggccauccucaaggggaucuacaacgucgcgaccugcggccuguucgggcugguguccuuccuccugcugugcggccgcagcugcuccacgaccuacaaggggguguacgagcuccagacccuggagcuggacauggccagccucaacaugaccaugccgcuguccugcacgaagaacaacagccaccacuacaucauggucggcaacgagaccggccuggagcucacccugaccaacacguccaucaucaaccacaaguucugcaaccugagcgacgcccacaagaagaaccucuacgaccacgcccugauguccaucaucagcaccuuccaccuguccauccccaacuucaaccaguacgaggccaugagcugcgacuucaacgggggcaagaucuccgugcaguacaaccucagccacaccuacgcgaucgacgccgccaaccacugcgggaccaucgccaacggcgugcugcagacguucaugcggauggcguggggcggguccuacaucgcccuggacagcggcaagggguccugggacugcaucaugaccagcuaccaguaccucaucauccagaacaccaccugggaggaccacugccaguucucccgccccagccccaucggcuaccuggggcugcucagccagcggacgcgcgacaucuacaucucccggcgccugcugggcaccuucaccuggacccucagcgacuccgagggcaacgagacgcccgggggcuacugccugacccgguggaugcugaucgaggccgagcucaagugcuucgggaacaccgccgucgccaagugcaacgagaagcacgacgaggaguucugcgacaugcugcgccuguucgacuucaacaagcaggcgauccggcgccucaagaccgaggcccagaugagcauccagcugaucaacaaggccgugaacgcccugaucaacgaccagcucaucaugaagaaccaccuccgggacaucaugggcauccccuacugcaacuacuccaaguacugguaccugaaccacacggugaccgggaagaccagccugccccgcugcuggcuggucuccaacggcagcuaccugaacgagacccacuucuccgacgacaucgagcagcaggccgacaacaugaucacggagaugcuccagaaggaguacauggaccggcagggcaagaccccgcuggggcugguggaccucuucguguucagcaccuccuucuaccugaucagcaucuuccugcaccuggucaagaucccgacccaccgccacgugaucggcaagcccugccccaagccccaccggcucaaccacauggggaucugcuccugcggccuguacaagcacccgggggugcccgucaaguggaagcgcugaggacuagucccuguucccagagcccacuuuuuuuucuuuuuuugaaauaaaauagccugucuuucagaucucaaaggcucuuuucagagccaccaaaaaaaaaaaaaaaaaaaaaaaaaaaaaaaaaaaaaaaaaaaaaaaaaaaaaaaaaaaaaaaaaaaaaaaaaaaaaaaaaaaaaaaaaaaaaaaaaaaaa

SEQ ID NO: 14458 - RNA, 1764 nt, Artificial Sequence
  mRNA product Design a-2 (hSL-A100) comprising derived and/or modified sequence from LASV(LASV237-NIG-2010;Clade II)__AIT17638__GPC (opt1)
aggagaguccgcucagccagguugcagaagcggcuuagcguguguccuaaucuucucucugcguguagguaggccugugccgcaaacaagcuuaccaugggccagaucaucaccuucuuccaggaggugccccacgucaucgaggaggugaugaacaucgugcugaucgcccucagccugcuggccauccucaaggggaucuacaacgucgcgaccugcggccuguucgggcugguguccuuccuccugcugugcggccgcagcugcuccacgaccuacaaggggguguacgagcuccagacccuggagcuggacauggccagccucaacaugaccaugccgcuguccugcacgaagaacaacagccaccacuacaucauggucggcaacgagaccggccuggagcucacccugaccaacacguccaucaucaaccacaaguucugcaaccugagcgacgcccacaagaaggaccucuacgaccacgcccugauguccaucaucagcaccuuccaccuguccauccccaacuucaaccaguacgaggccaugagcugcgacuucaacgggggcaagaucuccgugcaguacaaccucagccacaccuacgcgguggacgccgccaaccacugcgggaccaucgccaacggcguccugcagacguucaugcggauggcguggggcggguccuacaucgcccuggacagcggcaagggguccugggacugcaucaugaccagcuaccaguaccucaucauccagaacaccaccugggaggaccacugccaguucucccgccccagccccaucggcuaccuggggcugcucagccagcggacgcgcgacaucuacaucucccggcgccugcugggcaccuucaccuggacccucagcgacuccgagggcaacgagacgcccgggggcuacugccugacccgguggaugcugaucgaggccgagcucaagugcuucgggaacaccgccguggccaagugcaacgagaagcacgacgaggaguucugcgacaugcugcgccuguucgacuucaacaagcaggcgauccggcgccucaagaccgaggcccagaugagcauccagcugaucaacaaggccgugaacgcccugaucaacgaccagcucaucaugaagaaccaccuccgggacaucaugggcauccccuacugcaacuacuccaaguacugguaccugaaccacacggucaccgggaagaccagccugccccgcugcuggcugguguccaacggcagcuaccugaacgagacccacuucuccgacgacaucgagcagcaggccgacaacaugaucacggagcuccugcagaaggaguacauggaccggcagggcaagaccccgcuggggcucguggaccuguucgucuucagcaccuccuucuaccugaucagcaucuuccugcaccucaucaagaucccgacccaccgccacaucacgggcaagcccugccccaagccccaccggcugaaccacauggggaucugcuccugcggccuguacaagcacccgggggugcccgugaaguggaagcgcugaggacuagucccuguucccagagcccacuuuuuuuucuuuuuuugaaauaaaauagccugucuuucagaucucaaaggcucuuuucagagccaccaaaaaaaaaaaaaaaaaaaaaaaaaaaaaaaaaaaaaaaaaaaaaaaaaaaaaaaaaaaaaaaaaaaaaaaaaaaaaaaaaaaaaaaaaaaaaaaaaaaaa

SEQ ID NO: 14459 - RNA, 1764 nt, Artificial Sequence
  mRNA product Design a-2 (hSL-A100) comprising derived and/or modified sequence from LASV(LASV253-NIG-2011;Clade II)__AIT17670__GPC (opt1)
aggagaguccgcucagccagguugcagaagcggcuuagcguguguccuaaucuucucucugcguguagguaggccugugccgcaaacaagcuuaccaugggccagaucaucaccuucuuccaggaggugccccacgucaucgaggaggugaugaacaucgugcugaucgcccucagccugcuggccauccucaaggggaucuacaacgucgcgaccugcggccuguucgggcugguguccuuccuccugcugugcggccgcagcugcuccacgaccuacaaggggguguacgagcuccagacccuggagcuggacauggccagccucaacaugaccaugccgcuguccugcacgaagaacaacagccaccacuacaucauggucggcaacgagaccggccuggagcucacccugaccaacacguccaucaucaaccacaaguucugcaaccugagcgacgcccacaagaagaaccucuacgaccacgcccugauguccaucaucagcaccuuccaccuguccauccccaacuucaaccaguacgaggccaugagcugcgacuucaacgggggcaagaucuccgugcaguacaaccucagccacaccuacgcgguggacgccgccaaccacugcgggaccaucgccaacggcguccugcagacguucaugcggauggcguggggcggguccuacaucgcccuggacagcggcaagggguccugggacugcaucaugaccagcuaccaguaccucaucauccagaacaccaccugggaggaccacugccaguucucccgccccagccccaucggcuaccuggggcugcucagccagcggacgcgcgacaucuacaucucccggcgccugcugggcaccuucaccuggacccucagcgacuccgagggcaacgagacgcccgggggcuacugccugacccgguggaugcugaucgaggccgagcucaagugcuucgggaacaccgccguggccaagugcaacgagaagcacgacgaggaguucugcgacaugcugcgccuguucgacuucaacaagcaggcgauccggcgccucaaggccgaggcccagaugagcauccagcugaucaacaaggccgugaacgcccugaucaacgaccagcucaucaugaagaaccaccuccgggacaucaugggcaucccguacugcaacuacuccaaguacugguaccugaaccacaccgucacggggcgcaccagccugccccggugcuggcugguguccaacggcagcuaccugaacgagacccacuucuccgacgacaucgagcagcaggcggacaacaugaucaccgagcuccugcagaaggaguacaucgaccgccagggcaagacgccccuggggcucguggaccuguucgucuucagcaccuccuucuaccugaucagcaucuuccugcaccucgugaagaucccgacccaccggcacaucaucggcaagcccugccccaagccccaccgccugaaccacauggggaucugcuccugcggccuguacaagcacccgggggugcccgucaaguggaagcggugaggacuagucccuguucccagagcccacuuuuuuuucuuuuuuugaaauaaaauagccugucuuucagaucucaaaggcucuuuucagagccaccaaaaaaaaaaaaaaaaaaaaaaaaaaaaaaaaaaaaaaaaaaaaaaaaaaaaaaaaaaaaaaaaaaaaaaaaaaaaaaaaaaaaaaaaaaaaaaaaaaaaa

SEQ ID NO: 14460 - RNA, 1764 nt, Artificial Sequence
  mRNA product Design a-2 (hSL-A100) comprising derived and/or modified sequence from LASV(LASV254-NIG-2011;Clade II)__AIT17674__GPC (opt1)
aggagaguccgcucagccagguugcagaagcggcuuagcguguguccuaaucuucucucugcguguagguaggccugugccgcaaacaagcuuaccaugggccagaucaucaccuucuuccaggaggugccccacgucaucgaggaggugaugaacaucgugcugaucgcccucagccugcuggccauccucaaggggaucuacaacgucgcgaccugcggccuguucgggcugguguccuuccuccugcugugcggccgcagcugcuccacgaccuacaaggggguguacgagcuccagacccuggagcuggacaugaccaaccucaacaugacgaugccgcugagcugcaccaagaacaacucccaccacuacaucauggucggcaacgagaccggccuggagcucacccugacgaacaccagcaucaucaaccacaaguucugcaaccuguccgacgcccacaagaagaaccucuacaaccacgcccugaugagcaucaucuccaccuuccaccugagcauccccaacuucaaccaguacgaggccauguccugcgacuucaacgggggcaagaucagcgugcaguacaaccucucccacagcuacgccguggacgcggccaaccacugcgggaccaucgccaacggcguccugcagacguucaugcggauggccuggggcggguccuacaucgcgcuggacagcggcaaggggaacugggacugcaucaugaccuccuaccaguaccucaucauccagaacaccaccugggaggaccacugccaguucagccgccccucccccaucggcuaccuggggcugcucagccagcggacgcgcgacaucuacaucagccggcgccugcugggcaccuucaccuggacccucuccgacagcgagggcaacgagacgcccgggggcuacugccugacccgguggaugcugaucgaggccgagcucaagugcuucgggaacaccgccguggccaagugcaacgagaagcacgacgaggaguucugcgacaugcugcgccuguucgacuucaacaagcaggccauccggcgccucaagaccgaggcgcaggccaacauccagcugaucaacaaggccgugaacgcccugaucaacgaccagcucaucaugaagaaccaccuccgggacaucaugggcauccccuacugcaacuacuccaaguacugguaccugaaccacacggucaccgggaagaccagccugccccgcugcuggcugguguccaacggcagcuaccugaacgagacccacuucuccgacgacaucgagcagcaggccgacaacaugaucacggagcuccugcagaaggaguacauggaccggcagggcaagaccccgcuggggcucguggaccuguucgucuucagcaccuccuucuaccugaucagcaucuuccugcaccucgugaagaucccgacccaccgccacgugaucggcaagcccugccccaagccccaccggcugaaccacauggggaucugcuccugcggccuguacaagcacccggggguccccgugaaguggaagcgcugaggacuagucccuguucccagagcccacuuuuuuuucuuuuuuugaaauaaaauagccugucuuucagaucucaaaggcucuuuucagagccaccaaaaaaaaaaaaaaaaaaaaaaaaaaaaaaaaaaaaaaaaaaaaaaaaaaaaaaaaaaaaaaaaaaaaaaaaaaaaaaaaaaaaaaaaaaaaaaaaaaaaa

SEQ ID NO: 14461 - RNA, 1764 nt, Artificial Sequence
  mRNA product Design a-2 (hSL-A100) comprising derived and/or modified sequence from LASV(Nig08-A19;Clade III)__ADU56618__GPC (opt1)
aggagaguccgcucagccagguugcagaagcggcuuagcguguguccuaaucuucucucugcguguagguaggccugugccgcaaacaagcuuaccaugggccagaucgugaccuucuuccaggaggucccccacgugaucgaggaggugaugaacaucguccugaucgcccucagcauccuggccauccugaaggggcucuacaacaucgcgaccugcggccugaucgggcuggugacguuccuccugcuguccggccgcagcugcuccaugaccuacaaggggguguacgagcuccagacccuggagcugaacaugaacacccucaacaugacgaugccgcugagcugcaccaagaacaacucccaccacuacaucauggucggcaacgagaccggccuggagcucacccugacgaacaccagccugcuccaccacaaguucugcaaccuguccgacgcccacaagaagaaccuguacgaccacacccucaugagcaucaucuccaccuuccaccugagcauccccaacuucaaccaguacgaggccauguccugcgacuucaacgggggcaagaucacggugcaguacaaccugagccacuccuacgccaucgacgccgcgaaccacugcgggaccguggccaacggcguccuccagaccuucaugcggauggccuggggcgggagcuacaucgcccuggacuccggccgcgggaagugggacugcaucaugaccagcuaccaguaccugaucauccagaacacgaccugggaggaccacugccaguucucccggcccagccccaucggcuaccucgggcugcugucccagcgcacccgggacaucuacaucagccgccggcuccugggcaccuucacguggacccugagcgacuccgagggcaacgagacccccgggggcuacugccucacccgcuggaugcugaucgaggcggagcugaagugcuucgggaacacggccguggccaagugcaacgagaagcacgacgaggaguucugcgacaugcuccggcuguucgacuucaacaagcaggccauccgccggcugaaggccgaggcgcagaugagcauccagcucaucaacaaggccgugaacgcccugaucaacgaccagcugaucaugaagaaccaccuccgcgacaucaugggcauccccuacugcaacuacuccaaguacugguaccugaaccacaccagcaccgggcggaccucccugccccgcugcuggcucgucagcaacggcuccuaccugaacgagacgcacuucagcgacgacaucgagcagcaggccgacaacaugaucaccgagaugcugcagaaggaguaccucgaccggcagggcaagaccccgcuggggcugguggaccuguucguguucuccaccagcuucuaccucaucuccaucuuccugcaccuggucaagaucccgacgcaccgccacaucgugggcaagcccugccccaagccccaccggcucaaccacauggggaucugcagcugcggccuguacaagcagccgggggugcccguccgcuggaagcggugaggacuagucccuguucccagagcccacuuuuuuuucuuuuuuugaaauaaaauagccugucuuucagaucucaaaggcucuuuucagagccaccaaaaaaaaaaaaaaaaaaaaaaaaaaaaaaaaaaaaaaaaaaaaaaaaaaaaaaaaaaaaaaaaaaaaaaaaaaaaaaaaaaaaaaaaaaaaaaaaaaaaa

SEQ ID NO: 14462 - RNA, 1767 nt, Artificial Sequence
  mRNA product Design a-2 (hSL-A100) comprising derived and/or modified sequence from LASV(G1180-SLE-2010;Clade IV)__AIT17168__GPC (opt1)
aggagaguccgcucagccagguugcagaagcggcuuagcguguguccuaaucuucucucugcguguagguaggccugugccgcaaacaagcuuaccaugggccagaucgugaccuucuuccaggaggucccccacgugaucgaggaggugaugaacaucguccugaucgcccucagcauccuggccgugcugaaggggcucuacaacuucgcgaccugcggccugguggggcugcucaccuuccugcugcucugcggccgcuccugcaccgccagccgguacaagggggucuacgagcugcagacccuggagcucaacauggagacccugaacaugacgaugccgcuguccugcaccaagaacaacagccaccacuacaucauggugggcaacgagaccggccucgagcugacccugacgaacaccuccaucaucaaccacaaguucugcaaccucagcgacgcccacaagaagaaccuguacgaccacgcccugauguccaucaucagcaccuuccaccucuccauccccaacuucaaccaguacgaggccaugagcugcgacuucaacgggggcaagaucuccgugcaguacaaccugagccacuccuacgcgggggacgccgccaaccacugcggcaccgucgccaacggggugcugcagacguucaugcgcauggcguggggcggcagcuacaucgcccucgacuccgggcacggcagcugggacugcaucaugaccuccuaccaguaccugaucauccagaacaccaccugggaggaccacugccaguucagccggcccucccccaucggguaccugggccuccugagccagcgcacgcgggacaucuacaucagccgccggcugcucggcaccuucaccuggacccuguccgacagcgaggggaaggacacgccgggcggguacugccugacccgcuggaugcucaucgaggccgagcugaagugcuucggcaacaccgccguggccaagugcaacgagaagcacgacgaggaguucugcgacaugcugcggcuguucgacuucaacaagcaggcgauccagcgccugaaggccgaggcccagauguccauccagcugaucaacaaggccgucaacgcccucaucaacgaccagcugaucaugaagaaccaccuccgggacaucauggggauccccuacugcaacuacagcaaguacugguaccucaaccacaccacgaccggcaagaccucccugcccaagugcuggcuggugagcaacggcuccuaccucaacgagacccacuucagcgacgacaucgagcagcaggcggacaacaugaucacggagaugcugcagaaggaguacauggagcgccaggggaagacgccccugggccucguggaccuguucgucuucuccaccagcuucuaccugaucuccaucuuccugcaccucgugaagaucccgacccaccggcacaucgugggcaagagcugccccaagccccaccgccugaaccacauggggaucugcuccugcgggcuguacaagcagcccggcgucccggugaaguggaagcggugaggacuagucccuguucccagagcccacuuuuuuuucuuuuuuugaaauaaaauagccugucuuucagaucucaaaggcucuuuucagagccaccaaaaaaaaaaaaaaaaaaaaaaaaaaaaaaaaaaaaaaaaaaaaaaaaaaaaaaaaaaaaaaaaaaaaaaaaaaaaaaaaaaaaaaaaaaaaaaaaaaaaa

SEQ ID NO: 14463 - RNA, 1767 nt, Artificial Sequence
  mRNA product Design a-2 (hSL-A100) comprising derived and/or modified sequence from LASV(G1442-SLE-2011;Clade IV)__AIT17180__GPC (opt1)
aggagaguccgcucagccagguugcagaagcggcuuagcguguguccuaaucuucucucugcguguagguaggccugugccgcaaacaagcuuaccaugggccagaucgugaccuucuuccaggaggucccccacgugaucgaggaggugaugaacaucguccugaucgcccucagcauccuggccgugcugaaggggcucuacaacguggcgaccugcggccugaucgggcuggucacguuccuccugcugugcggccgcuccugcaccaccacccucuacaaggggguguacgagcugcagacgcuggagcucaacauggagacccugaacaugaccaugccgcugagcugcaccaagaacaacucccaccacuacauccgggugggcaacgagacgggccucgagcugacccugaccaacaccagcaucaucaaccacaaguucugcaaccucuccgacgcccacaagaagaaccuguacgaccacgcccugaugagcaucaucuccacguuccaccucagcauccccaacuucaaccaguacgaggccauguccugcgacuucaacgggggcaagaucagcguccaguacaaccugucccacagcuacgccggggacgcggccaaccacugcggcaccguggccaacggggugcugcagaccuucaugcgcauggccuggggcggcuccuacaucgcgcucgacagcgggcggggcaacugggacugcaucaugaccuccuaccaguaccugaucauccagaacacgaccugggacgaccacugccaguucagccgccccucccccaucggguaccugggccuccugagccagcggacccgcgacgucuacaucucccggcgccugcucggcaccuucacguggacccugagcgacagcgaggggaaggacaccccgggcggguacugccugacccgguggaugcucaucgaggccgagcugaagugcuucggcaacacggccguggccaagugcaacgagaagcacgacgaggaguucugcgacaugcugcgccucuucgacuucaacaagcaggccauccagcggcugaaggcggaggcccagauguccauccagcugaucaacaaggccgugaacgcccucaucaacgaccagcugaucaugaagaaccaccuccgcgacaucauggggauccccuacugcaacuacagcaaguacugguaccugaacaacaccgccaccggcaagaccucccugcccaagugcuggcugaucagcaacggcuccuaccucaacgagacgcacuucagcgacgacaucgagcaggaggcggacaacaugaucaccgagaugcugcagaaggaguacauggagcggcaggggaagacgccccugggccucgucgaccuguucguguucuccaccagcuucuaccugaucuccaucuuccugcaccucgugaagaucccgacccaccgccacaucgucggcaagagcugccccaagccccaccggcugaaccacauggggaucugcuccugcgggcuguacaagcagcccggcgugccggugcgcuggaagcggugaggacuagucccuguucccagagcccacuuuuuuuucuuuuuuugaaauaaaauagccugucuuucagaucucaaaggcucuuuucagagccaccaaaaaaaaaaaaaaaaaaaaaaaaaaaaaaaaaaaaaaaaaaaaaaaaaaaaaaaaaaaaaaaaaaaaaaaaaaaaaaaaaaaaaaaaaaaaaaaaaaaaa

SEQ ID NO: 14464 - RNA, 1767 nt, Artificial Sequence
  mRNA product Design a-2 (hSL-A100) comprising derived and/or modified sequence from LASV(G3010-SLE-2013;Clade IV)__AIT17344__GPC (opt1)
aggagaguccgcucagccagguugcagaagcggcuuagcguguguccuaaucuucucucugcguguagguaggccugugccgcaaacaagcuuaccaugggccagaucgugaccuucuuccaggaggucccccacgugaucgaggaggugaugaacaucguccugaucgcccucagcauccuggccgugcugaaggggcucuacaacuucgcgaccugcggccugguggggcuggucacguuccuccugcugugcggccgcuccugcaccaccagccucuacaaggggguguacgagcugcagacccuggagcucaacauggagacgcugaacaugaccaugccgcuguccugcaccaagaacaacagccaccacuacaucauggugggcaacgagaccggccucgagcugacgcugaccaacaccuccaucaucaaccacaaguucugcaaccucagcgacgcccacaagaagaaccuguacaaccacgcccugauguccaucaucagcaccuuccaccucuccauccccaacuucaaccaguacgaggccaugagcugcgacuucaacgggggcaagaucuccguccaguacaaccugagccacuccuacgccggggacgcggccagccacugcggcacgguggccaacggggugcugcagaccuucaugcggauggccuggggcggcuccuacaucgcgcucgacagcggguacggcaagugggacugcaucaugaccuccuaccaguaccugaucauccagaacaccacgugggaggaccacugccaguucagccgccccucccccaucggguaccugggccuccugagccagcggacccgcgacaucuacaucagccggcgccugcucggcaccuucaccuggacgcuguccgacagcgaggggaaggacaccccgggcggguacugccugacccgguggaugcucaucgaggccgagcugaagugcuucggcaacaccgccgucgccaagugcaacgagaagcacgacgaggaguucugcgacaugcugcgccucuucgacuucaacaagcaggccauccagcggcugaagacggaggcgcagauguccauccagcugaucaacaaggccgugaacgcccucaucaacgaccagcugaucaugaagaaccaccuccgcgacaucauggggauccccuacugcaacuacagcaaguacugguaccugaaccacaccaccaccggcaagacgucccugcccaagugcuggcuggugagcaacggcuccuaccucaacgagacccacuucagcgacgacaucgagcagcaggccgacaacaugaucaccgagaugcugcagaaggaguacauggagcggcaggggaagacgccccugggccucgucgaccuguucguguucuccaccagcuucuaccugaucuccaucuuccugcaccucgugaagaucccgacccaccgccacaucgucggcaagagcugccccaagccccaccggcugaaccacauggggaucugcuccugcgggcuguacaagcagcccggcgugccggugcgcuggaagcggugaggacuagucccuguucccagagcccacuuuuuuuucuuuuuuugaaauaaaauagccugucuuucagaucucaaaggcucuuuucagagccaccaaaaaaaaaaaaaaaaaaaaaaaaaaaaaaaaaaaaaaaaaaaaaaaaaaaaaaaaaaaaaaaaaaaaaaaaaaaaaaaaaaaaaaaaaaaaaaaaaaaaa

SEQ ID NO: 14465 - RNA, 1767 nt, Artificial Sequence
  mRNA product Design a-2 (hSL-A100) comprising derived and/or modified sequence from LASV(G502-SLE-2009;Clade IV)__AIT17126__GPC (opt1)
aggagaguccgcucagccagguugcagaagcggcuuagcguguguccuaaucuucucucugcguguagguaggccugugccgcaaacaagcuuaccaugggccagaucgugaccuucuuccaggaggucccccacgugaucgaggaggugaugaacaucguccugaucgcccucagcauccuggccgugcugaaggggcucuacaacuucgcgaccugcggccugguggggcugcucacguuccugcugcucugcggccgcuccugcaccaccgggcuguacaagggcgucuacgagcugcagacccucgagcugaacauggagacgcugaacaugaccaugccgcucagcugcaccaagaacaacucccaccacuacaucauggugggcaacgagaccgggcuggagcugacgcucaccaacaccagcaucaucaaccacaaguucugcaaccuguccgacgcccacaagaagaaccuguacgaccacgcccucaugagcaucaucuccaccuuccaccugagcauccccaacuucaaccaguacgaggccauguccugcgacuucaacggcgggaagaucagcgugcaguacaaccugucccacagcuacgccggcgacgcggccgaccacugcgggacggucgccaacggcgugcuccagaccuucaugcggauggccuggggcggguccuacaucgcgcuggacagcggccgcgggcggugggacugcaucaugaccuccuaccaguaccugaucauccagaacaccacgugggaggaccacugccaguucagccgccccucccccaucggcuaccucggccugcugagccagcggacccgcgacaucuacaucucccggcgccuccuggggaccuucaccuggacgcugagcgacagcgagggcaaggacacccccgggggcuacugccucacccgguggaugcugaucgaggccgagcugaagugcuucgggaacaccgccguggccaagugcaacgagaagcacgacgaggaguucugcgacaugcuccgccuguucgacuucaacaagcaggccauccagcggcugaaggcggaggcccagauguccauccagcucaucaacaaggccgucaacgcccugaucaacgaccagcuggugaugaagaaccaccuccgcgacaucaugggcauccccuacugcaacuacagccgguacugguaccugaaccacacgaccaccggccgcaccucccugcccaagugcuggcucgugagcaacggguccuaccugaacgagacgcacuucagcgacgacaucgagcagcaggccgacaacaugaucaccgagaugcugcagaaggaguacauggagcggcagggcaagaccccgcucgggcuggucgaccuguucguguucuccaccagcuucuaccugaucuccaucuuccuccaccuggugaagaucccgacgcaccgccacaucgucggcaagagcugccccaagccccaccggcugaaccacauggggaucugcuccugcggccucuacaagcagcccggcgugccggugaaguggaagcgcugaggacuagucccuguucccagagcccacuuuuuuuucuuuuuuugaaauaaaauagccugucuuucagaucucaaaggcucuuuucagagccaccaaaaaaaaaaaaaaaaaaaaaaaaaaaaaaaaaaaaaaaaaaaaaaaaaaaaaaaaaaaaaaaaaaaaaaaaaaaaaaaaaaaaaaaaaaaaaaaaaaaaa

SEQ ID NO: 14466 - RNA, 1767 nt, Artificial Sequence
  mRNA product Design a-2 (hSL-A100) comprising derived and/or modified sequence from LASV(G733-SLE-2010;Clade IV)__AIT17154__GPC (opt1)
aggagaguccgcucagccagguugcagaagcggcuuagcguguguccuaaucuucucucugcguguagguaggccugugccgcaaacaagcuuaccaugggccagaucgugaccuucuuccaggaggucccccacgugaucgaggaggugaugaacaucguccugaucgcccucagcauccuggccgugcugaaggggcucuacaacuucgcgaccugcggcaucguggggcuggucuccuuccugcuccugugcggccgcagcugcacgaccucccuguacaaggggguguacgagcuccagacccuggagcugaacauggagacccucaacaugacgaugccgcugagcugcaccaagaacaacucccaccacuacaucauggugggcaacgagaccggccuggagcucacccugacgaacaccagcaucaucaaccacaaguucugcaaccuguccgacgcccacaagaagaaccucuacgaccacgcccugaugagcaucaucuccaccuuccaccugagcauccccaacuucaaccaguacgaggccauguccugcgacuucaacgggggcaagaucagcguccaguacaaccucucccacagcuacgccggggacgcggccaaccacugcggcaccaucgccaacggggugcugcagacguucaugcggauggccuggggcggcuccuacaucgcgcuggacagcgggcgcgaccggugggacugcaucaugaccuccuaccaguaccucaucauccagaacaccaccugggaggaccacugccaguucagccgccccucccccaucggcuaccuggggcugcucagccagcggacgcgcgacaucuacaucagccggcgccugcugggcaccuucaccuggacccucuccgacagcgagggcaaggacacgcccgggggcuacugccugacccgguggaugcugaucgaggccgagcucaagugcuucgggaacaccgccguggccaagugcaacgagaagcacgacgaggaguucugcgacaugcugcgccuguucgacuucaacaagcaggccauccagcggcucaaggcggaggcccagauguccauccagcugaucaacaaggccgucaacgcccugaucaacgaccagcucaucaugaagaaccaccuccgcgacaucaugggcauccccuacugcaacuacagcaaguacugguaccugaaccacaccacgaccgggaagaccucccugcccaagugcuggcuggugagcaacggcuccuaccugaacgagacccacuucagcgacgacaucgagcagcaggccgacaacaugaucacggagaugcuccagaaggaguacauggagcggcagggcaagaccccgcuggggcugguggaccucuucgucuucuccaccagcuucuaccugaucuccaucuuccugcaccuggugaagaucccgacccaccgccacguggucggcaagagcugccccaagccccaccggcucaaccacauggggaucugcuccugcggccuguacgggcagcccggcgugccggugaaguggaagcgcugaggacuagucccuguucccagagcccacuuuuuuuucuuuuuuugaaauaaaauagccugucuuucagaucucaaaggcucuuuucagagccaccaaaaaaaaaaaaaaaaaaaaaaaaaaaaaaaaaaaaaaaaaaaaaaaaaaaaaaaaaaaaaaaaaaaaaaaaaaaaaaaaaaaaaaaaaaaaaaaaaaaaa

SEQ ID NO: 14467 - RNA, 1767 nt, Artificial Sequence
  mRNA product Design a-2 (hSL-A100) comprising derived and/or modified sequence from MOPV/LASV reassortant(IGS-1;Clade IV)__AFY05576__GPC (opt1)
aggagaguccgcucagccagguugcagaagcggcuuagcguguguccuaaucuucucucugcguguagguaggccugugccgcaaacaagcuuaccaugggccagaucgugaccuucuuccaggaggucccccacgugaucgaggaggugaugaacaucguccugaucgcccucagcgugcuggccgugcugaaggggcucuacaacuucgcgaccugcggccuggucgggcuggugacguuccuccugcugugcggccgcuccugcaccaccagccucuacaaggggguguacgagcugcagacccuggagcucaacauggagacgcugaacaugaccaugccgcuguccugcaccaagaacaacagccaccacuacaucauggucggcaacgagaccggccucgagcugacgcugaccaacaccuccaucaucaaccacaaguucugcaaccucagcgacgcccacaagaagaaccuguacgaccacgcccugauguccaucaucagcaccuuccaccucuccauccccaacuucaaccaguacgaggccaugagcugcgacuucaacgggggcaagaucuccgugcaguacaaccugagccacuccuacgccggggacgcggccaaccacugcggcacgguggccaacgggguccugcagaccuucaugcggauggccuggggcggcagcuacaucgcgcucgacuccgggcgcggcaacugggacugcaucaugaccagcuaccaguaccugaucauccagaacaccacgugggaggaccacugccaguucucccggcccagccccaucggguaccugggccuccugucccagcgcacccgggacaucuacaucagccgccggcugcucggcaccuucaccuggacgcugagcgacuccgagggggaggacaccccgggcggguacugccugacccgcuggaugcucaucgaggccgagcugaagugcuucggcaacaccgccguggccaagugcaacgagaagcacgacgaggaguucugcgacaugcugcggcuguucgacuucaacaagcaggccauccagcgccugaaggcggaggcccagaugagcauccagcugaucaacaaggccgugaacgcccucaucaacgaccagcugaucaugaagaaccaccuccgggacaucauggggauccccuacugcaacuacuccaaguacugguaccucaaccacacgaccaccggccgcaccagccugcccaagugcuggcuggucuccaacggcagcuaccucaacgagacgcacuucuccgacgacaucgagcagcaggccgacaacaugaucaccgagaugcugcagaaggaguacauggagcggcaggggaagacgccccugggccucguggaccuguucguguucagcaccuccuucuaccugaucagcaucuuccugcaccucgucaagaucccgacccaccgccacaucguggggaaguccugccccaagccccaccggcugaaccacaugggcaucugcagcugcgggcuguacaagcagcccggcgugccggucaaguggaagcgcugaggacuagucccuguucccagagcccacuuuuuuuucuuuuuuugaaauaaaauagccugucuuucagaucucaaaggcucuuuucagagccaccaaaaaaaaaaaaaaaaaaaaaaaaaaaaaaaaaaaaaaaaaaaaaaaaaaaaaaaaaaaaaaaaaaaaaaaaaaaaaaaaaaaaaaaaaaaaaaaaaaaaa

SEQ ID NO: 14468 - RNA, 1767 nt, Artificial Sequence
  mRNA product Design a-2 (hSL-A100) comprising derived and/or modified sequence from LASV(LM765-SLE-2012;Clade IV)__AIT17814__GPC (opt1)
aggagaguccgcucagccagguugcagaagcggcuuagcguguguccuaaucuucucucugcguguagguaggccugugccgcaaacaagcuuaccaugggccagaucgugaccuucuuccaggaggucccccacgugaucgaggaggugaugaacaucguccugaucgcccucagcauccuggccgugcugaaggggcucuacaacuucgcgaccugcggccugguggggcuggucacguuccuccugcugugcggccgcuccugcaccaccagccucuacaaggggguguacgagcugcagacccuggagcucaacauggagacgcugaacaugaccaugccgcuguccugcaccaagaacaacagccaccacuacaucauggugggcaacgagaccggccucgagcugacgcugaccaacaccuccaucaucgaccacaaguucugcaaccucagcgacgcccaccggaagaaccuguacgaccacgcccugauguccaucaucagcaccuuccaccucuccauccccaacuucaaccaguacgaggccaugagcugcgacuucaacgggggcaagaucuccguccaguacaaccugagccacuccuacgccaaggacgcggccgaccacugcgggacgguggccaacggcgugcugcagaccuucaugcgcauggccuggggcgggagcuacaucgcgcucgacuccggccgggggcgcugggacugcaucaugaccagcuaccaguaccugaucauccagaacaccacgugggaggaccacugccaguucucccggcccagccccaucggcuaccuggggcuccugucccagcgcacccgggacaucuacaucagccgccggcugcucggcaccuucaccuggacgcugagcgacuccgagggcaaggacacccccgggggcuacugccugacccgcuggaugcucaucgaggccgagcugaagugcuucgggaacaccgccgucgccaagugcaacgagaagcacgacgaggaguucugcgacaugcugcggcuguucgacuucaacaagcaggccauccagcgccugaaggcggaggcccagaugagcauccagcugaucaacaaggccgugaacgcccucaucaacgaccagcugaucaugaagaaccaccuccgggacaucaugggcauccccuacugcaacuacuccaaguacugguaccucaaccacacgaccaccgggaagaccagccugcccaagugcuggcugguguccaacggcagcuaccucaacgagacgcacuucuccgacgacaucgagcagcaggccgacaacaugaucaccgagaugcugcagaaggaguacauggagcgccagggcaagaccccgcuggggcucgucgaccuguucguguucagcaccuccuucuaccugaucagcaucuuccugcaccucgugaagaucccgacgcaccggcacaucgucggcaagcccugccccaagccccaccgccugaaccacauggggaucugcuccugcggccuguacaagcagccgggggugcccgugaaguggaagcggugaggacuagucccuguucccagagcccacuuuuuuuucuuuuuuugaaauaaaauagccugucuuucagaucucaaaggcucuuuucagagccaccaaaaaaaaaaaaaaaaaaaaaaaaaaaaaaaaaaaaaaaaaaaaaaaaaaaaaaaaaaaaaaaaaaaaaaaaaaaaaaaaaaaaaaaaaaaaaaaaaaaaa

SEQ ID NO: 14469 - RNA, 1767 nt, Artificial Sequence
  mRNA product Design a-2 (hSL-A100) comprising derived and/or modified sequence from LASV(LM776-SLE-2012;Clade IV)__AIT17824__GPC (opt1)
aggagaguccgcucagccagguugcagaagcggcuuagcguguguccuaaucuucucucugcguguagguaggccugugccgcaaacaagcuuaccaugggccagaucgugaccuucuuccaggaggucccccacgugaucgaggaggugaugaacaucguccugaucgcccucagcauccuggccgugcugaaggggcucuacaacuucgcgaccugcggccugguggggcuggucacguuccuccugcugugcggccgcuccugcaccaccagcguguacaaggggguguacgagcuccagacccuggagcugaacauggagacgcucaacaugaccaugccgcuguccugcaccaagaacaacagccaccacuacaucauggucggcaacgagaccggccuggagcucacgcugaccaacaccuccaucaucaaccacaaguucugcaaccugagcgacgcccacaagaagaaccucuacgaccacgcccugauguccaucaucagcaccuuccaccuguccauccccaacuucaaccaguacgaggccaugagcugcgacuucaacgggggcaagaucuccgugcaguacaaccucagccacuccuacgccggggacgcggccaaccacugcggcacgguggccaacgggguccugcagaccuucaugcggauggccuggggcggcagcuacaucgcgcuggacuccgggcacggcaagugggacugcaucaugaccagcuaccaguaccucaucauccagaacaccacgugggaggaccacugccaguucucccgccccagccccaucggguaccugggccugcucucccagcggacccgcgacaucuacaucagccggcgccugcugggcaccuucaccuggacgcucagcgacuccgaggggaaggacaccccgggcggguacugccugacccgguggaugcugaucgaggccgagcucaagugcuucggcaacaccgccguggccaagugcaacgagaagcacgacgaggaguucugcgacaugcugcgccuguucgacuucaacaagcaggccauccagcggcucaaggcggaggcccagaugagcauccagcugaucaacaaggccgugaacgcccugaucaacgaccagcucaucaugaagaaccaccuccgcgacaucauggggauccccuacugcaacuacuccaaguacugguaccugaaccacacgaccaccggcaagaccagccugcccaagugcuggcuggucuccaacggcagcuaccugaacgagacgcacuucuccgacgacaucgagcagcaggccgacaacaugaucaccgagaugcuccagaaggaguacauggagcggcaggggaagacgccccugggccugguggaccucuucguguucagcaccuccuucuaccugaucagcaucuuccugcaccuggucaagaucccgacccaccgccacaucguggggaaguccugccccaagccccaccggcucaaccacaugggcaucugcagcugcgggcuguacaagcagcccggcgugccgguccgcuggaagcggugaggacuagucccuguucccagagcccacuuuuuuuucuuuuuuugaaauaaaauagccugucuuucagaucucaaaggcucuuuucagagccaccaaaaaaaaaaaaaaaaaaaaaaaaaaaaaaaaaaaaaaaaaaaaaaaaaaaaaaaaaaaaaaaaaaaaaaaaaaaaaaaaaaaaaaaaaaaaaaaaaaaaa

SEQ ID NO: 14470 - RNA, 1767 nt, Artificial Sequence
  mRNA product Design a-2 (hSL-A100) comprising derived and/or modified sequence from LASV(Mad39;Clade IV)__ANH09722__GPC (opt1)
aggagaguccgcucagccagguugcagaagcggcuuagcguguguccuaaucuucucucugcguguagguaggccugugccgcaaacaagcuuaccaugggccagaucgugaccuucuuccaggaggucccccacgugaucgaggaggugaugaacaucguccugaucgcccucagcauccuggccgugcugaaggggcucuacaacguggcgaccugcggccugaucgggcuggucacguuccuccugcugugcggccgcuccugcaccaccacccucuacaaggggguguacgagcugcaggcccuggagcucaacauggagacgcugaacaugaccaugccgcugagcugcaccaagaacaacucccaccacuacauccgggugggcaacgagaccggccucgagcugacgcugaccaacaccagccucaucaaccacaaguucugcaaccuguccgacgcccacaagaagaaccuguacgaccacgcccucaugagcaucaucuccaccuuccaccugagcauccccaacuucaaccaguacgaggccauguccugcgacuucaacgacgggaagaucagcguccaguacaaccugucccacacguacgcgggcgacaccgccaaccacugcgggaccguggccaacggcgugcuccagaccuucaugcgcauggccuggggcgggagcuacaucgcgcuggacuccggccgcgggggcugggacugcaucaugacgagcuaccaguaccugaucauccagaacaccaccugggaggaccacugccaguucucccggcccagccccaucggguaccucggccugcugucccagcggacccgcgacaucuacaucagccggcgccuccugggcacguucaccuggacccuguccgacagcgaggggaaggacaccccgggcggguacugccucacgcgguggaugcugaucgaggccgagcugaagugcuucggcaacaccgccgucgccaagugcaacgagaagcacgacgaggaguucugcgacaugcuccgccuguucgacuucaacaagcaggccauccagcggcugaaggcggaggcccagaugagcauccagcucaucaacaaggccgugaacgcccugaucaacgaccagcugaucaugaagaaccaccuccgcgacaucauggggauccccuacugcaacuacuccaaguacugguaccugaaccacaccgugaccggcaagacgagccugcccaagugcuggcucgucuccaacggcagcuaccugaacgagacccacuucuccgacgacaucgagcagcaggccgacaacaugaucaccgagaugcugcagaaggaguacauggagcggcaggggaagacgccccucggccugguggaccuguucguguucagcaccuccuucuaccugaucagcaucuuccuccaccuggucaagaucccgacccaccgccacgugguggggaagcccugccccaagccccaccggcugaaccacaugggcaucugcuccugcggguucuacaagcagccgggcguccccgugcgcuggaagcggugaggacuagucccuguucccagagcccacuuuuuuuucuuuuuuugaaauaaaauagccugucuuucagaucucaaaggcucuuuucagagccaccaaaaaaaaaaaaaaaaaaaaaaaaaaaaaaaaaaaaaaaaaaaaaaaaaaaaaaaaaaaaaaaaaaaaaaaaaaaaaaaaaaaaaaaaaaaaaaaaaaaaa

SEQ ID NO: 14471 - RNA, 1767 nt, Artificial Sequence
  mRNA product Design a-2 (hSL-A100) comprising derived and/or modified sequence from LASV(Z0947-SLE-2011;Clade IV)__AIT17840__GPC (opt1)
aggagaguccgcucagccagguugcagaagcggcuuagcguguguccuaaucuucucucugcguguagguaggccugugccgcaaacaagcuuaccaugggccagaucgugaccuucuuccaggaggucccccacgugaucgaggaggugaugaacaucguccugaucgcccucagcauccuggccgugcugaaggggcucuacaacuucgcgaccugcggccugguggggcuggucacguuccuccugcugugcggccgcuccugcaccaucagccucuacaaggggguguacgagcugcagacccuggagcucaacauggagacccugaacaugacgaugccgcuguccugcaccaagaacaacagccaccacuacaucauggugggcaacgagaccggccucgagcugacccugacgaacaccuccaucaucaaccacaaguucugcaaccucagcgacgcccacaagaagaaccuguacgaccacgcccugauguccaucaucagcaccuuccaccucuccauccccaacuucaaccaguacgaggccaugagcugcgacuucaacgggggcaagaucuccguccaguacaaccugagccacuccuacgccggggacgcggccaaccacugcggcaccguggccaacggggugcugcagacguucaugcggauggccuggggcggcagcuacaucgcgcucgacuccgggcgcgaccggugggacugcaucaugaccagcuaccaguaccugaucauccagaacaccaccugggaggaccacugccaguucucccgccccagccccaucggcuaccuggggcuccugucccagcggacgcgcgacaucuacaucagccggcgccugcucggcaccuucaccuggacccugagcgacuccgagggcaaggacacgcccgggggcuacugccugacccgguggaugcucaucgaggccgagcugaagugcuucgggaacaccgccgucgccaagugcaacgagaagcacgacgaggaguucugcgacaugcugcgccucuucgacuucaacaagcaggccauccagcggcugaaggcggaggcccagaugagcauccagcugaucaacaaggccgugaacgcccucaucaacgaccagcugaucaugaagaaccaccuccgcgacaucaugggcauccccuacugcaacuacuccaaguacugguaccugaaccacaccacgaccgggaagaccagccugcccaagugcuggcugguguccaacggcagcuaccucaacgagacccacuucuccgacgacaucgagcagcaggccgacaacaugaucacggagaugcugcagaaggaguacauggagcggcagggcaagaccccgcuggggcucgucgaccuguucguguucagcaccuccuucuaccugaucagcaucuuccugcaccucgugaagaucccgacccaccgccacaucgucggcaagcccugccccaagccccaccggcugaaccacauggggaucugcuccugcggccuguacaagcagccgggggugcccgugaaguggaagcgcugaggacuagucccuguucccagagcccacuuuuuuuucuuuuuuugaaauaaaauagccugucuuucagaucucaaaggcucuuuucagagccaccaaaaaaaaaaaaaaaaaaaaaaaaaaaaaaaaaaaaaaaaaaaaaaaaaaaaaaaaaaaaaaaaaaaaaaaaaaaaaaaaaaaaaaaaaaaaaaaaaaaaa

SEQ ID NO: 14472 - RNA, 1767 nt, Artificial Sequence
  mRNA product Design a-2 (hSL-A100) comprising derived and/or modified sequence from LASV(Josiah;Clade IV)__NP_694870__GPC (opt4)
aggagaguccgcucagccagguugcagaagcggcuuagcguguguccuaaucuucucucugcguguagguaggccugugccgcaaacaagcuuaccaugggccagaucgugaccuucuuccaggaggugccccacgugaucgaggaggugaugaacaucgugcugaucgcccugagcgugcuggccgugcugaagggccuguacaacuucgccaccugcggccuggugggccuggugaccuuccugcugcugugcggcagaagcugcaccaccagccuguacaagggcguguacgagcugcagacccuggagcugaacauggagacccugaacaugaccaugccccugagcugcaccaagaacaacagccaccacuacaucauggugggcaacgagaccggccuggagcugacccugaccaacaccagcaucaucaaccacaaguucugcaaccugagcgacgcccacaagaagaaccuguacgaccacgcccugaugagcaucaucagcaccuuccaccugagcauccccaacuucaaccaguacgaggccaugagcugcgacuucaacggcggcaagaucagcgugcaguacaaccugagccacagcuacgccggcgacgccgccaaccacugcggcaccguggccaacggcgugcugcagaccuucaugagaauggccuggggcggcagcuacaucgcccuggacagcggcagaggcaacugggacugcaucaugaccagcuaccaguaccugaucauccagaacaccaccugggaggaccacugccaguucagcagacccagccccaucggcuaccugggccugcugagccagagaaccagagacaucuacaucagcagaagacugcugggcaccuucaccuggacccugagcgacagcgagggcaaggacacccccggcggcuacugccugaccagauggaugcugaucgaggccgagcugaagugcuucggcaacaccgccguggccaagugcaacgagaagcacgacgaggaguucugcgacaugcugagacuguucgacuucaacaagcaggccauccagagacugaaggccgaggcccagaugagcauccagcugaucaacaaggccgugaacgcccugaucaacgaccagcugaucaugaagaaccaccugagagacaucaugggcauccccuacugcaacuacagcaaguacugguaccugaaccacaccaccaccggcagaaccagccugcccaagugcuggcuggugagcaacggcagcuaccugaacgagacccacuucagcgacgacaucgagcagcaggccgacaacaugaucaccgagaugcugcagaaggaguacauggagagacagggcaagaccccccugggccugguggaccuguucguguucagcaccagcuucuaccugaucagcaucuuccugcaccuggugaagauccccacccacagacacaucgugggcaagagcugccccaagccccacagacugaaccacaugggcaucugcagcugcggccuguacaagcagcccggcgugcccgugaaguggaagagaugaggacuagucccuguucccagagcccacuuuuuuuucuuuuuuugaaauaaaauagccugucuuucagaucucaaaggcucuuuucagagccaccaaaaaaaaaaaaaaaaaaaaaaaaaaaaaaaaaaaaaaaaaaaaaaaaaaaaaaaaaaaaaaaaaaaaaaaaaaaaaaaaaaaaaaaaaaaaaaaaaaaaa

SEQ ID NO: 14473 - RNA, 1764 nt, Artificial Sequence
  mRNA product Design a-2 (hSL-A100) comprising derived and/or modified sequence from LASV(LP;Clade I)__AAF86701__GPC (opt4)
aggagaguccgcucagccagguugcagaagcggcuuagcguguguccuaaucuucucucugcguguagguaggccugugccgcaaacaagcuuaccaugggccagaucaucaccuucuuccaggaggugccccacgugaucgaggaggugaugaacaucgugcugaucgcccugagccugcuggccauccugaagggccuguacaacaucgccaccugcggcaucaucggccugguggccuuccuguuccugugcggcaagagcugcagccugacccugaagggcggcuacgagcugcagacccuggagcugaacauggagacccugaacaugaccaugccccugagcugcaccaagaacagcagccaccacuacaucagagugggcaacgagaccggccuggagcugacccugaccaacaccagcaucaucaaccacaaguucugcaaccugagcgacgcccacaagaagaaccuguacgaccacgcccugaugagcaucaucagcaccuuccaccugagcauccccaacuucaaccaguacgaggccaugagcugcgacuucaacggcggcaagaucagcgugcaguacaaccugagccacagcuacgccggcgacgccgccgagcacugcggcaccguggccaacggcgugcugcagaccuucaugagaauggccuggggcggcagauacaucgcccuggacagcggcaagggcaacugggacugcaucaugaccagcuaccaguaccugaucauccagaacaccaccugggaggaccacugccaguucagcagacccagccccaucggcuaccugggccugcugagccagagaaccagagacaucuacaucagcagaagacugcugggcaccuucaccuggacccugagcgacagcgagggcaacgagacccccggcggcuacugccugaccagauggaugcugaucgaggccgagcugaagugcuucggcaacaccgccguggccaagugcaacgagaagcacgacgaggaguucugcgacaugcugagacuguucgacuucaacaagcaggccaucagaagacugaaggccgaggcccagaugagcauccagcugaucaacaaggccgugaacgcccugaucaacgaccagcugaucaugaagaaccaccugagagacaucaugggcauccccuacugcaacuacagcaaguacugguaccugaaccacaccagcagcggcagaaccagccugcccaagugcuggcugaucagcaacggcagcuaccugaacgagacccaguucagcgacgacaucgagcagcaggccgacaacaugaucaccgagaugcugcagaaggaguacaucgagagacagggcaagaccccccugggccugguggacaucuucaucuucagcaccagcuucuaccugaucagcaucuuccugcaccugaucaagauccccacccacagacacaucgugggcaagcccugccccaagccccacagacugaaccacaugggcgugugcagcugcggccuguacaagcaccccggcgugcccaccaaguggaagagaugaggacuagucccuguucccagagcccacuuuuuuuucuuuuuuugaaauaaaauagccugucuuucagaucucaaaggcucuuuucagagccaccaaaaaaaaaaaaaaaaaaaaaaaaaaaaaaaaaaaaaaaaaaaaaaaaaaaaaaaaaaaaaaaaaaaaaaaaaaaaaaaaaaaaaaaaaaaaaaaaaaaaa

SEQ ID NO: 14474 - RNA, 1764 nt, Artificial Sequence
  mRNA product Design a-2 (hSL-A100) comprising derived and/or modified sequence from LASV(803213;Clade II)__AAF86703__GPC (opt4)
aggagaguccgcucagccagguugcagaagcggcuuagcguguguccuaaucuucucucugcguguagguaggccugugccgcaaacaagcuuaccaugggccagaucaucaccuucuuccaggaggugccccacgugaucgaggaggugaugaacaucgugcugaucgcccugagccugcuggccauccugaagggcaucuacaacguggccaccugcggccuguucggccugaucagcuuccugcugcugugcggcagaagcugcagcgugaccuacaagggcguguacgagcugcagacccuggagcugaacauggccaaccugaacaugaccaugccccugagcugcaccaagaacaacagccaccacuacaucauggugggcaacgagaccggccuggagcugacccugaccaacaccagcaucaucaaccacaaguucugcaaccugagcgacgcccacaagaagaaccuguacgaccacgcccugaugagcaucaucagcaccuuccaccugagcauccccaacuucaaccaguacgaggccaugagcugcgacuucaacggcggcaagaucagcgugcaguacaaccugagccacagcuucgccguggacgccgccaaccacugcggcaccaucgccaacggcgugcugcagaccuucaugagaauggccuggggcggcagcuacaucgcccuggacagcggcaagggcaacugggacugcaucaugaccagcuaccaguaccugaucauccagaacaccaccugggaggaccacugccaguucagcagacccagccccaucggcuaccugggccugcugagccagagaaccagagacaucuacaucagcagaagacugcugggcaccuucaccuggacccugagcgacagcgagggcaacgaggcccccggcggcuacugccugaccagauggaugcugaucgaggccgagcugaagugcuucggcaacaccgccguggccaagugcaacgagaagcacgacgaggaguucugcgacaugcugagacuguucgacuucaacaagcaggccaucaagagacugaagaccgaggcccagaugagcauccagcugaucaacaaggccgugaacgcccugaucaacgaccagcugaucaugaagaaccaccugagagacaucaugggcauccccuacugcaacuacagcagauacugguaccugaaccacaccgugaccggcaagaccagccugcccagaugcuggcuggugagcaacggcagcuaccugaacgagacccacuucagcgacgacaucgagcagcaggccgacaacaugaucaccgagaugcugcagaaggaguacauggacagacagggcaagaccccccugggccugguggaccuguucguguucagcaccagcuucuaccugaucagcaucuuccugcaccuggugaagauccccacccacagacacaucgugggcaagcccugccccaagccccacagacugaaccacaugggcaucugcagcugcggccuguacaagcaccccggcgugcccgugaaguggaagagaugaggacuagucccuguucccagagcccacuuuuuuuucuuuuuuugaaauaaaauagccugucuuucagaucucaaaggcucuuuucagagccaccaaaaaaaaaaaaaaaaaaaaaaaaaaaaaaaaaaaaaaaaaaaaaaaaaaaaaaaaaaaaaaaaaaaaaaaaaaaaaaaaaaaaaaaaaaaaaaaaaaaaa

SEQ ID NO: 14475 - RNA, 1764 nt, Artificial Sequence
  mRNA product Design a-2 (hSL-A100) comprising derived and/or modified sequence from LASV(GA391;Clade III)__CAA36645__GPC (opt4)
aggagaguccgcucagccagguugcagaagcggcuuagcguguguccuaaucuucucucugcguguagguaggccugugccgcaaacaagcuuaccaugggccagaucgugaccuucuuccaggaggugccccacgugaucgaggaggugaugaacaucgugcugaucgcccugagcauccuggccauccugaagggccuguacaacguggccaccugcggccugaucggccuggugaccuuccugcugcugagcggcagaagcugcagccugaucuacaagggcaccuacgagcugcagacccuggagcugaacauggagacccugaacaugaccaugccccugagcugcaccaagaacaacagccaccacuacaucagagugggcaacgagaccggccuggagcugacccugaccaacaccagcauccugaaccacaaguucugcaaccugagcgacgcccacaagagaaaccuguacgaccacagccugaugagcaucaucagcaccuuccaccugagcauccccaacuucaaccaguacgaggccaugagcugcgacuucaacggcggcaagaucaccgugcaguacaaccugagccacagcuucgccguggacgccgccggccacugcggcacccuggccaacggcgugcugcagaccuucaugagaauggccuggggcggcagcuacaucgcccuggacagcggcagaggcaacugggacugcaucaugaccagcuaccaguaccugaucauccagaacaccaccugggacgaccacugccaguucagcagacccagccccaucggcuaccugggccugcugagccagagaaccagagacaucuacaucagcagaagacugcugggcaccuucaccuggacccugagcgacagcgagggcaacgagacccccggcggcuacugccugaccagauggaugcugaucgaggccgagcugaagugcuucggcaacaccgccguggccaagugcaacgagaagcacgacgaggaguucugcgacaugcugagacuguucgacuucaacaagcaggccaucagaagacugaagaccgaggcccagaugagcauccagcugaucaacaaggccgugaacgcccugaucaacgaccagcugaucaugaagaaccaccugagagacaucaugggcauccccuacugcaacuacagcagauacugguaccugaaccacaccagcaccggcaagaccagccugcccagaugcuggcugaucagcaacggcagcuaccugaacgagaccaaguucagcgacgacaucgagcagcaggccgacaacaugaucaccgagaugcugcagaaggaguacaucgacagacagggcaagaccccccugggccugguggaccuguucguguucagcaccagcuucuaccugaucagcaucuuccugcaccuggugaagauccccacccacagacacaucgugggcaagcccugccccaagccccacagacugaaccacaugggcaucugcagcugcggccuguacaagcagcccggcgugcccgugagauggaagagaugaggacuagucccuguucccagagcccacuuuuuuuucuuuuuuugaaauaaaauagccugucuuucagaucucaaaggcucuuuucagagccaccaaaaaaaaaaaaaaaaaaaaaaaaaaaaaaaaaaaaaaaaaaaaaaaaaaaaaaaaaaaaaaaaaaaaaaaaaaaaaaaaaaaaaaaaaaaaaaaaaaaaa

SEQ ID NO: 14476 - RNA, 1767 nt, Artificial Sequence
  mRNA product Design a-2 (hSL-A100) comprising derived and/or modified sequence from LASV(AV;Clade V)__CCA30314__GPC (opt4)
aggagaguccgcucagccagguugcagaagcggcuuagcguguguccuaaucuucucucugcguguagguaggccugugccgcaaacaagcuuaccaugggccagaucgugaccuucuuccaggaggugccccacgugaucgaggaggugaugaacaucgugcugaucgcccugagcauccuggccgugcugaagggccuguacaacaucgccaccugcggccugaucggccugaucaccuuccugcugcugugcggcagaagcugcagcagcaaccuguacaagggcguguacgagcugcagagccuggaccugaacauggagacccugaacaugaccaugccccugagcugcaccaagaacaacagccaccacuacaucagagugggcaacgacaccggccuggagcugacccugaccaacaccagcauccugaaccacaaguucugcaaccugagcgacgcccacaagaaggaccuguacgaccacgcccugaugagcaucaucagcaccuuccaccugagcauccccaacuucaaccaguacgaggccaugagcugcgacuucaacggcggcaagaucagcgugcaguacaaccugagccacagcuacgccaucgacgccgccaaccacugcggcaccguggccaacggcauccugcagaccuucaugagaauggccuggggcggcagcuacaucgcccuggacagcggcagaggcaacugggacugcaucaugaccagcuaccaguaccugaucauccagaacaccaccugggagaaccacugccaguucagcagacccagccccaucggcuaccugggccugcugagccagagaaccagagacaucuacaucagcagaagacugcugggcaccuucaccuggacccugagcgacagcgagggcaacgccacccccggcggcuacugccugaccagauggaugcugaucgaggccgagcugaagugcuucggcaacaccgccguggccaagugcaacgagaagcacgacgaggaguucugcgacaugcugagacuguucgacuucaacaagcaggccaucagcagacugaagagcgaggcccagaugagcauccagcugaucaacaaggccgugaacgcccugaucaacgaccagcugaucaugaagaaccaccugagagacaucaugggcauccccuacugcaacuacagcaaguacugguaccugaaccacaccaucaccggcaagaccagccugcccaagugcuggcuggugagcaacggcagcuaccugaacgagacccacuucagcgacgacaucgagcagcaggccgacaacaugaucaccgagaugcugcagaaggaguacauggagagacagggcaagaccccccugggccugguggaccuguucguguucagcaccagcuucuaccugaucagcaucuuccugagacuggugaagauccccacccacagacacaucgugggcaagcccugccccaagccccacagacugaaccacaugggcaucugcagcugcggccuguacaagcagcccggcgugcccgugagauggaagagaugaggacuagucccuguucccagagcccacuuuuuuuucuuuuuuugaaauaaaauagccugucuuucagaucucaaaggcucuuuucagagccaccaaaaaaaaaaaaaaaaaaaaaaaaaaaaaaaaaaaaaaaaaaaaaaaaaaaaaaaaaaaaaaaaaaaaaaaaaaaaaaaaaaaaaaaaaaaaaaaaaaaaa

SEQ ID NO: 14477 - RNA, 1764 nt, Artificial Sequence
  mRNA product Design a-2 (hSL-A100) comprising derived and/or modified sequence from LASV(Togo/2016/7082;Clade VI)__AMR44577__GPC (opt4)
aggagaguccgcucagccagguugcagaagcggcuuagcguguguccuaaucuucucucugcguguagguaggccugugccgcaaacaagcuuaccaugggccagaucaucaccuucuuccaggaggugccccacgugaucgaggaggugaugaacaucgugcugaucgcccugagccugcuggccauccugaagggcguguacaacguggccaccugcggcaucaucggccuggugaccuuccuguuccugugcggcagaagcugcagccugaucuacaagggcagcuacgagcugcagacccuggagcugaacauggagacccugaacaugaccaugccccugagcugcaccaagaacagcagccaccacuacaucagagugggcaacgagaccggccuggagcugacccugaccaacaccagcaucaucaaccacaaguucugcaaccugagcgacgcccacaagagaaaccuguacgaccacgcccugaugagcauccugagcaccuuccaccugagcauccccaacuucaaccaguacgaggccaugagcugcgacuucaacggcggcaagaucagcgugcaguacaaccugagccacgccuacgccguggacgccgccgagcacugcggcaccguggccaacggcgugcugcagaccuucaugagaauggccuggggcggcagcuacaucgcccuggacagcggcagaggcaacugggacugcaucaugaccagcuaccaguaccugaucauccagaacaccaccugggaggaccacugccaguucagcagacccagccccaucggcuaccugggccugcugagccagagaaccagagacaucuacaucagcagaagacugcugggcaccuucaccuggacccugagcgacagcgagggcaacgagacccccggcggcuacugccugaccagauggaugcugaucgaggccgagcugaagugcuucggcaacaccgccguggccaagugcaacgagaagcacgacgaggaguucugcgacaugcugagacuguucgacuucaacaagcaggccauccagagacugaagagcgaggcccagaugagcauccagcugaucaacaaggccgugaacgcccugaucaacgaccagcugaucaugaagaaccaccugagagacaugaugggcauccccuacugcaacuacagcaaguacugguaccugaaccacaccagcagcggcagaaccagccugcccaagugcuggcuggugagcaacggcagcuaccugaacgagacccacuucagcgacgacaucgagcagcaggccgacaacaugaucaccgagaugcugcagaaggaguacaucgacagacagggcaagaccccccugggccugguggaccuguucguguucagcaccagcuucuaccugaucagcaucuuccugcaccugaucaagauccccacccacagacacaucgugggcaagcccugccccaagccccacagacugaaccacaugggcaucugcagcugcggccuguacaagcagcccggcgugcccaccagauggaagagaugaggacuagucccuguucccagagcccacuuuuuuuucuuuuuuugaaauaaaauagccugucuuucagaucucaaaggcucuuuucagagccaccaaaaaaaaaaaaaaaaaaaaaaaaaaaaaaaaaaaaaaaaaaaaaaaaaaaaaaaaaaaaaaaaaaaaaaaaaaaaaaaaaaaaaaaaaaaaaaaaaaaaa

SEQ ID NO: 14478 - RNA, 1764 nt, Artificial Sequence
  mRNA product Design a-2 (hSL-A100) comprising derived and/or modified sequence from LASV(KAK-428;Clade n.d. (VII))__ANH09740__GPC (opt4)
aggagaguccgcucagccagguugcagaagcggcuuagcguguguccuaaucuucucucugcguguagguaggccugugccgcaaacaagcuuaccaugggccagaucgugaccuucuuccaggaggugccccacgugaucgaggaggugaugaacaucgugcugaucgcccugagccugcuggccauccugaagggccuguacaacuucgccaccugcggcgugaucggccugaucaccuuccugcugcugugcggcagaagcugcagcgccaccuacaagggccaguacgagcugcagacccuggagcugaacauggagagccugaacaugaccaugccccugagcugcaccaagaacaacagccaccacuacaucagagccggcaacaacaccggccuggagcugacccugaccaacaccagcaucaucagccacaaguucugcaaccugagcgacgcccacaagaagaaccuguacgaccacacccugaugagcaucaucaccaccuuccaccugagcauccccaacuucaaccaguacgaggccaugagcugcgacuucaacggcggcaagaucagcauccaguacaaccugagccacagcuacgccggcgacgccgcccagcacugcggcaccguggccaacggcgugcugcagaccuucaugagaauggccuggggcggcagcuaccuggcccuggacagcggcagaagaggcugggacugcaucaucagcagcuaccaguaccugaucauccagaacaccaccugggacgaccacugccaguucagcagacccagccccaucggcuaccugggcuucgugagccagaagaccagagacaucuacaucagcagaagacugcugggcaccuucaccuggacccugagcgacagcgagggccacgacaugcccggcggcuacugccugaccagauggaugcugaucgaggccgaccugaagugcuucggcaacaccgccguggccaagugcaacgagaagcacgacgaggaguucugcgacauguggagacuguucgacuucaacaagcaggccauccagagacugaaggccgaggcccagaugaacauccagcugaucaacaaggccgugaacgcccugaucaacgaccagcugaugaugaagaaccaccugagagacaucaugggcauccccuacugcaacuacagcaaguucugguaccugaacaacaccaccaccggcagaaccagccugcccagaugcuggcugaucagcaacggcagcuaccugaacgagacccacuucagcgacgacaucgagcagcaggccgacaacaugaucaccgagaugcugcagaaggaguacauggacagacagggcaagaccccccugggccugguggaccuguucguguucagcaccagcuucuaccugaucaccaucuuccugcaccuggugaagauccccacccacagacacaucgugggcaagcccugccccaagccccacagacugaaccacaugggcaucugcagcugcggccuguacaagcagcccggcgugcccgugagauggaagagaugaggacuagucccuguucccagagcccacuuuuuuuucuuuuuuugaaauaaaauagccugucuuucagaucucaaaggcucuuuucagagccaccaaaaaaaaaaaaaaaaaaaaaaaaaaaaaaaaaaaaaaaaaaaaaaaaaaaaaaaaaaaaaaaaaaaaaaaaaaaaaaaaaaaaaaaaaaaaaaaaaaaaa

SEQ ID NO: 14479 - RNA, 1764 nt, Artificial Sequence; identical to SEQ ID NO: 14473
  mRNA product Design a-2 (hSL-A100) comprising derived and/or modified sequence from LASV(Pinneo-NIG-1969;Clade I)__AIT17836__GPC (opt4)

SEQ ID NO: 14480 - RNA, 1764 nt, Artificial Sequence
  mRNA product Design a-2 (hSL-A100) comprising derived and/or modified sequence from LASV(ISTH0009-NIG-2011;Clade II)__AIT17404__GPC (opt4)
aggagaguccgcucagccagguugcagaagcggcuuagcguguguccuaaucuucucucugcguguagguaggccugugccgcaaacaagcuuaccaugggccagaucaucaccuucuuccaggaggugccccacgugaucgaggaggugaugaacaucgugcugaucgcccugagccugcuggccauccugaagggcaucuacaacguggccaccugcggccuguucggccuggugagcuuccugcugcugugcggcagaagcugcagcaccaccuacaagggcguguacgagcugcagacccuggagcuggacauggccagccugaacaugaccaugccccugagcugcaccaagaacaacagccaccacuacaucauggugggcaacgagaccggccuggagcugacccugaccaacaccagcaucaucaaccacaaguucugcaaccugagcgacgcccacaagaagaaccuguacgaccacgcccugaugagcaucaucagcaccuuccaccugagcauccccaacuucaaccaguacgaggccaugagcugcgacuucaacggcggcaagaucagcgugcaguacaaccugagccacgccuacgccguggacgccgccaaccacugcggcaccaucgccaacggcgugcugcagaccuucaugagaauggccuggggcggcagcuacaucgcccuggacagcggcaagggcagcugggacugcaucaugaccagcuaccaguaccugaucauccagaacaccaccugggaggaccacugccaguucagcagacccagccccaucggcuaccugggccugcugagccagagaaccagagacaucuacaucagcagaagacugcugggcaccuucaccuggacccugagcgacagcgagggcaacgagacccccggcggcuacugccugaccagauggaugcugaucgaggccgagcugaagugcuucggcaacaccgccguggccaagugcaacgagaagcacgacgaggaguucugcgacaugcugagacuguucgacuucaacaagcaggccaucagaagacugaagaccgaggcccagaugagcauccagcugaucaacaaggccgugaacgcccugaucaacgaccagcugaucaugaagaaccaccugagagacaucaugggcauccccuacugcaacuacagcaaguacugguaccugaaccacaccgugaccggcaagaccagccugcccagaugcuggcuggugagcaacggcagcuaccugaacgagacccacuucagcgacgacaucgagcagcaggccgacaacaugaucaccgagcugcugcagaaggaguacauggacagacagggcaagaccccccugggccugguggaccuguucguguucagcaccagcuucuaccugaucagcaucuuccugcaccugaucaagauccccacccacagacacaucaccggcaagcccugccccaagccccacagacugaaccacaugggcaucugcagcugcggccuguacaagcaccccggcgugcccgugaaguggaagagaugaggacuagucccuguucccagagcccacuuuuuuuucuuuuuuugaaauaaaauagccugucuuucagaucucaaaggcucuuuucagagccaccaaaaaaaaaaaaaaaaaaaaaaaaaaaaaaaaaaaaaaaaaaaaaaaaaaaaaaaaaaaaaaaaaaaaaaaaaaaaaaaaaaaaaaaaaaaaaaaaaaaaa

SEQ ID NO: 14481 - RNA, 1764 nt, Artificial Sequence
  mRNA product Design a-2 (hSL-A100) comprising derived and/or modified sequence from LASV(ISTH2010-NIG-2012;Clade II)__AIT17482__GPC (opt4)
aggagaguccgcucagccagguugcagaagcggcuuagcguguguccuaaucuucucucugcguguagguaggccugugccgcaaacaagcuuaccaugggccagaucaucaccuucuuccaggaggugccccacgugaucgaggaggugaugaacaucgugcugaucgcccugagccugcuggccauccugaagggcaucuacaacguggccaccugcggccuguucggccuggugagcuuccugcugcugugcggcagaagcugcagcaccaccuacaagggcguguacgagcugcagacccuggagcuggacauggccagccugaacaugaccaugccccugagcugcaccaagaacaacagccaccacuacaucauggugggcaacgagaccggccuggagcugacccugaccaacaccagcaucaucaaccacaaguucugcaaccugagcgacgcccacaagaagaaccuguacgaccacgcccugaugagcaucaucagcaccuuccaccugagcauccccaacuucaaccaguacgaggccaugagcugcgacuucaacggcggcaagaucagcgugcaguacaaccugagccacgccuacgccguggacgccgccaaccacugcggcaccaucgccaacggcgugcugcagaccuucaugagaauggccuggggcggcagcuacaucgcccuggacagcggcaagggcagcugggacugcaucaugaccagcuaccaguaccugaucauccagaacaucaccugggaggaccacugccaguucagcagacccagccccaucggcuaccugggccugcugagccagagaaccagagacaucuacaucagcagaagacugcugggcaccuucaccuggacccugagcgacagcgagggcaacgagacccccggcggcuacugccugaccagauggaugcugaucgaggccgagcugaagugcuucggcaacaccgccguggccaagugcaacgagaagcacgacgaggaguucugcgacaugcugagacuguucgacuucaacaagcaggccaucagaagacugaagaccgaggcccagaugagcauccagcugaucaacaaggccgugaacgcccugaucaacgaccagcugaucaugaagaaccaccugagagacaucaugggcauccccuacugcaacuacagcaaguacugguaccugaaccacaccgugaccggcaagaccagccugcccagaugcuggcuggugagcaacggcagcuaccugaacgagacccacuucagcgacgacaucgagcagcaggccgacaacaugaucaccgagcugcugcagaaggaguacaucgacagacagggcaagaccccccugggccugguggaccuguucguguucagcaccagcuucuaccugaucagcaucuuccugcaccuggugaagauccccacccacagacacguggugggcaagcccugccccaagccccacagacugaaccacaugggcaucugcagcugcggccuguacaagcaccccggcgugcccgugaaguggaagagaugaggacuagucccuguucccagagcccacuuuuuuuucuuuuuuugaaauaaaauagccugucuuucagaucucaaaggcucuuuucagagccaccaaaaaaaaaaaaaaaaaaaaaaaaaaaaaaaaaaaaaaaaaaaaaaaaaaaaaaaaaaaaaaaaaaaaaaaaaaaaaaaaaaaaaaaaaaaaaaaaaaaaa

SEQ ID NO: 14482 - RNA, 1764 nt, Artificial Sequence
  mRNA product Design a-2 (hSL-A100) comprising derived and/or modified sequence from LASV(Lassa virus/H.sapiens-wt/NGA/2015/ISTH_0543;Clade II)__AVO03639__GPC (opt4)
aggagaguccgcucagccagguugcagaagcggcuuagcguguguccuaaucuucucucugcguguagguaggccugugccgcaaacaagcuuaccaugggccagaucaucaccuucuuccaggaggugccccacgugaucgaggaggugaugaacaucgugcugaucgcccugagccugcuggccauccugaagggcaucuacaacguggccaccugcggccuguucggccuggugagcuuccugcugcugugcggcagaagcugcagcaccaccuacaagggcguguacgagcugcagacccuggagcuggacauggccaaccugaacaugaccaugccccugagcugcaccaagaacaacagccaccacuacaucauggugggcaacgagaccggccuggagcugacccugaccaacaccagcaucaucaaccacaaguucugcaaccugagcgacgcccacaagaagaaccuguacgaccacgcccugaugagcaucaucagcaccuuccaccugagcauccccaacuucaaccaguacgaggccaugagcugcgacuucaacggcggcaagaucagcgugcaguacaaccugagccacaccuacgccguggacgccgccaaccacugcggcaccaucgccaacggcgugcugcagaccuucaugagaauggccuggggcggcagcuacaucgcccuggacagcggcaagggcagcugggacugcaucaugaccagcuaccaguaccuggugauccagaacaccaccugggaggaccacugccaguucagcagacccagccccaucggcuaccugggccugcugagccagagaaccagagacaucuacaucagcagaagacugcugggcaccuucaccuggacccugagcgacagcgagggcaacgagacccccggcggcuacugccugaccagauggaugcugaucgaggccgagcugaagugcuucggcaacaccgccguggccaagugcaacgagaagcacgacgaggaguucugcgacaugcugagacuguucgacuucaacaagcaggccaucagaagacugaagaccgaggcccagaugagcauccagcugaucaacaaggccgugaacgcccugaucaacgaccagcugaucaugaagaaccaccugagagacaucaugggcauccccuacugcaacuacagcaaguacugguaccugaaccacaccgugaccggcaagaccagccugcccagaugcuggcuggugagcaacggcagcuaccugaacgagacccacuucagcgacgacaucgagcagcaggccgacaacaugaucaccgagcugcugcagaaggaguacaucgacagacagggcaagaccccccugggccugguggaccuguucguguucagcaccagcuucuaccugaucagcaucuuccugcaccuggugaagauccccacccacagacacaucaccggcaagcccugccccaagccccacagacugaaccacaugggcaucugcagcugcggccuguacaagcaccccggcgugcccgugaaguggaagagaugaggacuagucccuguucccagagcccacuuuuuuuucuuuuuuugaaauaaaauagccugucuuucagaucucaaaggcucuuuucagagccaccaaaaaaaaaaaaaaaaaaaaaaaaaaaaaaaaaaaaaaaaaaaaaaaaaaaaaaaaaaaaaaaaaaaaaaaaaaaaaaaaaaaaaaaaaaaaaaaaaaaaa

SEQ ID NO: 14483 - RNA, 1764 nt, Artificial Sequence
  mRNA product Design a-2 (hSL-A100) comprising derived and/or modified sequence from LASV(Lassa virus/H.sapiens-wt/NGA/2016/ISTH_0009;Clade II)__AVO03571__GPC (opt4)
aggagaguccgcucagccagguugcagaagcggcuuagcguguguccuaaucuucucucugcguguagguaggccugugccgcaaacaagcuuaccaugggccagaucaucaccuucuuccaggaggugccccacgugaucgaggaggugaugaacaucgugcugaucgcccugagccugcuggccauccugaagggcaucuacaacguggccaccugcggccugcugggccuggugagcuuccugcugcugugcggcagaagcugcagcaccaccuacaagggcguguacgagcugcagacccuggagcuggacauggccagccugaacaugaccaugccccugagcugcaccaagaacaacagccaccacuacaucauggugggcaacgagaccggccuggagcugacccugaccaacaccagcaucaucaaccacaaguucugcaaccugagcgacgcccacaagaagaaccuguacgaccacgcccugaugagcaucaucagcaccuuccaccugagcauccccaacuucaaccaguacgaggccaugagcugcgacuucaacggcggcagaaucagcgugcaguacaaccugagccacagcuacgccguggacgccgccaaccacugcggcaccaucgccaacggcgugcugcagaccuucaugagaauggccuggggcggcagcuacaucgcccuggacagcggcaagggcagcugggacugcaucaugaccagcuaccaguaccugaucauccagaacaccaccugggaggaccacugccaguucagcagacccagccccaucggcuaccugggccugcugagccagagaaccagagacaucuacaucagcagaagacugcugggcaccuucaccuggacccugagcgacagcgagggcaacgagacccccggcggcuacugccugaccagauggaugcugaucgaggccgagcugaagugcuucggcaacaccgccguggccaagugcaacgagaagcacgacgaggaguucugcgacaugcugagacuguucgacuucaacaagcaggccaucagaagacugaagaccgaggcccagaugagcauccagcugaucaacaaggccgugaacgcccugaucaacgaccagcugaucaugaagaaccaccugagagacaucaugggcauccccuacugcaacuacagcaaguacugguaccugaaccacaccgugaccggcaagaccagccugcccagaugcuggcuggugagcaacggcagcuaccugaacgagacccacuucagcgacgacaucgagcagcaggccgacaacaugaucaccgagcugcugcagaaggaguacaucgacagacagggcaagaccccccugggccugguggaccuguucguguucagcaccagcuucuaccugaucagcaucuuccugcaccuggugaagauccccacccacagacacaucaccggcaagcccugccccaagccccacagacugaaccacaugggcaucugcagcugcggccuguacaaccaccccggcgugcccgugaaguggaagagaugaggacuagucccuguucccagagcccacuuuuuuuucuuuuuuugaaauaaaauagccugucuuucagaucucaaaggcucuuuucagagccaccaaaaaaaaaaaaaaaaaaaaaaaaaaaaaaaaaaaaaaaaaaaaaaaaaaaaaaaaaaaaaaaaaaaaaaaaaaaaaaaaaaaaaaaaaaaaaaaaaaaaa

SEQ ID NO: 14484 - RNA, 1764 nt, Artificial Sequence
  mRNA product Design a-2 (hSL-A100) comprising derived and/or modified sequence from LASV(Lassa virus/H.sapiens-wt/NGA/2016/ISTH_0017;Clade II)__AVO03567__GPC (opt4)
aggagaguccgcucagccagguugcagaagcggcuuagcguguguccuaaucuucucucugcguguagguaggccugugccgcaaacaagcuuaccaugggccagaucaucaccuucuuccaggaggugccccacgugaucgaggaggugaugaacaucgugcugaucgcccugagccugcuggccauccugaagggcaucuacaacguggccaccugcggccuguucggccuggugagcuuccugcugcugugcggcagaagcugcagcaccaccuacaagggcguguacgagcugcagacccuggagcuggacauggccagccugaacaugaccaugccccugagcugcaccaagaacaacagccaccacuacaucauggugggcaacgagaccggccuggagcugacccugaccaacaccagcaucaucaaccacaaguucugcaaccugagcgacgcccacaagaagaaccuguacgaccacgcccugaugagcaucaucagcaccuuccaccugagcauccccaacuucaaccaguacgaggccaugagcugcgacuucaacggcggcaagaucagcgugcaguacaaccugagccacaccuacgccaucgacgccgccaaccacugcggcaccaucgccaacggcgugcugcagaccuucaugagaauggccuggggcggcagcuacaucgcccuggacagcggcaagggcagcugggacugcaucaugaccagcuaccaguaccugaucauccagaacaccaccugggaggaccacugccaguucagcagacccagccccaucggcuaccugggccugcugagccagagaaccagagacaucuacaucagcagaagacugcugggcaccuucaccuggacccugagcgacagcgagggcaacgagacccccggcggcuacugccugaccagauggaugcugaucgaggccgagcugaagugcuucggcaacaccgccguggccaagugcaacgagaagcacgacgaggaguucugcgacaugcugagacuguucgacuucaacaagcaggccaucagaagacugaagaccgaggcccagaugagcauccagcugaucaacaaggccgugaacgcccugaucaacgaccagcugaucaugaagaaccaccugagagacaucaugggcauccccuacugcaacuacagcaaguacugguaccugaaccacaccgugaccggcaagaccagccugcccagaugcuggcuggugagcaacggcagcuaccugaacgagacccacuucagcgacgacaucgagcagcaggccgacaacaugaucaccgagcugcugcagaaggaguacauggacagacagggcaagaccccccugggccugguggaccuguucguguucagcaccagcuucuaccugaucagcaucuuccugcaccuggugagaauccccacccacagacacgugaucggcaagcccugccccaagccccacagacugaaccacaugggcaucugcagcugcggccuguacaagcaccccggcgugcccgugaaguggaagagaugaggacuagucccuguucccagagcccacuuuuuuuucuuuuuuugaaauaaaauagccugucuuucagaucucaaaggcucuuuucagagccaccaaaaaaaaaaaaaaaaaaaaaaaaaaaaaaaaaaaaaaaaaaaaaaaaaaaaaaaaaaaaaaaaaaaaaaaaaaaaaaaaaaaaaaaaaaaaaaaaaaaaa

SEQ ID NO: 14485 - RNA, 1764 nt, Artificial Sequence
  mRNA product Design a-2 (hSL-A100) comprising derived and/or modified sequence from LASV(Lassa virus/H.sapiens-wt/NGA/2018/ISTH_0959;Clade II)__AVV65099__GPC (opt4)
aggagaguccgcucagccagguugcagaagcggcuuagcguguguccuaaucuucucucugcguguagguaggccugugccgcaaacaagcuuaccaugggccagaucaucaccuucuuccaggaggugccccacgugaucgaggaggugaugaacaucgugcugaucgcccugagccugcuggccauccugaagggcaucuacaacguggugaccugcggccuguucggccuggugagcuuccugcugcugugcggcagaagcugcagcaccaccuacaagggcguguacgagcugcagacccuggagcuggacauggccagccugaacaugaccaugccccugagcugcaccaagaacaacagccaccacuacaucauggugggcaacgagaccggccuggagcugacccugaccaacaccagcaucaucaaccacaaguucugcaaccugagcgacgcccacaagaagaaccuguacgaccacgcccugaugagcaucaucagcaccuuccaccugagcauccccaacuucaaccaguacgaggccaugagcugcgacuucaacggcggcaagaucagcgugcaguacaaccugagccacgccuacgccaucgacgccgccaaccacugcggcaccaucgccaacggcgugcugcagaccuucaugagaauggccuggggcggcagcuacaucgcccuggacagcggcaagggcagcugggacugcaucaugaccagcuaccaguaccugaucauccagaacaccaccugggaggaccacugccaguucagcagacccagccccaucggcuaccugggccugcugagccagagaaccagagacaucuacaucagcagaagacugcugggcaccuucaccuggacccugagcgacagcgagggcaacgagacccccggcggcuacugccugaccagauggaugcugaucgaggccgagcugaagugcuucggcaacaccgccguggccaagugcaacgagaagcacgacgaggaguucugcgacaugcugagacuguucgacuucaacaagcaggccaucagaagacugaagaccgaggcccagaugagcauccagcugaucaacaaggccgugaacgcccugaucaacgaccagcugaucaugaagaaccaccugagagacaucaugggcauccccuacugcaacuacagcaaguacugguaccugaaccacaccgugaccggcaagaccagccugcccagaugcuggcuggugagcaacggcagcuaccugaacgagacccacuucagcgacgacaucgagcagcaggccgacaacaugaucaccgagcugcugcagaaggaguacaucgacagacagggcaagaccccccugggccugguggaccuguucguguucagcaccagcuucuaccugaucagcaucuuccugcaccuggugaagauccccacccacagacacgugaucggcaagcccugccccaagccccacagacugaaccacaugggcaucugcagcugcggccuguacaagcaccccggcgugcccgugaaguggaagagaugaggacuagucccuguucccagagcccacuuuuuuuucuuuuuuugaaauaaaauagccugucuuucagaucucaaaggcucuuuucagagccaccaaaaaaaaaaaaaaaaaaaaaaaaaaaaaaaaaaaaaaaaaaaaaaaaaaaaaaaaaaaaaaaaaaaaaaaaaaaaaaaaaaaaaaaaaaaaaaaaaaaaa

SEQ ID NO: 14486 - RNA, 1764 nt, Artificial Sequence
  mRNA product Design a-2 (hSL-A100) comprising derived and/or modified sequence from LASV(LASV003-NIG-2008;Clade II)__AIT17580__GPC (opt4)
aggagaguccgcucagccagguugcagaagcggcuuagcguguguccuaaucuucucucugcguguagguaggccugugccgcaaacaagcuuaccaugggccagaucaucaccuucuuccaggaggugccccacgugaucgaggaggugaugaacaucgugcugaucgcccugagccugcuggccauccugaagggcaucuacaacguggccaccugcggccuguucggccuggugagcuuccugcugcugugcggcagaagcugcagcaccaccuacaagggcguguacgagcugcagacccuggagcuggacauggccagccugaacaugaccaugccccugagcugcaccaagaacaacagccaccacuacaucauggugggcaacgagaccggccuggagcugacccugaccaacaccagcaucaucaaccacaaguucugcaaccugagcgacgcccacaagaagaaccuguacgaccacgcccugaugagcaucaucagcaccuuccaccugagcauccccaacuucaaccaguacgaggccaugagcugcgacuucaacggcggcaagaucagcgugcaguacaaccugagccacaccuacgccguggacgccgccaaccacugcggcaccaucgccaacggcgugcugcagaccuucaugagaauggccuggggcggcagcuacaucgcccuggacagcggcaagggcagcugggacugcaucaugaccagcuaccaguaccugaucauccagaacaccaccugggaggaccacugccaguucagcagacccagccccaucggcuaccugggccugcugagccagagaaccagagacaucuacaucagcagaagacugcugggcaccuucaccuggacccugagcgacagcgagagcaacgagacccccggcggcuacugccugaccagauggaugcugaucgaggccgagcugaagugcuucggcaacaccgccguggccaagugcaacgagaagcacgacgaggaguucugcgacaugcugagacuguucgacuucaacaagcaggccaucagaagacugaaggccgaggcccagaugagcauccagcugaucaacaaggccgugaacgcccugaucaacgaccagcugaucaugaagaaccaccugagagacaucaugggcauccccuacugcaacuacagcaaguacugguaccugaaccacaccgugaccggcagaaccagccugcccagaugcuggcuggugagcaacggcagcuaccugaacgagacccacuucagcgacgacaucgagcagcaggccgacaacaugaucaccgagcugcugcagaaggaguacauggacagacagggcaagaccccccugggccugguggaccuguucguguucagcaccagcuucuaccugaucagcaucuuccugcaccuggugaagauccccacccacagacacgugaucggcaagcccugccccaagccccacagacugaaccacaugggcaucugcagcugcggccuguacaagcaccccggcgugcccgugaaguggaagagaugaggacuagucccuguucccagagcccacuuuuuuuucuuuuuuugaaauaaaauagccugucuuucagaucucaaaggcucuuuucagagccaccaaaaaaaaaaaaaaaaaaaaaaaaaaaaaaaaaaaaaaaaaaaaaaaaaaaaaaaaaaaaaaaaaaaaaaaaaaaaaaaaaaaaaaaaaaaaaaaaaaaaa

SEQ ID NO: 14487 - RNA, 1764 nt, Artificial Sequence
  mRNA product Design a-2 (hSL-A100) comprising derived and/or modified sequence from LASV(LASV035-NIG-2009;Clade II)__AIT17588__GPC (opt4)
aggagaguccgcucagccagguugcagaagcggcuuagcguguguccuaaucuucucucugcguguagguaggccugugccgcaaacaagcuuaccaugggccagaucaucaccuucuuccaggaggugccccacgugaucgaggaggugaugaacaucgugcugaucgcccugagccugcuggccauccugaagggcaucuacaacguggccaccugcggccuguucggccuggugagcuuccugcugcugugcggcagaagcugcagcaccaccuacaagggcguguacgagcugcagacccuggagcuggacauggccagccugaacaugaccaugccccugagcugcaccaagaacaacagccaccacuacaucauggugggcaacgagaccggccuggagcugacccugaccaacaccagcaucaucaaccacaaguucugcaaccugagcgacgcccacaagaagaaccuguacgaccacgcccugaugagcaucaucagcaccuuccaccugagcauccccaacuucaaccaguacgaggccaugagcugcgacuucaacggcggcaagaucagcgugcaguacaaccugagccacgccuacgccguggacgccgccaaccacugcggcaccaucgccaacggcgugcugcagaccuucaugagaauggccuggggcggcagcuacaucgcccuggacagcggcaagggcagcugggacugcaucaugaccagcuaccaguaccugaucauccagaacaccaccugggaggaccacugccaguucagcagacccagccccaucggcuaccugggccugcugagccagagaaccagagacaucuacaucagcagaagacugcugggcaccuucaccuggacccugagcgacagcgagggcaacgagacccccggcggcuacugccugaccagauggaugcugaucgaggccgagcugaagugcuucggcaacaccgccguggccaagugcaacgagaagcacgacgaggaguucugcgacaugcugagacuguucgacuucaacaagcaggccaucagaagacugaaggccgaggcccagaugagcauccagcugaucaacaaggccgugaacgcccugaucaacgaccagcugaucaugaagaaccaccugagagacaucaugggcauccccuacugcaacuacagcaaguacugguaccugaaccacaccgugaccggcaagaccagccugcccagaugcuggcuggugagcaacggcagcuaccugaacgagacccacuucagcgacgacaucgagcagcaggccgacaacaugaucaccgagcugcugcagaaggaguacaucgacagacagggcaagaccccccugggccugguggaccuguucguguucagcaccagcuucuaccugaucagcaucuuccugcaccuggugaagauccccacccacagacacgugaucggcaagcccugccccaagccccacagacugaaccacaugggcaucugcagcugcggccuguacaagcaccccggcgugcccgugaaguggaagagaugaggacuagucccuguucccagagcccacuuuuuuuucuuuuuuugaaauaaaauagccugucuuucagaucucaaaggcucuuuucagagccaccaaaaaaaaaaaaaaaaaaaaaaaaaaaaaaaaaaaaaaaaaaaaaaaaaaaaaaaaaaaaaaaaaaaaaaaaaaaaaaaaaaaaaaaaaaaaaaaaaaaaa

SEQ ID NO: 14488 - RNA, 1764 nt, Artificial Sequence
  mRNA product Design a-2 (hSL-A100) comprising derived and/or modified sequence from LASV(LASV1000-NIG-2009;Clade II)__AIT17782__GPC (opt4)
aggagaguccgcucagccagguugcagaagcggcuuagcguguguccuaaucuucucucugcguguagguaggccugugccgcaaacaagcuuaccaugggccagaucaucaccuucuuccaggaggugccccacgugaucgaggaggugaugaacaucgugcugaucgcccugagccugcuggccauccugaagggcaucuacaacguggccaccugcggccuguucggccuggugagcuuccugcugcugugcggcagaagcugcagcaccaccuacaagggcguguacgagcugcagacccuggagcuggacauggccagccugaacaugaccaugccccugagcugcaccaagaacaacagccaccacuacaucauggugggcaacgagaccggccuggagcugacccugaccaacaccagcaucaucaaccacaaguucugcaaccugagcgacgcccacaagaagaaccuguacgaccacgcccugaugagcaucaucagcaccuuccaccugagcauccccaacuucaaccaguacgaggccaugagcugcgacuucaacggcggcaagaucagcgugcaguacaaccugagccacaccuacgccguggacgccgccaaccacugcggcaccaucgccaacggcgugcugcagaccuucaugagaauggccuggggcggcagcuacaucgcccuggacagcggcaagggcagcugggacugcaucaugaccagcuaccaguaccugaucauccagaacaccaccugggaggaccacugccaguucagcagacccagccccaucggcuaccugggccugcugagccagagaaccagagacaucuacaucagcagaagacugcugggcaccuucaccuggacccugagcgacagcgagggcaacgagacccccggcggcuacugccugaccagauggaugcugaucgaggccgagcugaagugcuucggcaacaccgccguggccaagugcaacgagaagcacgacgaggaguucugcgacaugcugagacuguucgacuucaacaagcaggccaucaagagacugaagaccgaggcccagaugagcauccagcugaucaacaaggccgugaacgcccugaucaacgaccagcugaucaugaagaaccaccugagagacaucaugggcauccccuacugcaacuacagcaaguacugguaccugaaccacaccgugaccggcaagaccagccugcccagaugcuggcuggugagcaacggcagcuaccugaacgagacccacuucagcgacgacaucgagcagcaggccgacaacaugaucaccgagcugcugcagaaggaguacaucgacagacagggcaagaccccccugggccugguggaccuguucguguucagcaccagcuucuaccugaucagcaucuuccugcaccuggugaagauccccacccacagacacguggugggcaagcccugccccaagccccacagacugaaccacaugggcaucugcagcugcggccuguacaagcaccccggcgugcccgugaaguggaagagaugaggacuagucccuguucccagagcccacuuuuuuuucuuuuuuugaaauaaaauagccugucuuucagaucucaaaggcucuuuucagagccaccaaaaaaaaaaaaaaaaaaaaaaaaaaaaaaaaaaaaaaaaaaaaaaaaaaaaaaaaaaaaaaaaaaaaaaaaaaaaaaaaaaaaaaaaaaaaaaaaaaaaa

SEQ ID NO: 14489 - RNA, 1764 nt, Artificial Sequence
  mRNA product Design a-2 (hSL-A100) comprising derived and/or modified sequence from LASV(LASV221-NIG-2010;Clade II)__AIT17624__GPC (opt4)
aggagaguccgcucagccagguugcagaagcggcuuagcguguguccuaaucuucucucugcguguagguaggccugugccgcaaacaagcuuaccaugggccagaucaucaccuucuuccaggaggugccccacgugaucgaggaggugaugaacaucgugcugaucgcccugagccugcuggccauccugaagggcaucuacaacguggccaccugcggccuguucggccuggugagcuuccugcugcugugcggcagaagcugcagcaccaccuacaagggcguguacgagcugcagacccuggagcuggacauggccagccugaacaugaccaugccccugagcugcaccaagaacaacagccaccacuacaucauggugggcaacgagaccggccuggagcugacccugaccaacaccagcaucaucaaccacaaguucugcaaccugagcgacgcccacaagaagaaccuguacgaccacgcccugaugagcaucaucagcaccuuccaccugagcauccccaacuucaaccaguacgaggccaugagcugcgacuucaacggcggcaagaucagcgugcaguacaaccugagccacaccuacgccaucgacgccgccaaccacugcggcaccaucgccaacggcgugcugcagaccuucaugagaauggccuggggcggcagcuacaucgcccuggacagcggcaagggcagcugggacugcaucaugaccagcuaccaguaccugaucauccagaacaccaccugggaggaccacugccaguucagcagacccagccccaucggcuaccugggccugcugagccagagaaccagagacaucuacaucagcagaagacugcugggcaccuucaccuggacccugagcgacagcgagggcaacgagacccccggcggcuacugccugaccagauggaugcugaucgaggccgagcugaagugcuucggcaacaccgccguggccaagugcaacgagaagcacgacgaggaguucugcgacaugcugagacuguucgacuucaacaagcaggccaucagaagacugaagaccgaggcccagaugagcauccagcugaucaacaaggccgugaacgcccugaucaacgaccagcugaucaugaagaaccaccugagagacaucaugggcauccccuacugcaacuacagcaaguacugguaccugaaccacaccgugaccggcaagaccagccugcccagaugcuggcuggugagcaacggcagcuaccugaacgagacccacuucagcgacgacaucgagcagcaggccgacaacaugaucaccgagaugcugcagaaggaguacauggacagacagggcaagaccccccugggccugguggaccuguucguguucagcaccagcuucuaccugaucagcaucuuccugcaccuggugaagauccccacccacagacacgugaucggcaagcccugccccaagccccacagacugaaccacaugggcaucugcagcugcggccuguacaagcaccccggcgugcccgugaaguggaagagaugaggacuagucccuguucccagagcccacuuuuuuuucuuuuuuugaaauaaaauagccugucuuucagaucucaaaggcucuuuucagagccaccaaaaaaaaaaaaaaaaaaaaaaaaaaaaaaaaaaaaaaaaaaaaaaaaaaaaaaaaaaaaaaaaaaaaaaaaaaaaaaaaaaaaaaaaaaaaaaaaaaaaa

SEQ ID NO: 14490 - RNA, 1764 nt, Artificial Sequence
  mRNA product Design a-2 (hSL-A100) comprising derived and/or modified sequence from LASV(LASV237-NIG-2010;Clade II)__AIT17638__GPC (opt4)
aggagaguccgcucagccagguugcagaagcggcuuagcguguguccuaaucuucucucugcguguagguaggccugugccgcaaacaagcuuaccaugggccagaucaucaccuucuuccaggaggugccccacgugaucgaggaggugaugaacaucgugcugaucgcccugagccugcuggccauccugaagggcaucuacaacguggccaccugcggccuguucggccuggugagcuuccugcugcugugcggcagaagcugcagcaccaccuacaagggcguguacgagcugcagacccuggagcuggacauggccagccugaacaugaccaugccccugagcugcaccaagaacaacagccaccacuacaucauggugggcaacgagaccggccuggagcugacccugaccaacaccagcaucaucaaccacaaguucugcaaccugagcgacgcccacaagaaggaccuguacgaccacgcccugaugagcaucaucagcaccuuccaccugagcauccccaacuucaaccaguacgaggccaugagcugcgacuucaacggcggcaagaucagcgugcaguacaaccugagccacaccuacgccguggacgccgccaaccacugcggcaccaucgccaacggcgugcugcagaccuucaugagaauggccuggggcggcagcuacaucgcccuggacagcggcaagggcagcugggacugcaucaugaccagcuaccaguaccugaucauccagaacaccaccugggaggaccacugccaguucagcagacccagccccaucggcuaccugggccugcugagccagagaaccagagacaucuacaucagcagaagacugcugggcaccuucaccuggacccugagcgacagcgagggcaacgagacccccggcggcuacugccugaccagauggaugcugaucgaggccgagcugaagugcuucggcaacaccgccguggccaagugcaacgagaagcacgacgaggaguucugcgacaugcugagacuguucgacuucaacaagcaggccaucagaagacugaagaccgaggcccagaugagcauccagcugaucaacaaggccgugaacgcccugaucaacgaccagcugaucaugaagaaccaccugagagacaucaugggcauccccuacugcaacuacagcaaguacugguaccugaaccacaccgugaccggcaagaccagccugcccagaugcuggcuggugagcaacggcagcuaccugaacgagacccacuucagcgacgacaucgagcagcaggccgacaacaugaucaccgagcugcugcagaaggaguacauggacagacagggcaagaccccccugggccugguggaccuguucguguucagcaccagcuucuaccugaucagcaucuuccugcaccugaucaagauccccacccacagacacaucaccggcaagcccugccccaagccccacagacugaaccacaugggcaucugcagcugcggccuguacaagcaccccggcgugcccgugaaguggaagagaugaggacuagucccuguucccagagcccacuuuuuuuucuuuuuuugaaauaaaauagccugucuuucagaucucaaaggcucuuuucagagccaccaaaaaaaaaaaaaaaaaaaaaaaaaaaaaaaaaaaaaaaaaaaaaaaaaaaaaaaaaaaaaaaaaaaaaaaaaaaaaaaaaaaaaaaaaaaaaaaaaaaaa

SEQ ID NO: 14491 - RNA, 1764 nt, Artificial Sequence
  mRNA product Design a-2 (hSL-A100) comprising derived and/or modified sequence from LASV(LASV253-NIG-2011;Clade II)__AIT17670__GPC (opt4)
aggagaguccgcucagccagguugcagaagcggcuuagcguguguccuaaucuucucucugcguguagguaggccugugccgcaaacaagcuuaccaugggccagaucaucaccuucuuccaggaggugccccacgugaucgaggaggugaugaacaucgugcugaucgcccugagccugcuggccauccugaagggcaucuacaacguggccaccugcggccuguucggccuggugagcuuccugcugcugugcggcagaagcugcagcaccaccuacaagggcguguacgagcugcagacccuggagcuggacauggccagccugaacaugaccaugccccugagcugcaccaagaacaacagccaccacuacaucauggugggcaacgagaccggccuggagcugacccugaccaacaccagcaucaucaaccacaaguucugcaaccugagcgacgcccacaagaagaaccuguacgaccacgcccugaugagcaucaucagcaccuuccaccugagcauccccaacuucaaccaguacgaggccaugagcugcgacuucaacggcggcaagaucagcgugcaguacaaccugagccacaccuacgccguggacgccgccaaccacugcggcaccaucgccaacggcgugcugcagaccuucaugagaauggccuggggcggcagcuacaucgcccuggacagcggcaagggcagcugggacugcaucaugaccagcuaccaguaccugaucauccagaacaccaccugggaggaccacugccaguucagcagacccagccccaucggcuaccugggccugcugagccagagaaccagagacaucuacaucagcagaagacugcugggcaccuucaccuggacccugagcgacagcgagggcaacgagacccccggcggcuacugccugaccagauggaugcugaucgaggccgagcugaagugcuucggcaacaccgccguggccaagugcaacgagaagcacgacgaggaguucugcgacaugcugagacuguucgacuucaacaagcaggccaucagaagacugaaggccgaggcccagaugagcauccagcugaucaacaaggccgugaacgcccugaucaacgaccagcugaucaugaagaaccaccugagagacaucaugggcauccccuacugcaacuacagcaaguacugguaccugaaccacaccgugaccggcagaaccagccugcccagaugcuggcuggugagcaacggcagcuaccugaacgagacccacuucagcgacgacaucgagcagcaggccgacaacaugaucaccgagcugcugcagaaggaguacaucgacagacagggcaagaccccccugggccugguggaccuguucguguucagcaccagcuucuaccugaucagcaucuuccugcaccuggugaagauccccacccacagacacaucaucggcaagcccugccccaagccccacagacugaaccacaugggcaucugcagcugcggccuguacaagcaccccggcgugcccgugaaguggaagagaugaggacuagucccuguucccagagcccacuuuuuuuucuuuuuuugaaauaaaauagccugucuuucagaucucaaaggcucuuuucagagccaccaaaaaaaaaaaaaaaaaaaaaaaaaaaaaaaaaaaaaaaaaaaaaaaaaaaaaaaaaaaaaaaaaaaaaaaaaaaaaaaaaaaaaaaaaaaaaaaaaaaaa

SEQ ID NO: 14492 - RNA, 1764 nt, Artificial Sequence
  mRNA product Design a-2 (hSL-A100) comprising derived and/or modified sequence from LASV(LASV254-NIG-2011;Clade II)__AIT17674__GPC (opt4)
aggagaguccgcucagccagguugcagaagcggcuuagcguguguccuaaucuucucucugcguguagguaggccugugccgcaaacaagcuuaccaugggccagaucaucaccuucuuccaggaggugccccacgugaucgaggaggugaugaacaucgugcugaucgcccugagccugcuggccauccugaagggcaucuacaacguggccaccugcggccuguucggccuggugagcuuccugcugcugugcggcagaagcugcagcaccaccuacaagggcguguacgagcugcagacccuggagcuggacaugaccaaccugaacaugaccaugccccugagcugcaccaagaacaacagccaccacuacaucauggugggcaacgagaccggccuggagcugacccugaccaacaccagcaucaucaaccacaaguucugcaaccugagcgacgcccacaagaagaaccuguacaaccacgcccugaugagcaucaucagcaccuuccaccugagcauccccaacuucaaccaguacgaggccaugagcugcgacuucaacggcggcaagaucagcgugcaguacaaccugagccacagcuacgccguggacgccgccaaccacugcggcaccaucgccaacggcgugcugcagaccuucaugagaauggccuggggcggcagcuacaucgcccuggacagcggcaagggcaacugggacugcaucaugaccagcuaccaguaccugaucauccagaacaccaccugggaggaccacugccaguucagcagacccagccccaucggcuaccugggccugcugagccagagaaccagagacaucuacaucagcagaagacugcugggcaccuucaccuggacccugagcgacagcgagggcaacgagacccccggcggcuacugccugaccagauggaugcugaucgaggccgagcugaagugcuucggcaacaccgccguggccaagugcaacgagaagcacgacgaggaguucugcgacaugcugagacuguucgacuucaacaagcaggccaucagaagacugaagaccgaggcccaggccaacauccagcugaucaacaaggccgugaacgcccugaucaacgaccagcugaucaugaagaaccaccugagagacaucaugggcauccccuacugcaacuacagcaaguacugguaccugaaccacaccgugaccggcaagaccagccugcccagaugcuggcuggugagcaacggcagcuaccugaacgagacccacuucagcgacgacaucgagcagcaggccgacaacaugaucaccgagcugcugcagaaggaguacauggacagacagggcaagaccccccugggccugguggaccuguucguguucagcaccagcuucuaccugaucagcaucuuccugcaccuggugaagauccccacccacagacacgugaucggcaagcccugccccaagccccacagacugaaccacaugggcaucugcagcugcggccuguacaagcaccccggcgugcccgugaaguggaagagaugaggacuagucccuguucccagagcccacuuuuuuuucuuuuuuugaaauaaaauagccugucuuucagaucucaaaggcucuuuucagagccaccaaaaaaaaaaaaaaaaaaaaaaaaaaaaaaaaaaaaaaaaaaaaaaaaaaaaaaaaaaaaaaaaaaaaaaaaaaaaaaaaaaaaaaaaaaaaaaaaaaaaa

SEQ ID NO: 14493 - RNA, 1764 nt, Artificial Sequence
  mRNA product Design a-2 (hSL-A100) comprising derived and/or modified sequence from LASV(Nig08-A19;Clade III)__ADU56618__GPC (opt4)
aggagaguccgcucagccagguugcagaagcggcuuagcguguguccuaaucuucucucugcguguagguaggccugugccgcaaacaagcuuaccaugggccagaucgugaccuucuuccaggaggugccccacgugaucgaggaggugaugaacaucgugcugaucgcccugagcauccuggccauccugaagggccuguacaacaucgccaccugcggccugaucggccuggugaccuuccugcugcugagcggcagaagcugcagcaugaccuacaagggcguguacgagcugcagacccuggagcugaacaugaacacccugaacaugaccaugccccugagcugcaccaagaacaacagccaccacuacaucauggugggcaacgagaccggccuggagcugacccugaccaacaccagccugcugcaccacaaguucugcaaccugagcgacgcccacaagaagaaccuguacgaccacacccugaugagcaucaucagcaccuuccaccugagcauccccaacuucaaccaguacgaggccaugagcugcgacuucaacggcggcaagaucaccgugcaguacaaccugagccacagcuacgccaucgacgccgccaaccacugcggcaccguggccaacggcgugcugcagaccuucaugagaauggccuggggcggcagcuacaucgcccuggacagcggcagaggcaagugggacugcaucaugaccagcuaccaguaccugaucauccagaacaccaccugggaggaccacugccaguucagcagacccagccccaucggcuaccugggccugcugagccagagaaccagagacaucuacaucagcagaagacugcugggcaccuucaccuggacccugagcgacagcgagggcaacgagacccccggcggcuacugccugaccagauggaugcugaucgaggccgagcugaagugcuucggcaacaccgccguggccaagugcaacgagaagcacgacgaggaguucugcgacaugcugagacuguucgacuucaacaagcaggccaucagaagacugaaggccgaggcccagaugagcauccagcugaucaacaaggccgugaacgcccugaucaacgaccagcugaucaugaagaaccaccugagagacaucaugggcauccccuacugcaacuacagcaaguacugguaccugaaccacaccagcaccggcagaaccagccugcccagaugcuggcuggugagcaacggcagcuaccugaacgagacccacuucagcgacgacaucgagcagcaggccgacaacaugaucaccgagaugcugcagaaggaguaccuggacagacagggcaagaccccccugggccugguggaccuguucguguucagcaccagcuucuaccugaucagcaucuuccugcaccuggugaagauccccacccacagacacaucgugggcaagcccugccccaagccccacagacugaaccacaugggcaucugcagcugcggccuguacaagcagcccggcgugcccgugagauggaagagaugaggacuagucccuguucccagagcccacuuuuuuuucuuuuuuugaaauaaaauagccugucuuucagaucucaaaggcucuuuucagagccaccaaaaaaaaaaaaaaaaaaaaaaaaaaaaaaaaaaaaaaaaaaaaaaaaaaaaaaaaaaaaaaaaaaaaaaaaaaaaaaaaaaaaaaaaaaaaaaaaaaaaa

SEQ ID NO: 14494 - RNA, 1767 nt, Artificial Sequence
  mRNA product Design a-2 (hSL-A100) comprising derived and/or modified sequence from LASV(G1180-SLE-2010;Clade IV)__AIT17168__GPC (opt4)
aggagaguccgcucagccagguugcagaagcggcuuagcguguguccuaaucuucucucugcguguagguaggccugugccgcaaacaagcuuaccaugggccagaucgugaccuucuuccaggaggugccccacgugaucgaggaggugaugaacaucgugcugaucgcccugagcauccuggccgugcugaagggccuguacaacuucgccaccugcggccuggugggccugcugaccuuccugcugcugugcggcagaagcugcaccgccagcagauacaagggcguguacgagcugcagacccuggagcugaacauggagacccugaacaugaccaugccccugagcugcaccaagaacaacagccaccacuacaucauggugggcaacgagaccggccuggagcugacccugaccaacaccagcaucaucaaccacaaguucugcaaccugagcgacgcccacaagaagaaccuguacgaccacgcccugaugagcaucaucagcaccuuccaccugagcauccccaacuucaaccaguacgaggccaugagcugcgacuucaacggcggcaagaucagcgugcaguacaaccugagccacagcuacgccggcgacgccgccaaccacugcggcaccguggccaacggcgugcugcagaccuucaugagaauggccuggggcggcagcuacaucgcccuggacagcggccacggcagcugggacugcaucaugaccagcuaccaguaccugaucauccagaacaccaccugggaggaccacugccaguucagcagacccagccccaucggcuaccugggccugcugagccagagaaccagagacaucuacaucagcagaagacugcugggcaccuucaccuggacccugagcgacagcgagggcaaggacacccccggcggcuacugccugaccagauggaugcugaucgaggccgagcugaagugcuucggcaacaccgccguggccaagugcaacgagaagcacgacgaggaguucugcgacaugcugagacuguucgacuucaacaagcaggccauccagagacugaaggccgaggcccagaugagcauccagcugaucaacaaggccgugaacgcccugaucaacgaccagcugaucaugaagaaccaccugagagacaucaugggcauccccuacugcaacuacagcaaguacugguaccugaaccacaccaccaccggcaagaccagccugcccaagugcuggcuggugagcaacggcagcuaccugaacgagacccacuucagcgacgacaucgagcagcaggccgacaacaugaucaccgagaugcugcagaaggaguacauggagagacagggcaagaccccccugggccugguggaccuguucguguucagcaccagcuucuaccugaucagcaucuuccugcaccuggugaagauccccacccacagacacaucgugggcaagagcugccccaagccccacagacugaaccacaugggcaucugcagcugcggccuguacaagcagcccggcgugcccgugaaguggaagagaugaggacuagucccuguucccagagcccacuuuuuuuucuuuuuuugaaauaaaauagccugucuuucagaucucaaaggcucuuuucagagccaccaaaaaaaaaaaaaaaaaaaaaaaaaaaaaaaaaaaaaaaaaaaaaaaaaaaaaaaaaaaaaaaaaaaaaaaaaaaaaaaaaaaaaaaaaaaaaaaaaaaaa

SEQ ID NO: 14495 - RNA, 1767 nt, Artificial Sequence
  mRNA product Design a-2 (hSL-A100) comprising derived and/or modified sequence from LASV(G1442-SLE-2011;Clade IV)__AIT17180__GPC (opt4)
aggagaguccgcucagccagguugcagaagcggcuuagcguguguccuaaucuucucucugcguguagguaggccugugccgcaaacaagcuuaccaugggccagaucgugaccuucuuccaggaggugccccacgugaucgaggaggugaugaacaucgugcugaucgcccugagcauccuggccgugcugaagggccuguacaacguggccaccugcggccugaucggccuggugaccuuccugcugcugugcggcagaagcugcaccaccacccuguacaagggcguguacgagcugcagacccuggagcugaacauggagacccugaacaugaccaugccccugagcugcaccaagaacaacagccaccacuacaucagagugggcaacgagaccggccuggagcugacccugaccaacaccagcaucaucaaccacaaguucugcaaccugagcgacgcccacaagaagaaccuguacgaccacgcccugaugagcaucaucagcaccuuccaccugagcauccccaacuucaaccaguacgaggccaugagcugcgacuucaacggcggcaagaucagcgugcaguacaaccugagccacagcuacgccggcgacgccgccaaccacugcggcaccguggccaacggcgugcugcagaccuucaugagaauggccuggggcggcagcuacaucgcccuggacagcggcagaggcaacugggacugcaucaugaccagcuaccaguaccugaucauccagaacaccaccugggacgaccacugccaguucagcagacccagccccaucggcuaccugggccugcugagccagagaaccagagacguguacaucagcagaagacugcugggcaccuucaccuggacccugagcgacagcgagggcaaggacacccccggcggcuacugccugaccagauggaugcugaucgaggccgagcugaagugcuucggcaacaccgccguggccaagugcaacgagaagcacgacgaggaguucugcgacaugcugagacuguucgacuucaacaagcaggccauccagagacugaaggccgaggcccagaugagcauccagcugaucaacaaggccgugaacgcccugaucaacgaccagcugaucaugaagaaccaccugagagacaucaugggcauccccuacugcaacuacagcaaguacugguaccugaacaacaccgccaccggcaagaccagccugcccaagugcuggcugaucagcaacggcagcuaccugaacgagacccacuucagcgacgacaucgagcaggaggccgacaacaugaucaccgagaugcugcagaaggaguacauggagagacagggcaagaccccccugggccugguggaccuguucguguucagcaccagcuucuaccugaucagcaucuuccugcaccuggugaagauccccacccacagacacaucgugggcaagagcugccccaagccccacagacugaaccacaugggcaucugcagcugcggccuguacaagcagcccggcgugcccgugagauggaagagaugaggacuagucccuguucccagagcccacuuuuuuuucuuuuuuugaaauaaaauagccugucuuucagaucucaaaggcucuuuucagagccaccaaaaaaaaaaaaaaaaaaaaaaaaaaaaaaaaaaaaaaaaaaaaaaaaaaaaaaaaaaaaaaaaaaaaaaaaaaaaaaaaaaaaaaaaaaaaaaaaaaaaa

SEQ ID NO: 14496 - RNA, 1767 nt, Artificial Sequence
  mRNA product Design a-2 (hSL-A100) comprising derived and/or modified sequence from LASV(G3010-SLE-2013;Clade IV)__AIT17344__GPC (opt4)
aggagaguccgcucagccagguugcagaagcggcuuagcguguguccuaaucuucucucugcguguagguaggccugugccgcaaacaagcuuaccaugggccagaucgugaccuucuuccaggaggugccccacgugaucgaggaggugaugaacaucgugcugaucgcccugagcauccuggccgugcugaagggccuguacaacuucgccaccugcggccuggugggccuggugaccuuccugcugcugugcggcagaagcugcaccaccagccuguacaagggcguguacgagcugcagacccuggagcugaacauggagacccugaacaugaccaugccccugagcugcaccaagaacaacagccaccacuacaucauggugggcaacgagaccggccuggagcugacccugaccaacaccagcaucaucaaccacaaguucugcaaccugagcgacgcccacaagaagaaccuguacaaccacgcccugaugagcaucaucagcaccuuccaccugagcauccccaacuucaaccaguacgaggccaugagcugcgacuucaacggcggcaagaucagcgugcaguacaaccugagccacagcuacgccggcgacgccgccagccacugcggcaccguggccaacggcgugcugcagaccuucaugagaauggccuggggcggcagcuacaucgcccuggacagcggcuacggcaagugggacugcaucaugaccagcuaccaguaccugaucauccagaacaccaccugggaggaccacugccaguucagcagacccagccccaucggcuaccugggccugcugagccagagaaccagagacaucuacaucagcagaagacugcugggcaccuucaccuggacccugagcgacagcgagggcaaggacacccccggcggcuacugccugaccagauggaugcugaucgaggccgagcugaagugcuucggcaacaccgccguggccaagugcaacgagaagcacgacgaggaguucugcgacaugcugagacuguucgacuucaacaagcaggccauccagagacugaagaccgaggcccagaugagcauccagcugaucaacaaggccgugaacgcccugaucaacgaccagcugaucaugaagaaccaccugagagacaucaugggcauccccuacugcaacuacagcaaguacugguaccugaaccacaccaccaccggcaagaccagccugcccaagugcuggcuggugagcaacggcagcuaccugaacgagacccacuucagcgacgacaucgagcagcaggccgacaacaugaucaccgagaugcugcagaaggaguacauggagagacagggcaagaccccccugggccugguggaccuguucguguucagcaccagcuucuaccugaucagcaucuuccugcaccuggugaagauccccacccacagacacaucgugggcaagagcugccccaagccccacagacugaaccacaugggcaucugcagcugcggccuguacaagcagcccggcgugcccgugagauggaagagaugaggacuagucccuguucccagagcccacuuuuuuuucuuuuuuugaaauaaaauagccugucuuucagaucucaaaggcucuuuucagagccaccaaaaaaaaaaaaaaaaaaaaaaaaaaaaaaaaaaaaaaaaaaaaaaaaaaaaaaaaaaaaaaaaaaaaaaaaaaaaaaaaaaaaaaaaaaaaaaaaaaaaa

SEQ ID NO: 14497 - RNA, 1767 nt, Artificial Sequence
  mRNA product Design a-2 (hSL-A100) comprising derived and/or modified sequence from LASV(G502-SLE-2009;Clade IV)__AIT17126__GPC (opt4)
aggagaguccgcucagccagguugcagaagcggcuuagcguguguccuaaucuucucucugcguguagguaggccugugccgcaaacaagcuuaccaugggccagaucgugaccuucuuccaggaggugccccacgugaucgaggaggugaugaacaucgugcugaucgcccugagcauccuggccgugcugaagggccuguacaacuucgccaccugcggccuggugggccugcugaccuuccugcugcugugcggcagaagcugcaccaccggccuguacaagggcguguacgagcugcagacccuggagcugaacauggagacccugaacaugaccaugccccugagcugcaccaagaacaacagccaccacuacaucauggugggcaacgagaccggccuggagcugacccugaccaacaccagcaucaucaaccacaaguucugcaaccugagcgacgcccacaagaagaaccuguacgaccacgcccugaugagcaucaucagcaccuuccaccugagcauccccaacuucaaccaguacgaggccaugagcugcgacuucaacggcggcaagaucagcgugcaguacaaccugagccacagcuacgccggcgacgccgccgaccacugcggcaccguggccaacggcgugcugcagaccuucaugagaauggccuggggcggcagcuacaucgcccuggacagcggcagaggcagaugggacugcaucaugaccagcuaccaguaccugaucauccagaacaccaccugggaggaccacugccaguucagcagacccagccccaucggcuaccugggccugcugagccagagaaccagagacaucuacaucagcagaagacugcugggcaccuucaccuggacccugagcgacagcgagggcaaggacacccccggcggcuacugccugaccagauggaugcugaucgaggccgagcugaagugcuucggcaacaccgccguggccaagugcaacgagaagcacgacgaggaguucugcgacaugcugagacuguucgacuucaacaagcaggccauccagagacugaaggccgaggcccagaugagcauccagcugaucaacaaggccgugaacgcccugaucaacgaccagcuggugaugaagaaccaccugagagacaucaugggcauccccuacugcaacuacagcagauacugguaccugaaccacaccaccaccggcagaaccagccugcccaagugcuggcuggugagcaacggcagcuaccugaacgagacccacuucagcgacgacaucgagcagcaggccgacaacaugaucaccgagaugcugcagaaggaguacauggagagacagggcaagaccccccugggccugguggaccuguucguguucagcaccagcuucuaccugaucagcaucuuccugcaccuggugaagauccccacccacagacacaucgugggcaagagcugccccaagccccacagacugaaccacaugggcaucugcagcugcggccuguacaagcagcccggcgugcccgugaaguggaagagaugaggacuagucccuguucccagagcccacuuuuuuuucuuuuuuugaaauaaaauagccugucuuucagaucucaaaggcucuuuucagagccaccaaaaaaaaaaaaaaaaaaaaaaaaaaaaaaaaaaaaaaaaaaaaaaaaaaaaaaaaaaaaaaaaaaaaaaaaaaaaaaaaaaaaaaaaaaaaaaaaaaaaa

SEQ ID NO: 14498 - RNA, 1767 nt, Artificial Sequence
  mRNA product Design a-2 (hSL-A100) comprising derived and/or modified sequence from LASV(G733-SLE-2010;Clade IV)__AIT17154__GPC (opt4)
aggagaguccgcucagccagguugcagaagcggcuuagcguguguccuaaucuucucucugcguguagguaggccugugccgcaaacaagcuuaccaugggccagaucgugaccuucuuccaggaggugccccacgugaucgaggaggugaugaacaucgugcugaucgcccugagcauccuggccgugcugaagggccuguacaacuucgccaccugcggcaucgugggccuggugagcuuccugcugcugugcggcagaagcugcaccaccagccuguacaagggcguguacgagcugcagacccuggagcugaacauggagacccugaacaugaccaugccccugagcugcaccaagaacaacagccaccacuacaucauggugggcaacgagaccggccuggagcugacccugaccaacaccagcaucaucaaccacaaguucugcaaccugagcgacgcccacaagaagaaccuguacgaccacgcccugaugagcaucaucagcaccuuccaccugagcauccccaacuucaaccaguacgaggccaugagcugcgacuucaacggcggcaagaucagcgugcaguacaaccugagccacagcuacgccggcgacgccgccaaccacugcggcaccaucgccaacggcgugcugcagaccuucaugagaauggccuggggcggcagcuacaucgcccuggacagcggcagagacagaugggacugcaucaugaccagcuaccaguaccugaucauccagaacaccaccugggaggaccacugccaguucagcagacccagccccaucggcuaccugggccugcugagccagagaaccagagacaucuacaucagcagaagacugcugggcaccuucaccuggacccugagcgacagcgagggcaaggacacccccggcggcuacugccugaccagauggaugcugaucgaggccgagcugaagugcuucggcaacaccgccguggccaagugcaacgagaagcacgacgaggaguucugcgacaugcugagacuguucgacuucaacaagcaggccauccagagacugaaggccgaggcccagaugagcauccagcugaucaacaaggccgugaacgcccugaucaacgaccagcugaucaugaagaaccaccugagagacaucaugggcauccccuacugcaacuacagcaaguacugguaccugaaccacaccaccaccggcaagaccagccugcccaagugcuggcuggugagcaacggcagcuaccugaacgagacccacuucagcgacgacaucgagcagcaggccgacaacaugaucaccgagaugcugcagaaggaguacauggagagacagggcaagaccccccugggccugguggaccuguucguguucagcaccagcuucuaccugaucagcaucuuccugcaccuggugaagauccccacccacagacacguggugggcaagagcugccccaagccccacagacugaaccacaugggcaucugcagcugcggccuguacggccagcccggcgugcccgugaaguggaagagaugaggacuagucccuguucccagagcccacuuuuuuuucuuuuuuugaaauaaaauagccugucuuucagaucucaaaggcucuuuucagagccaccaaaaaaaaaaaaaaaaaaaaaaaaaaaaaaaaaaaaaaaaaaaaaaaaaaaaaaaaaaaaaaaaaaaaaaaaaaaaaaaaaaaaaaaaaaaaaaaaaaaaa

SEQ ID NO: 14499 - RNA, 1767 nt, Artificial Sequence
  mRNA product Design a-2 (hSL-A100) comprising derived and/or modified sequence from MOPV/LASV reassortant(IGS-1;Clade IV)__AFY05576__GPC (opt4)
aggagaguccgcucagccagguugcagaagcggcuuagcguguguccuaaucuucucucugcguguagguaggccugugccgcaaacaagcuuaccaugggccagaucgugaccuucuuccaggaggugccccacgugaucgaggaggugaugaacaucgugcugaucgcccugagcgugcuggccgugcugaagggccuguacaacuucgccaccugcggccuggugggccuggugaccuuccugcugcugugcggcagaagcugcaccaccagccuguacaagggcguguacgagcugcagacccuggagcugaacauggagacccugaacaugaccaugccccugagcugcaccaagaacaacagccaccacuacaucauggugggcaacgagaccggccuggagcugacccugaccaacaccagcaucaucaaccacaaguucugcaaccugagcgacgcccacaagaagaaccuguacgaccacgcccugaugagcaucaucagcaccuuccaccugagcauccccaacuucaaccaguacgaggccaugagcugcgacuucaacggcggcaagaucagcgugcaguacaaccugagccacagcuacgccggcgacgccgccaaccacugcggcaccguggccaacggcgugcugcagaccuucaugagaauggccuggggcggcagcuacaucgcccuggacagcggcagaggcaacugggacugcaucaugaccagcuaccaguaccugaucauccagaacaccaccugggaggaccacugccaguucagcagacccagccccaucggcuaccugggccugcugagccagagaaccagagacaucuacaucagcagaagacugcugggcaccuucaccuggacccugagcgacagcgagggcgaggacacccccggcggcuacugccugaccagauggaugcugaucgaggccgagcugaagugcuucggcaacaccgccguggccaagugcaacgagaagcacgacgaggaguucugcgacaugcugagacuguucgacuucaacaagcaggccauccagagacugaaggccgaggcccagaugagcauccagcugaucaacaaggccgugaacgcccugaucaacgaccagcugaucaugaagaaccaccugagagacaucaugggcauccccuacugcaacuacagcaaguacugguaccugaaccacaccaccaccggcagaaccagccugcccaagugcuggcuggugagcaacggcagcuaccugaacgagacccacuucagcgacgacaucgagcagcaggccgacaacaugaucaccgagaugcugcagaaggaguacauggagagacagggcaagaccccccugggccugguggaccuguucguguucagcaccagcuucuaccugaucagcaucuuccugcaccuggugaagauccccacccacagacacaucgugggcaagagcugccccaagccccacagacugaaccacaugggcaucugcagcugcggccuguacaagcagcccggcgugcccgugaaguggaagagaugaggacuagucccuguucccagagcccacuuuuuuuucuuuuuuugaaauaaaauagccugucuuucagaucucaaaggcucuuuucagagccaccaaaaaaaaaaaaaaaaaaaaaaaaaaaaaaaaaaaaaaaaaaaaaaaaaaaaaaaaaaaaaaaaaaaaaaaaaaaaaaaaaaaaaaaaaaaaaaaaaaaaa

SEQ ID NO: 14500 - RNA, 1767 nt, Artificial Sequence
  mRNA product Design a-2 (hSL-A100) comprising derived and/or modified sequence from LASV(LM765-SLE-2012;Clade IV)__AIT17814__GPC (opt4)
aggagaguccgcucagccagguugcagaagcggcuuagcguguguccuaaucuucucucugcguguagguaggccugugccgcaaacaagcuuaccaugggccagaucgugaccuucuuccaggaggugccccacgugaucgaggaggugaugaacaucgugcugaucgcccugagcauccuggccgugcugaagggccuguacaacuucgccaccugcggccuggugggccuggugaccuuccugcugcugugcggcagaagcugcaccaccagccuguacaagggcguguacgagcugcagacccuggagcugaacauggagacccugaacaugaccaugccccugagcugcaccaagaacaacagccaccacuacaucauggugggcaacgagaccggccuggagcugacccugaccaacaccagcaucaucgaccacaaguucugcaaccugagcgacgcccacagaaagaaccuguacgaccacgcccugaugagcaucaucagcaccuuccaccugagcauccccaacuucaaccaguacgaggccaugagcugcgacuucaacggcggcaagaucagcgugcaguacaaccugagccacagcuacgccaaggacgccgccgaccacugcggcaccguggccaacggcgugcugcagaccuucaugagaauggccuggggcggcagcuacaucgcccuggacagcggcagaggcagaugggacugcaucaugaccagcuaccaguaccugaucauccagaacaccaccugggaggaccacugccaguucagcagacccagccccaucggcuaccugggccugcugagccagagaaccagagacaucuacaucagcagaagacugcugggcaccuucaccuggacccugagcgacagcgagggcaaggacacccccggcggcuacugccugaccagauggaugcugaucgaggccgagcugaagugcuucggcaacaccgccguggccaagugcaacgagaagcacgacgaggaguucugcgacaugcugagacuguucgacuucaacaagcaggccauccagagacugaaggccgaggcccagaugagcauccagcugaucaacaaggccgugaacgcccugaucaacgaccagcugaucaugaagaaccaccugagagacaucaugggcauccccuacugcaacuacagcaaguacugguaccugaaccacaccaccaccggcaagaccagccugcccaagugcuggcuggugagcaacggcagcuaccugaacgagacccacuucagcgacgacaucgagcagcaggccgacaacaugaucaccgagaugcugcagaaggaguacauggagagacagggcaagaccccccugggccugguggaccuguucguguucagcaccagcuucuaccugaucagcaucuuccugcaccuggugaagauccccacccacagacacaucgugggcaagcccugccccaagccccacagacugaaccacaugggcaucugcagcugcggccuguacaagcagcccggcgugcccgugaaguggaagagaugaggacuagucccuguucccagagcccacuuuuuuuucuuuuuuugaaauaaaauagccugucuuucagaucucaaaggcucuuuucagagccaccaaaaaaaaaaaaaaaaaaaaaaaaaaaaaaaaaaaaaaaaaaaaaaaaaaaaaaaaaaaaaaaaaaaaaaaaaaaaaaaaaaaaaaaaaaaaaaaaaaaaa

SEQ ID NO: 14501 - RNA, 1767 nt, Artificial Sequence
  mRNA product Design a-2 (hSL-A100) comprising derived and/or modified sequence from LASV(LM776-SLE-2012;Clade IV)__AIT17824__GPC (opt4)
aggagaguccgcucagccagguugcagaagcggcuuagcguguguccuaaucuucucucugcguguagguaggccugugccgcaaacaagcuuaccaugggccagaucgugaccuucuuccaggaggugccccacgugaucgaggaggugaugaacaucgugcugaucgcccugagcauccuggccgugcugaagggccuguacaacuucgccaccugcggccuggugggccuggugaccuuccugcugcugugcggcagaagcugcaccaccagcguguacaagggcguguacgagcugcagacccuggagcugaacauggagacccugaacaugaccaugccccugagcugcaccaagaacaacagccaccacuacaucauggugggcaacgagaccggccuggagcugacccugaccaacaccagcaucaucaaccacaaguucugcaaccugagcgacgcccacaagaagaaccuguacgaccacgcccugaugagcaucaucagcaccuuccaccugagcauccccaacuucaaccaguacgaggccaugagcugcgacuucaacggcggcaagaucagcgugcaguacaaccugagccacagcuacgccggcgacgccgccaaccacugcggcaccguggccaacggcgugcugcagaccuucaugagaauggccuggggcggcagcuacaucgcccuggacagcggccacggcaagugggacugcaucaugaccagcuaccaguaccugaucauccagaacaccaccugggaggaccacugccaguucagcagacccagccccaucggcuaccugggccugcugagccagagaaccagagacaucuacaucagcagaagacugcugggcaccuucaccuggacccugagcgacagcgagggcaaggacacccccggcggcuacugccugaccagauggaugcugaucgaggccgagcugaagugcuucggcaacaccgccguggccaagugcaacgagaagcacgacgaggaguucugcgacaugcugagacuguucgacuucaacaagcaggccauccagagacugaaggccgaggcccagaugagcauccagcugaucaacaaggccgugaacgcccugaucaacgaccagcugaucaugaagaaccaccugagagacaucaugggcauccccuacugcaacuacagcaaguacugguaccugaaccacaccaccaccggcaagaccagccugcccaagugcuggcuggugagcaacggcagcuaccugaacgagacccacuucagcgacgacaucgagcagcaggccgacaacaugaucaccgagaugcugcagaaggaguacauggagagacagggcaagaccccccugggccugguggaccuguucguguucagcaccagcuucuaccugaucagcaucuuccugcaccuggugaagauccccacccacagacacaucgugggcaagagcugccccaagccccacagacugaaccacaugggcaucugcagcugcggccuguacaagcagcccggcgugcccgugagauggaagagaugaggacuagucccuguucccagagcccacuuuuuuuucuuuuuuugaaauaaaauagccugucuuucagaucucaaaggcucuuuucagagccaccaaaaaaaaaaaaaaaaaaaaaaaaaaaaaaaaaaaaaaaaaaaaaaaaaaaaaaaaaaaaaaaaaaaaaaaaaaaaaaaaaaaaaaaaaaaaaaaaaaaaa

SEQ ID NO: 14502 - RNA, 1767 nt, Artificial Sequence
  mRNA product Design a-2 (hSL-A100) comprising derived and/or modified sequence from LASV(Mad39;Clade IV)__ANH09722__GPC (opt4)
aggagaguccgcucagccagguugcagaagcggcuuagcguguguccuaaucuucucucugcguguagguaggccugugccgcaaacaagcuuaccaugggccagaucgugaccuucuuccaggaggugccccacgugaucgaggaggugaugaacaucgugcugaucgcccugagcauccuggccgugcugaagggccuguacaacguggccaccugcggccugaucggccuggugaccuuccugcugcugugcggcagaagcugcaccaccacccuguacaagggcguguacgagcugcaggcccuggagcugaacauggagacccugaacaugaccaugccccugagcugcaccaagaacaacagccaccacuacaucagagugggcaacgagaccggccuggagcugacccugaccaacaccagccugaucaaccacaaguucugcaaccugagcgacgcccacaagaagaaccuguacgaccacgcccugaugagcaucaucagcaccuuccaccugagcauccccaacuucaaccaguacgaggccaugagcugcgacuucaacgacggcaagaucagcgugcaguacaaccugagccacaccuacgccggcgacaccgccaaccacugcggcaccguggccaacggcgugcugcagaccuucaugagaauggccuggggcggcagcuacaucgcccuggacagcggcagaggcggcugggacugcaucaugaccagcuaccaguaccugaucauccagaacaccaccugggaggaccacugccaguucagcagacccagccccaucggcuaccugggccugcugagccagagaaccagagacaucuacaucagcagaagacugcugggcaccuucaccuggacccugagcgacagcgagggcaaggacacccccggcggcuacugccugaccagauggaugcugaucgaggccgagcugaagugcuucggcaacaccgccguggccaagugcaacgagaagcacgacgaggaguucugcgacaugcugagacuguucgacuucaacaagcaggccauccagagacugaaggccgaggcccagaugagcauccagcugaucaacaaggccgugaacgcccugaucaacgaccagcugaucaugaagaaccaccugagagacaucaugggcauccccuacugcaacuacagcaaguacugguaccugaaccacaccgugaccggcaagaccagccugcccaagugcuggcuggugagcaacggcagcuaccugaacgagacccacuucagcgacgacaucgagcagcaggccgacaacaugaucaccgagaugcugcagaaggaguacauggagagacagggcaagaccccccugggccugguggaccuguucguguucagcaccagcuucuaccugaucagcaucuuccugcaccuggugaagauccccacccacagacacguggugggcaagcccugccccaagccccacagacugaaccacaugggcaucugcagcugcggcuucuacaagcagcccggcgugcccgugagauggaagagaugaggacuagucccuguucccagagcccacuuuuuuuucuuuuuuugaaauaaaauagccugucuuucagaucucaaaggcucuuuucagagccaccaaaaaaaaaaaaaaaaaaaaaaaaaaaaaaaaaaaaaaaaaaaaaaaaaaaaaaaaaaaaaaaaaaaaaaaaaaaaaaaaaaaaaaaaaaaaaaaaaaaaa

SEQ ID NO: 14503 - RNA, 1767 nt, Artificial Sequence
  mRNA product Design a-2 (hSL-A100) comprising derived and/or modified sequence from LASV(Z0947-SLE-2011;Clade IV)__AIT17840__GPC (opt4)
aggagaguccgcucagccagguugcagaagcggcuuagcguguguccuaaucuucucucugcguguagguaggccugugccgcaaacaagcuuaccaugggccagaucgugaccuucuuccaggaggugccccacgugaucgaggaggugaugaacaucgugcugaucgcccugagcauccuggccgugcugaagggccuguacaacuucgccaccugcggccuggugggccuggugaccuuccugcugcugugcggcagaagcugcaccaucagccuguacaagggcguguacgagcugcagacccuggagcugaacauggagacccugaacaugaccaugccccugagcugcaccaagaacaacagccaccacuacaucauggugggcaacgagaccggccuggagcugacccugaccaacaccagcaucaucaaccacaaguucugcaaccugagcgacgcccacaagaagaaccuguacgaccacgcccugaugagcaucaucagcaccuuccaccugagcauccccaacuucaaccaguacgaggccaugagcugcgacuucaacggcggcaagaucagcgugcaguacaaccugagccacagcuacgccggcgacgccgccaaccacugcggcaccguggccaacggcgugcugcagaccuucaugagaauggccuggggcggcagcuacaucgcccuggacagcggcagagacagaugggacugcaucaugaccagcuaccaguaccugaucauccagaacaccaccugggaggaccacugccaguucagcagacccagccccaucggcuaccugggccugcugagccagagaaccagagacaucuacaucagcagaagacugcugggcaccuucaccuggacccugagcgacagcgagggcaaggacacccccggcggcuacugccugaccagauggaugcugaucgaggccgagcugaagugcuucggcaacaccgccguggccaagugcaacgagaagcacgacgaggaguucugcgacaugcugagacuguucgacuucaacaagcaggccauccagagacugaaggccgaggcccagaugagcauccagcugaucaacaaggccgugaacgcccugaucaacgaccagcugaucaugaagaaccaccugagagacaucaugggcauccccuacugcaacuacagcaaguacugguaccugaaccacaccaccaccggcaagaccagccugcccaagugcuggcuggugagcaacggcagcuaccugaacgagacccacuucagcgacgacaucgagcagcaggccgacaacaugaucaccgagaugcugcagaaggaguacauggagagacagggcaagaccccccugggccugguggaccuguucguguucagcaccagcuucuaccugaucagcaucuuccugcaccuggugaagauccccacccacagacacaucgugggcaagcccugccccaagccccacagacugaaccacaugggcaucugcagcugcggccuguacaagcagcccggcgugcccgugaaguggaagagaugaggacuagucccuguucccagagcccacuuuuuuuucuuuuuuugaaauaaaauagccugucuuucagaucucaaaggcucuuuucagagccaccaaaaaaaaaaaaaaaaaaaaaaaaaaaaaaaaaaaaaaaaaaaaaaaaaaaaaaaaaaaaaaaaaaaaaaaaaaaaaaaaaaaaaaaaaaaaaaaaaaaaa

SEQ ID NO: 14504 - RNA, 1767 nt, Artificial Sequence
  mRNA product Design a-2 (hSL-A100) comprising derived and/or modified sequence from LASV(Josiah;Clade IV)__NP_694870__GPC (opt5)
aggagaguccgcucagccagguugcagaagcggcuuagcguguguccuaaucuucucucugcguguagguaggccugugccgcaaacaagcuuaccaugggccagaucgugaccuucuuucaagaggucccccacguuauugaagaggugaugaacaucgugcugauugcccucagcguccuggcugugcuuaaggggcuguacaauuucgccacaugcggacucguuggccuggugacguuucuucugcucugugggagauccugcaccacaucucuguauaaaggagucuacgaacugcagacccucgagcugaacauggaaacacuuaauaugaccaugccucugagcuguacaaagaacaauucccaucacuauaucauggugggcaacgagaccgggcucgagcugacgcuuaccaauacaucuauuaucaaccauaaauucugcaaucugagcgacgcgcacaagaaaaaccucuacgaucaugcucugauguccaucauuucuaccuuucaccugagcaucccgaauuucaaccaguaugaagccauguccugugacuuuaauggaggcaagauuagcguucaguacaaccucucucacuccuaugccggcgaugcugccaaucauugcgggacaguggcuaacggaguccugcaaaccuucaugcggauggccuggggcgggagcuacaucgcgcuugacucuggacgcggcaacugggauuguauuaugacguccuaccaguaucugaucauucagaauacaaccugggaggaccacugccaguuuagcagacccucuccuaucggguaccucggacugcuuucccaacggacacgcgauaucuauauuagcagacggcugcucggcaccuucaccuggacacuguccgacucugaaggcaaggauacgcccgggggauacugucugacccgcuggaugcucaucgaggccgagcugaaaugcuuuggcaacacagcuguggccaaguguaaugaaaaacaugacgaggaguucugcgauaugcuuagacuguuugacuucaacaagcaggcuauucagcggcucaaagccgaagcgcagaugagcauccaacugauuaauaaggccgugaacgcucuuaucaaugaucagcugaucaugaagaaccaccuccgcgacauuauggggaucccuuauugcaauuacuccaaauauugguaccugaaccacaccacaaccggaagaacgagccugcccaaguguuggcucgucucuaauggcuccuaccugaacgaaacacauuucagcgacgauauugagcagcaagccgacaauaugaucaccgagaugcuucagaaagaauauauggagcggcaggggaagaccccucugggacucguugaucuguuuguguucucuaccagcuuuuaccugauuuccaucuuccuucaccucgugaaaaucccgacacaucgccacauugucggcaagucuugccccaaaccucauagacugaaccacaugggcaucuguagcugcgggcuguauaagcagcccggagugccuguuaaguggaaacggugaggacuagucccuguucccagagcccacuuuuuuuucuuuuuuugaaauaaaauagccugucuuucagaucucaaaggcucuuuucagagccaccaaaaaaaaaaaaaaaaaaaaaaaaaaaaaaaaaaaaaaaaaaaaaaaaaaaaaaaaaaaaaaaaaaaaaaaaaaaaaaaaaaaaaaaaaaaaaaaaaaaaa

SEQ ID NO: 14505 - RNA, 1764 nt, Artificial Sequence
  mRNA product Design a-2 (hSL-A100) comprising derived and/or modified sequence from LASV(LP;Clade I)__AAF86701__GPC (opt5)
aggagaguccgcucagccagguugcagaagcggcuuagcguguguccuaaucuucucucugcguguagguaggccugugccgcaaacaagcuuaccaugggccagaucauuaccuucuuucaagaggugccccacgucaucgaagagguuaugaacauugugcugaucgcccucagccugcuugcuauucugaaggggcucuacaauaucgccacaugcggaaucauuggccugguggcguuccuuuuucugugugggaaauccugcucucucacgcugaagggaggcuaugaacugcagacccucgagcugaacauggaaacacuuaauaugaccaugccucugagcuguaccaaaaacuccucucaucacuacaucagagucgggaaugagacaggacucgagcugacacuuaccaacacgagcauuaucaaucauaaguucugcaaccuguccgacgcucacaaaaagaaucucuaugaucaugcccugaugucuauuaucagcaccuuucaccuguccauuccgaacuucaaucaguacgaagccaugagcugugacuuuaacggcggcaagaucucugugcaguauaaucucucccacagcuacgcuggggaugccgcugagcauugcggaacaguugccaacggcgugcugcaaaccuucaugcggauggcguggggagggcgcuauaucgcccuugacucuggcaaagggaauugggauuguauuaugacauccuaccaguaccugaucauucagaacaccacgugggaagaccacugccaguuuagcagacccucuccuaucggauaucucggccugcuuucccaacggacacgcgauauuuacaucagcagacggcugcucggcaccuucacauggacccuguccgacucugaggggaacgagacccccggaggcuauugucugacacgcuggaugcucaucgaagcugagcugaagugcuuugggaauacggccgucgcuaaauguaacgaaaagcaugaugaggaguucugcgacaugcuuagacuguuugauuucaauaaacaggccauucggcgccucaaggcggaagcccagaugagcauccagcugauuaacaaggcugugaaugcccuuaucaacgaccaacugauuaugaaaaaucaccucagagauaucaugggaaucccuuacugcaacuauuccaaguacugguaucugaaucacaccagcucuggccggacaucccugcccaaauguuggcucauuagcaacgggucuuaccugaaugagacccaguucagcgacgacaucgaacagcaagcugauaacaugauuacagagaugcuucagaaggaauacaucgagcgccagggaaaaaccccucugggccucguugacauuuuuaucuucuccacgucuuuuuaucugauuagcaucuuccugcaucuuaucaagauuccgacacacagacauaucgugggcaaacccugcccuaagccccaccggcucaaucauaugggggucuguuccugcggacuguacaagcacccuggcgugcccaccaaauggaagcgcugaggacuagucccuguucccagagcccacuuuuuuuucuuuuuuugaaauaaaauagccugucuuucagaucucaaaggcucuuuucagagccaccaaaaaaaaaaaaaaaaaaaaaaaaaaaaaaaaaaaaaaaaaaaaaaaaaaaaaaaaaaaaaaaaaaaaaaaaaaaaaaaaaaaaaaaaaaaaaaaaaaaaa

SEQ ID NO: 14506 - RNA, 1764 nt, Artificial Sequence
  mRNA product Design a-2 (hSL-A100) comprising derived and/or modified sequence from LASV(803213;Clade II)__AAF86703__GPC (opt5)
aggagaguccgcucagccagguugcagaagcggcuuagcguguguccuaaucuucucucugcguguagguaggccugugccgcaaacaagcuuaccaugggccagaucauuaccuucuuucaagaggugccccacgucaucgaagagguuaugaacauugugcugaucgcccucagccugcuugcuauucugaaggggaucuacaauguggccacaugcggacucuucggccugaucuccuuucuucugcucugugggagaucuugcagcgucacguauaaaggaguguacgaacugcagacccuggagcucaacauggcgaaucugaacaugacaaugccucuuuccuguaccaagaauaacucucaucacuauauuaugguuggcaaugaaacagggcuggagcucacccugacaaacaccagcaucauuaaucauaaauucugcaaccuuuccgacgcucacaagaaaaaucuguacgaucaugcccucaugucuaucauuagcacguuucaccuguccaucccgaacuucaaucaguaugaggccaugagcugugacuuuaacggaggcaagauuucugugcaguacaaucugucccacagcuucgcugucgaugccgcuaaccauugcggcaccaucgccaacggggugcuccaaacauuuaugcggauggcguggggaggcucuuauaucgcccuggacuccgggaagggaaauugggauuguauuaugaccagcuaccaguaccuuaucauucagaacacaaccugggaagaccacugccaguucucucgccccuccccuaucggcuaucuggggcuccugagccaaagaacgcgggauauuuacaucucccgcagacuucugggaacauuuaccuggacacucucugacagcgagggcaaugaagcucccggcggguauugucugacccgguggaugcugaucgaggccgagcucaaaugcuucggaaacaccgcuguugccaaguguaaugaaaaacaugaugaggaauuuugcgacaugcugcgccuuuucgauuucaacaagcaggcgauuaaaagacugaagacagaggcccagauguccauccagcucauuaauaaggcugugaacgcccugaucaaugaccaacuuauuaugaaaaaccaucugcgggauaucaugggcaucccuuacugcaauuauagccgcuacugguaucucaaccacacggucaccgggaagacaucucugcccagauguuggcugguguccaauggaagcuaccucaacgaaacccacuuuucugacgacauugagcagcaggcugauaauaugaucacagagaugcugcaaaaagaauacauggaccggcagggcaagaccccucuugggcugguggaucucuucgucuuuagcacguccuucuaucugauuucuaucuuucugcaccuuguuaaaauuccgacacaucgccacaucgugggaaagcccugcccuaaaccccauagacucaaccacaugggcauuuguagcugcggccuguacaagcacccuggggugcccgucaaguggaaacggugaggacuagucccuguucccagagcccacuuuuuuuucuuuuuuugaaauaaaauagccugucuuucagaucucaaaggcucuuuucagagccaccaaaaaaaaaaaaaaaaaaaaaaaaaaaaaaaaaaaaaaaaaaaaaaaaaaaaaaaaaaaaaaaaaaaaaaaaaaaaaaaaaaaaaaaaaaaaaaaaaaaaa

SEQ ID NO: 14507 - RNA, 1764 nt, Artificial Sequence
  mRNA product Design a-2 (hSL-A100) comprising derived and/or modified sequence from LASV(GA391;Clade III)__CAA36645__GPC (opt5)
aggagaguccgcucagccagguugcagaagcggcuuagcguguguccuaaucuucucucugcguguagguaggccugugccgcaaacaagcuuaccaugggccagaucgugaccuucuuucaagaggucccccacguuauugaagaggugaugaacaucgugcugauugcccucagcauccuggcuauucuuaaggggcuguacaaugucgccacaugcggacucaucggccuggugacguuccuucugcucuccgggagaucuuguagccugaucuauaaaggaaccuacgaacugcagacacucgagcugaacauggaaacccuuaauaugacaaugccucuguccugcaccaagaacaauucucaucacuauauucggguuggcaacgagacagggcucgagcugacccuuacgaauaccagcauccugaaccauaaauuuuguaaucucuccgacgcgcacaagcgcaaccuguacgaucauucucugaugagcauuaucuccacauuccaccucagcauuccgaauuuuaaccaguaugaagcuaugucuugcgacuucaauggaggcaaaaucaccgugcaguacaaccugucccacagcuuugccgucgaugccgcuggccauugugggacacuugccaauggagugcugcaaaccuucaugagaauggcuuggggcgggucuuauauugcccucgacuccggacggggcaacugggauugcaucaugacgagcuaccaguaccugaucauucagaacacaaccugggacgaucacugucaguuuucucgccccuccccuaucggguaucuuggacugcucagccaaagaacacgggacauuuacaucucccgcagacugcugggcaccuucaccuggacacucucugauagcgagggcaaugaaacgcccgggggauauugccugacccgguggaugcuuauugaggcggagcugaaguguuuuggcaacacagccguugcuaagugcaaugaaaaacaugacgaggaguucugugauaugcuccgccuguuugacuucaacaagcaggccaucagacggcuuaaaaccgaagcucagauguccauccagcugauuaauaaggccgugaacgcgcucaucaaugaucaacugauuaugaaaaaccaucugcgcgacaucauggggauuccuuacugcaauuauagcagauacugguaucucaaccacacaucuaccggaaagacgucccugccccggugcuggcuuaucagcaauggcucuuaccugaacgaaacaaaguucagcgacgauaucgagcagcaggccgacaauaugauuaccgagaugcuccaaaaagaauacaucgaucgccaggggaagaccccucugggacuggucgaccuuuuuguguucuccacaucuuuuuaucucauuagcaucuuccugcaccuggugaaaauuccgacccacagacauaucgucggcaagcccuguccuaaaccccaccggcucaaccauaugggcauuugcuccugugggcuguacaagcagccuggaguucccgugagauggaaacgcugaggacuagucccuguucccagagcccacuuuuuuuucuuuuuuugaaauaaaauagccugucuuucagaucucaaaggcucuuuucagagccaccaaaaaaaaaaaaaaaaaaaaaaaaaaaaaaaaaaaaaaaaaaaaaaaaaaaaaaaaaaaaaaaaaaaaaaaaaaaaaaaaaaaaaaaaaaaaaaaaaaaaa

SEQ ID NO: 14508 - RNA, 1767 nt, Artificial Sequence
  mRNA product Design a-2 (hSL-A100) comprising derived and/or modified sequence from LASV(AV;Clade V)__CCA30314__GPC (opt5)
aggagaguccgcucagccagguugcagaagcggcuuagcguguguccuaaucuucucucugcguguagguaggccugugccgcaaacaagcuuaccaugggccagaucgugaccuucuuucaagaggucccccacguuauugaagaggugaugaacaucgugcugauugcccucagcauccuggcuguccuuaaggggcuguacaauauugccacaugcggacucaucggccugaucacguuccuucugcucugugggagauccugcucuagcaaccuguauaaaggaguguacgaacugcagucccucgaccugaauauggagacccuuaacaugacaaugccucugucuuguaccaagaauaacagccaucacuauauucggguuggcaaugauacagggcucgaacugacccuuacaaacaccuccauccugaaucauaaauuuugcaaccucucugacgcgcacaagaaagaucuguacgaccaugcucugaugagcauuaucuccacguuccaccucagcauuccgaauuuuaaccaguaugaggccaugucuugugauuucaauggaggcaagaucuccgugcaguacaaccugagccacucuuaugccauugacgcugccaaucauugcggcaccgucgcuaacgggauccuucaaacauuuaugcgcauggccuggggaggcuccuacaucgcgcuggauagcgggagaggaaacugggacuguauuaugaccucuuaccaguaucucaucauucagaauacaaccugggagaaccacugccaguucucccggcccagcccuaucggcuaccuggggcuucugucccaacgcacgagagauauuuauaucucucggcgccuccugggaacauuuaccuggacacugagcgacuccgaaggcaaugccacccccggcggguacugucucaccagauggaugcugaucgaggcugaacuuaagugcuucggaaacacagccguggcuaaauguaaugagaagcaugaugaggaauuuugcgacaugcugcgccucuucgauuuuaacaaacaggccauuagccggcugaagucugaggcgcagauguccauccagcuuauuaauaaagccguuaacgcucugaucaaugaccaacucauuaugaagaaccaccugagagacaucaugggcaucccuuauugcaauuacagcaaguauugguaccugaaccacacgauuaccgggaaaacaucucuccccaaguguuggcuggugagcaauggauccuaccuuaacgaaacccauuucucugaugacaucgagcagcaggccgauaauaugauuacagaaaugcugcaaaaagaguauauggagcggcagggcaagaccccucucgggcuggucgaccuguucguguuuagcacguccuucuaccuuaucagcauuuuucuccgccuggugaaaaucccgacacacagacauauugucggaaagcccugcccuaaaccccaccggcugaaccauaugggcaucuguucuugcggccucuauaagcagccugggguucccgugcgcuggaagagaugaggacuagucccuguucccagagcccacuuuuuuuucuuuuuuugaaauaaaauagccugucuuucagaucucaaaggcucuuuucagagccaccaaaaaaaaaaaaaaaaaaaaaaaaaaaaaaaaaaaaaaaaaaaaaaaaaaaaaaaaaaaaaaaaaaaaaaaaaaaaaaaaaaaaaaaaaaaaaaaaaaaaa

SEQ ID NO: 14509 - RNA, 1764 nt, Artificial Sequence
  mRNA product Design a-2 (hSL-A100) comprising derived and/or modified sequence from LASV(Togo/2016/7082;Clade VI)__AMR44577__GPC (opt5)
aggagaguccgcucagccagguugcagaagcggcuuagcguguguccuaaucuucucucugcguguagguaggccugugccgcaaacaagcuuaccaugggccagaucauuaccuucuuucaagaggugccccacgucaucgaagagguuaugaacauugugcugaucgcccucagccugcuugcuauucugaaggggguguacaaugucgccacaugcggaaucaucggccucgugacguuccuguuucuuugugggagauccugcucucugauuuauaaaggaagcuacgaacuccagacccuggagcugaacauggaaacacucaauaugaccaugccucuguccuguacaaagaacucuagccaucacuauauccggguuggcaaugagaccgggcuugagcugacacucaccaacacguccauuaucaaucauaaauucugcaaccugucugacgcgcacaagcgcaaucuuuacgaucaugcucugaugagcauucucuccaccuuucaccugagcaucccgaacuucaaucaguaugaagccaugucuugugacuuuaacggaggcaaaauuuccgugcaguacaaucugagccacgccuaugcugucgaugccgcugagcauugcggcacaguggccaacgggguucuccaaaccuucaugagaauggcguggggaggcucuuacaucgcccuggacuccgggcggggaaauugggauuguaucaugacaagcuaccaguaucuuauuauccagaacaccacgugggaagaccacugccaguuuucucgccccuccccuauuggcuaccuggggcuccugagccaaagaacacgggauaucuauauuucccgcagacuucugggaaccuucacauggacccucucugacagcgagggcaacgagacccccggcggguacugucugacacgguggaugcugaucgaagcugagcucaagugcuuuggaaauacggccguggcuaaguguaacgaaaaacaugaugaggaguucugcgacaugcugcgccuuuuugauuucaauaagcaggccauccagagacugaaauccgaagcgcagaugagcauucaacucaucaacaaggccgucaaugcucugauuaacgaccagcuuaucaugaaaaaucaucugcgggauaugaugggcauuccuuauugcaacuacucuaaguauugguaccucaaucacaccuccagcgggcgcacaucucugcccaaguguuggcuggugagcaacggauccuaccucaaugagacccacuucucugacgacaucgaacagcaagccgauaacaugaucacagagaugcugcagaaagaauauauugacagacagggcaagaccccucuugggcugguggaucucuuugucuucagcacguccuuuuaccugaucagcauuuuccugcaccuuaucaaaauuccgacacaucggcacaucguuggaaagcccugcccuaaaccccaucgccucaaucacaugggcauuuguucuugcggccuguauaagcagccuggggugcccaccagauggaaacggugaggacuagucccuguucccagagcccacuuuuuuuucuuuuuuugaaauaaaauagccugucuuucagaucucaaaggcucuuuucagagccaccaaaaaaaaaaaaaaaaaaaaaaaaaaaaaaaaaaaaaaaaaaaaaaaaaaaaaaaaaaaaaaaaaaaaaaaaaaaaaaaaaaaaaaaaaaaaaaaaaaaaa

SEQ ID NO: 14510 - RNA, 1764 nt, Artificial Sequence
  mRNA product Design a-2 (hSL-A100) comprising derived and/or modified sequence from LASV(KAK-428;Clade n.d. (VII))__ANH09740__GPC (opt5)
aggagaguccgcucagccagguugcagaagcggcuuagcguguguccuaaucuucucucugcguguagguaggccugugccgcaaacaagcuuaccaugggccagaucgugaccuucuuucaagaggucccccacguuauugaagaggugaugaacaucgugcugauugcccucagccugcuugcuauccugaaggggcucuacaauuucgccacaugcggagucauuggccugaucacguuucuucugcucugugggagauccugcucugcgaccuauaaaggacaguacgaacugcagacacuggagcucaacauggaaagccugaauaugaccaugccucuuuccuguacaaagaacaauucucaucacuauauccgggcuggcaacaauaccgggcuggagcucacacugaccaacacgagcauuaucucccauaaauucugcaaucuuucugacgcccacaagaaaaaccuguacgaucauacccucaugagcauuaucacaaccuuucaccuguccauuccgaauuucaaccaguaugaggccaugagcugugacuuuaauggaggcaagaucucuauucaauacaaccugucccacagcuaugcuggcgaugccgcucagcauugcgggacaguggccaauggaguucuccagaccuucaugcgcauggcguggggcgggucuuaccuggcccuugacuccggaagacggggcugggauuguaucaucagcucuuaccaguaucugauuauccaaaacacgacaugggacgaucacugccaguuuucccgccccagcccuauuggguaccucggauucgugucccagaagaccagagacaucuauauuucucggcgccugcuuggcacauuuaccuggacccugagcgauuccgaaggccaugacaugcccgggggauacugucucacaagauggaugcugaucgaggcugaucugaaaugcuucggcaacacggccgucgcuaaguguaaugaaaaacacgacgaggaguuuugcgauauguggcgccucuucgacuucaacaagcaggccauccaacggcugaaagcggaagcccagaugaauauucagcuuaucaacaaggcugugaaugcccugauuaacgaccaacucaugaugaagaaucaccugagagauaucauggggauuccuuauugcaacuacagcaaauuuugguaucuuaauaacaccacaaccggacggacaucucugccccgcuguuggcucaucuccaauggcagcuaccugaacgagacccauuucucugacgauaucgaacagcaggcugacaauaugauuacggagaugcugcagaaggaauacauggauagacaagggaaaacaccucucggacugguugaccuuuuuguguucagcaccuccuuuuaucugaucaccauuuuccuccaccuggucaagaucccgacacaucggcacauugugggcaaacccugcccuaagccccaucgccugaaccacaugggcaucuguucuugcgggcuuuacaaacagccuggagugcccgucagauggaagcggugaggacuagucccuguucccagagcccacuuuuuuuucuuuuuuugaaauaaaauagccugucuuucagaucucaaaggcucuuuucagagccaccaaaaaaaaaaaaaaaaaaaaaaaaaaaaaaaaaaaaaaaaaaaaaaaaaaaaaaaaaaaaaaaaaaaaaaaaaaaaaaaaaaaaaaaaaaaaaaaaaaaaa

SEQ ID NO: 14511 - RNA, 1764 nt, Artificial Sequence; identical to SEQ ID NO: 14505
  mRNA product Design a-2 (hSL-A100) comprising derived and/or modified sequence from LASV(Pinneo-NIG-1969;Clade I)__AIT17836__GPC (opt5)

SEQ ID NO: 14512 - RNA, 1764 nt, Artificial Sequence
  mRNA product Design a-2 (hSL-A100) comprising derived and/or modified sequence from LASV(ISTH0009-NIG-2011;Clade II)__AIT17404__GPC (opt5)
aggagaguccgcucagccagguugcagaagcggcuuagcguguguccuaaucuucucucugcguguagguaggccugugccgcaaacaagcuuaccaugggccagaucauuaccuucuuucaagaggugccccacgucaucgaagagguuaugaacauugugcugaucgcccucagccugcuugcuauucugaaggggaucuacaauguggccacaugcggacucuucggccuggucuccuuucuucugcucugugggagaucuugcagcacgaccuauaaaggaguguacgaacugcagacacuggagcucgacauggcgucccugaacaugaccaugccucuuucuuguacaaagaauaacagccaucacuauaucaugguuggcaaugaaaccgggcuggagcucacacugaccaacacguccauuaucaaucauaaauucugcaaccuuucugaugcucacaagaaaaaucuguacgaccaugcccucaugagcauuaucuccaccuuucaccugagcauuccgaacuucaaucaguaugaggccaugucuugugauuuuaacggaggcaagaucuccgugcaguacaaucugagccacgcuuaugccgucgacgcugccaaccauugcggcacaauugcgaauggggugcuccaaaccuucaugcggauggccuggggaggcucuuacaucgcucuggauuccgggaagggaagcugggacuguaucaugacaucuuaccaguaucuuauuauccagaacaccacgugggaagaucacugccaguuuucccgccccagcccuauuggcuaccuggggcuccugucccaaagaacacgggacaucuauauuucucgcagacuucugggaaccuucacauggacccucagcgauuccgagggcaacgaaacccccggcggguacugucugacacgguggaugcugaucgaggccgagcucaaaugcuuuggaaauacggcuguugccaaguguaacgaaaaacaugacgaggaguucugcgauaugcugcgccuuuuugacuucaauaagcaggcgaucagacggcugaaaaccgaagcccagaugagcauucagcucaucaacaaggcugugaaugcccugauuaacgaucaacuuaucaugaagaaucaucugcgcgacauuaugggcaucccuuauugcaacuacucuaaauauugguaccucaaucacacagucaccgggaagacaucccugcccagauguuggcuggugagcaacggaucuuaccucaaugaaacccacuucagcgacgauaucgagcagcaggcugacaacaugauuacggagcugcuucaaaaagaauauauggaucggcagggcaagacaccucuggggcucguggaccuguuugucuucuccaccucuuuuuaccugaucagcauuuuccuucaccucaucaaaauuccgacccaucgccacaucacaggaaagcccugcccuaaaccccauagacugaaucacaugggcauuuguuccugcggccuguauaagcacccugggguucccgugaaguggaaacggugaggacuagucccuguucccagagcccacuuuuuuuucuuuuuuugaaauaaaauagccugucuuucagaucucaaaggcucuuuucagagccaccaaaaaaaaaaaaaaaaaaaaaaaaaaaaaaaaaaaaaaaaaaaaaaaaaaaaaaaaaaaaaaaaaaaaaaaaaaaaaaaaaaaaaaaaaaaaaaaaaaaaa

SEQ ID NO: 14513 - RNA, 1764 nt, Artificial Sequence
  mRNA product Design a-2 (hSL-A100) comprising derived and/or modified sequence from LASV(ISTH2010-NIG-2012;Clade II)__AIT17482__GPC (opt5)
aggagaguccgcucagccagguugcagaagcggcuuagcguguguccuaaucuucucucugcguguagguaggccugugccgcaaacaagcuuaccaugggccagaucauuaccuucuuucaagaggugccccacgucaucgaagagguuaugaacauugugcugaucgcccucagccugcuugcuauucugaaggggaucuacaauguggccacaugcggacucuucggccuggucuccuuucuucugcucugugggagaucuugcagcacgaccuauaaaggaguguacgaacugcagacacuggagcucgacauggcgucccugaacaugaccaugccucuuucuuguacaaagaauaacagccaucacuauaucaugguuggcaaugaaaccgggcuggagcucacacugaccaacacguccauuaucaaucauaaauucugcaaccuuucugaugcucacaagaaaaaucuguacgaccaugcccucaugagcauuaucuccaccuuucaccugagcauuccgaacuucaaucaguaugaggccaugucuugugauuuuaacggaggcaagaucuccgugcaguacaaucugagccacgcuuaugccgucgacgcugccaaccauugcggcacaauugcgaauggggugcuccaaaccuucaugcggauggccuggggaggcucuuacaucgcucuggauuccgggaagggaagcugggacuguaucaugacaucuuaccaguaucuuauuauccagaacauuaccugggaagaucacugccaguuuucccgccccagcccuaucggcuaccuggggcuccugucccaaagaacgcgggacauuuauaucucucgcagacuucugggaacauucaccuggacacucagcgauuccgagggcaacgaaacccccggcggguacugucugacccgguggaugcugaucgaggccgagcucaaaugcuuuggaaauacagcuguugccaaguguaacgaaaaacaugacgaggaguucugcgauaugcugcgccuuuuugacuucaauaagcaggcgauuagacggcugaaaacggaagcccagaugagcauccagcucauuaacaaggcugugaaugcccugaucaacgaucaacuuauuaugaagaaucaucugcgcgacaucaugggcaucccuuauugcaacuacucuaaauauugguaccucaaucacaccgucacagggaagaccucccugcccagauguuggcuggugagcaacggaucuuaccucaaugaaacacacuucagcgacgauauugagcagcaggcugacaacaugaucaccgagcugcuucaaaaagaauauauugaucggcagggcaagacgccucuggggcucguggaccuguuugucuucuccacaucuuuuuaccugaucagcauuuuccuucaccucguuaaaaucccgacccaucgccacguggugggaaagcccugcccuaaaccccauagacugaaucacaugggcauuuguuccugcggccuguauaagcacccugggguccccgugaaguggaaacggugaggacuagucccuguucccagagcccacuuuuuuuucuuuuuuugaaauaaaauagccugucuuucagaucucaaaggcucuuuucagagccaccaaaaaaaaaaaaaaaaaaaaaaaaaaaaaaaaaaaaaaaaaaaaaaaaaaaaaaaaaaaaaaaaaaaaaaaaaaaaaaaaaaaaaaaaaaaaaaaaaaaaa

SEQ ID NO: 14514 - RNA, 1764 nt, Artificial Sequence
  mRNA product Design a-2 (hSL-A100) comprising derived and/or modified sequence from LASV(Lassa virus/H.sapiens-wt/NGA/2015/ISTH_0543;Clade II)__AVO03639__GPC (opt5)
aggagaguccgcucagccagguugcagaagcggcuuagcguguguccuaaucuucucucugcguguagguaggccugugccgcaaacaagcuuaccaugggccagaucauuaccuucuuucaagaggugccccacgucaucgaagagguuaugaacauugugcugaucgcccucagccugcuugcuauucugaaggggaucuacaauguggccacaugcggacucuucggccuggucuccuuucuucugcucugugggagaucuugcagcacgaccuauaaaggaguguacgaacugcagacacuggagcucgacauggcgaaccugaauaugaccaugccucuuuccuguacaaagaacaauucucaucacuauaucaugguuggcaacgaaaccgggcuggagcucacacugaccaauacgagcauuaucaaccauaaauucugcaaucuuuccgaugcucacaagaaaaaccuguacgaccaugcccucaugucuauuaucagcaccuuucaccuguccauuccgaauuucaaccaguaugaggccaugagcugugauuuuaauggaggcaagaucucugugcaguacaaccugucccacacauaugcugucgacgccgcuaaucauugcggcaccauugccaacggggugcuccaaacauucaugcggauggcguggggaggcagcuacaucgcccuggauucugggaagggauccugggacuguaucaugaccagcuaccaguaucuuguuauucagaacacgacaugggaagaucacugccaguuuucucgccccuccccuaucggcuaccuggggcuccugagccaaagaacccgggacauuuauaucucccgcagacuucugggaacauucaccuggacccucucugauagcgagggcaaugaaacacccggcggguacugucugacgcgguggaugcugauugaggcugagcucaaaugcuuuggaaacaccgccguggcuaaguguaaugaaaaacaugacgaggaguucugcgauaugcugcgccuuuuugacuucaacaagcaggccaucagacggcugaaaacagaagcgcagauguccauccagcucauuaauaaggccgucaacgcucugaucaaugaucaacuuauuaugaagaaccaucugcgcgacaucaugggcauuccuuauugcaauuacagcaaauauugguaccucaaccacaccgugacagggaagaccucucugcccagauguuggcugguguccaauggaagcuaccucaacgaaacgcacuucucugacgauaucgagcagcaggccgacaauaugaucacagagcugcuucaaaaagaauauauugaucggcagggcaagaccccucuggggcucgucgaccuguuuguuuucagcaccuccuuuuaccugaucucuauuuuccuucaccucgugaaaaucccgacacaucgccacauuaccggaaagcccugcccuaaaccccauagacugaaccacaugggcaucuguagcugcggccuguauaagcacccuggggugcccgucaaguggaaacggugaggacuagucccuguucccagagcccacuuuuuuuucuuuuuuugaaauaaaauagccugucuuucagaucucaaaggcucuuuucagagccaccaaaaaaaaaaaaaaaaaaaaaaaaaaaaaaaaaaaaaaaaaaaaaaaaaaaaaaaaaaaaaaaaaaaaaaaaaaaaaaaaaaaaaaaaaaaaaaaaaaaaa

SEQ ID NO: 14515 - RNA, 1764 nt, Artificial Sequence
  mRNA product Design a-2 (hSL-A100) comprising derived and/or modified sequence from LASV(Lassa virus/H.sapiens-wt/NGA/2016/ISTH_0009;Clade II)__AVO03571__GPC (opt5)
aggagaguccgcucagccagguugcagaagcggcuuagcguguguccuaaucuucucucugcguguagguaggccugugccgcaaacaagcuuaccaugggccagaucauuaccuucuuucaagaggugccccacgucaucgaagagguuaugaacauugugcugaucgcccucagccugcuugcuauucugaaggggaucuacaauguggccacaugcggacuccugggccuugucuccuuccugcuccugugugggagaucuugcagcacgaccuauaaaggaguguacgaacugcagacacucgagcuggacauggcgucccuuaacaugaccaugccucugucuuguacaaagaauaacagccaucacuauaucaugguuggcaaugaaaccgggcucgagcugacacuuaccaacacguccauuaucaaucauaaauuuugcaaccugucugaugcucacaagaaaaaucucuacgaccaugcccugaugagcauuaucuccaccuuccaccugagcauuccgaacuuuaaucaguaugaggccaugucuugugauuucaacggaggccggaucuccgugcaguacaaucucagccacucuuaugcugucgacgccgcuaaccauugcggcacaauugccaauggggugcugcaaaccuuuaugcgcauggcguggggaggcuccuacaucgcccuugauagcgggaagggaucuugggacuguaucaugacauccuaccaguaucugauuauccagaacaccacgugggaagaucacugccaguucagcagacccuccccuauuggcuaccucgggcugcuuucucaacggacacgcgacaucuauauuagcagacggcugcucggaaccuuuacauggacccuguccgauagcgagggcaacgaaacccccggcggguacugucugacacgcuggaugcucaucgaggcugagcugaagugcuucggaaauacggccguugcuaaauguaacgaaaagcaugacgaggaauuuugcgauaugcuuagacuguucgacuuuaauaaacaggccauccggcgccucaagaccgaggcgcagaugucuauucagcugaucaacaaagccgugaaugcucuuauuaacgaucaacugaucaugaagaaucaccucagagacauuaugggcaucccuuauugcaacuacuccaaguauugguaccugaaucacacagucaccgggaaaacaagccugccccgguguuggcucgugucuaacggaagcuaccugaaugaaacccauuucuccgacgauaucgagcagcaggccgacaacaugauuacggagcuucugcaaaaggaauauaucgaucgccagggcaaaacaccucucgggcugguggaccuguucgucuuuucuaccagcuucuaccuuauuuccaucuuucuccaccugguuaagauuccgacccauagacacaucacaggaaaacccugcccuaagccccaucggcugaaucacaugggcauuuguagcugcggccucuauaaccacccuggggugcccgugaaauggaagcgcugaggacuagucccuguucccagagcccacuuuuuuuucuuuuuuugaaauaaaauagccugucuuucagaucucaaaggcucuuuucagagccaccaaaaaaaaaaaaaaaaaaaaaaaaaaaaaaaaaaaaaaaaaaaaaaaaaaaaaaaaaaaaaaaaaaaaaaaaaaaaaaaaaaaaaaaaaaaaaaaaaaaaa

SEQ ID NO: 14516 - RNA, 1764 nt, Artificial Sequence
  mRNA product Design a-2 (hSL-A100) comprising derived and/or modified sequence from LASV(Lassa virus/H.sapiens-wt/NGA/2016/ISTH_0017;Clade II)__AVO03567__GPC (opt5)
aggagaguccgcucagccagguugcagaagcggcuuagcguguguccuaaucuucucucugcguguagguaggccugugccgcaaacaagcuuaccaugggccagaucauuaccuucuuucaagaggugccccacgucaucgaagagguuaugaacauugugcugaucgcccucagccugcuugcuauucugaaggggaucuacaauguggccacaugcggacucuucggccuggucuccuuucuucugcucugugggagaucuugcagcacgaccuauaaaggaguguacgaacugcagacacuggagcucgacauggcgucccugaacaugaccaugccucuuucuuguacaaagaauaacagccaucacuauaucaugguuggcaaugaaaccgggcuggagcucacacugaccaacacguccauuaucaaucauaaauucugcaaccuuucugaugcucacaagaaaaaucuguacgaccaugcccucaugagcauuaucuccaccuuucaccugagcauuccgaacuucaaucaguaugaggccaugucuugugauuuuaacggaggcaagaucuccgugcaguacaaucugagccacacauaugcuauugacgccgcuaaccauugcggcaccaucgccaaugggguccuccaaacauucaugcggauggcguggggaggcucuuacaucgcccuggauuccgggaagggaagcugggacuguauuaugaccucuuaccaguaucuuaucauucagaacacgacaugggaagaucacugccaguuuucccgccccagcccuaucggcuaccuggggcuccugucccaaagaacccgggacauuuauaucucucgcagacuucugggaacauucaccuggacccucagcgauuccgagggcaacgaaacacccggcggguacugucugacgcgguggaugcugaucgaggcugagcucaaaugcuuuggaaauaccgccguggcuaaguguaacgaaaaacaugacgaggaguucugcgauaugcugcgccuuuuugacuucaauaagcaggccauuagacggcugaaaacagaagcgcagaugagcauccagcucauuaacaaggccguuaaugcucugaucaacgaucaacuuauuaugaagaaucaucugcgcgacaucaugggcaucccuuauugcaacuacucuaaauauugguaccucaaucacaccgugacagggaagaccucccugcccagauguuggcuggucagcaacggaucuuaccucaaugaaacgcacuucagcgacgauauugagcagcaggccgacaacaugaucacagagcugcuucaaaaagaauauauggaucggcagggcaagaccccucuggggcucguggaccuguuuguguucuccaccucuuuuuaccugauuagcaucuuccuucaccucguccgcauuccgacacauagacacguuaucggaaaacccugcccuaagccccaucggcugaaucacaugggcauuuguuccugcggccuguauaaacacccuggggugcccgugaaguggaagcgcugaggacuagucccuguucccagagcccacuuuuuuuucuuuuuuugaaauaaaauagccugucuuucagaucucaaaggcucuuuucagagccaccaaaaaaaaaaaaaaaaaaaaaaaaaaaaaaaaaaaaaaaaaaaaaaaaaaaaaaaaaaaaaaaaaaaaaaaaaaaaaaaaaaaaaaaaaaaaaaaaaaaaa

SEQ ID NO: 14517 - RNA, 1764 nt, Artificial Sequence
  mRNA product Design a-2 (hSL-A100) comprising derived and/or modified sequence from LASV(Lassa virus/H.sapiens-wt/NGA/2018/ISTH_0959;Clade II)__AVV65099__GPC (opt5)
aggagaguccgcucagccagguugcagaagcggcuuagcguguguccuaaucuucucucugcguguagguaggccugugccgcaaacaagcuuaccaugggccagaucauuaccuucuuucaagaggugccccacgucaucgaagagguuaugaacauugugcugaucgcccucagccugcuugcuauucugaaggggaucuacaauguggucacaugcggacucuucggccugguguccuuucuucugcucugugggagaucuugcagcacgaccuauaaaggaguuuacgaacugcagacacuggagcucgacauggccucccugaacaugaccaugccucuuucuuguacaaagaauaacagccaucacuauaucauggugggcaaugaaaccgggcuggagcucacacugaccaacacguccauuaucaaucauaaauucugcaaccuuucugaugcgcacaagaaaaaucuguacgaccaugcucucaugagcauuaucuccaccuuucaccugagcauuccgaacuucaaucaguaugaggccaugucuugugauuuuaacggaggcaagaucuccguccaguacaaucugagccacgccuaugcuauugacgccgcuaaccauugcggcacaaucgccaauggggugcuccaaaccuucaugcggauggcguggggaggcucuuacaucgcccuggauuccgggaagggaagcugggacuguauuaugacaucuuaccaguaucuuaucauucagaacaccacgugggaagaucacugccaguuuucccgccccagcccuaucggcuaccuggggcuccugucccaaagaacacgggacauuuauaucucucgcagacuucugggaaccuucacauggacccucagcgauuccgagggcaacgaaacccccggcggguacugucugacacgguggaugcugaucgaggcugagcucaaaugcuuuggaaauacggccguugcuaaguguaacgaaaaacaugacgaggaguucugcgauaugcugcgccuuuuugacuucaauaagcaggccauuagacggcugaaaaccgaagcgcagaugagcauccagcucauuaacaaggccgugaaugcucugaucaacgaucaacuuauuaugaagaaucaucugcgcgacaucaugggcaucccuuauugcaacuacucuaaauauugguaccucaaucacacagucaccgggaagacaucccugcccagauguuggcuggugagcaacggaucuuaccucaaugaaacccacuucagcgacgauauugagcagcaggccgacaacaugaucacggagcugcuucaaaaagaauauauugaucggcagggcaagacaccucuggggcucguggaccuguuugucuucuccaccucuuuuuaccugaucagcauuuuccuucaccucguuaaaaucccgacccaucgccacgugauuggaaagcccugcccuaaaccccauagacugaaucacaugggcaucuguuccugcggccuguauaagcacccuggggugcccgucaaguggaaacggugaggacuagucccuguucccagagcccacuuuuuuuucuuuuuuugaaauaaaauagccugucuuucagaucucaaaggcucuuuucagagccaccaaaaaaaaaaaaaaaaaaaaaaaaaaaaaaaaaaaaaaaaaaaaaaaaaaaaaaaaaaaaaaaaaaaaaaaaaaaaaaaaaaaaaaaaaaaaaaaaaaaaa

SEQ ID NO: 14518 - RNA, 1764 nt, Artificial Sequence
  mRNA product Design a-2 (hSL-A100) comprising derived and/or modified sequence from LASV(LASV003-NIG-2008;Clade II)__AIT17580__GPC (opt5)
aggagaguccgcucagccagguugcagaagcggcuuagcguguguccuaaucuucucucugcguguagguaggccugugccgcaaacaagcuuaccaugggccagaucauuaccuucuuucaagaggugccccacgucaucgaagagguuaugaacauugugcugaucgcccucagccugcuugcuauucugaaggggaucuacaauguggccacaugcggacucuucggccuggucuccuuucuucugcucugugggagaucuugcagcacgaccuauaaaggaguguacgaacugcagacacuggagcucgacauggcgucccugaacaugaccaugccucuuucuuguacaaagaauaacagccaucacuauaucaugguuggcaaugaaaccgggcuggagcucacacugaccaacacguccauuaucaaucauaaauucugcaaccuuucugaugcucacaagaaaaaucuguacgaccaugcccucaugagcauuaucuccaccuuucaccugagcauuccgaacuucaaucaguaugaggccaugucuugugauuuuaacggaggcaagaucuccgugcaguacaaucugagccacacauaugcugucgacgccgcuaaccauugcggcaccauugccaauggggugcuccaaacauucaugcggauggcguggggaggcucuuacaucgcccuggauuccgggaagggaagcugggacuguaucaugaccucuuaccaguaucuuauuauccagaacacgacaugggaagaucacugccaguuuucccgccccagcccuauuggcuaccuggggcuccugucccaaagaacccgggacaucuauauuucucgcagacuucugggaacauucaccuggacccucagcgauuccgagagcaacgaaacacccggcggcuacugucugacgcgguggaugcugaucgaggcugagcucaaaugcuuugggaauaccgccguugcuaaguguaacgaaaaacaugacgaggaguucugcgauaugcugcgccuuuuugacuucaauaagcaggccaucagacggcugaaagcggaagcccagaugucuauucagcucaucaacaaggcugugaaugcccugauuaacgaucaacuuaucaugaagaaucaucugcgcgacauuaugggaaucccuuauugcaacuacuccaaauauugguaccucaaucacacagucaccggcagaacaagccugccccgguguuggcuggugucuaacgggagcuaccucaaugaaacccacuucuccgacgauaucgagcagcaggcugacaacaugauuacggagcugcuucaaaaggaauauauggaucgccagggaaaaacaccucugggccucguggaccuguuugucuucucuaccagcuuuuaccugaucuccauuuuccuucaccucguuaagaucccgacccauagacacgugauugggaaacccugcccuaagccccaucggcugaaucacaugggaaucuguagcugcggccuguauaaacacccuggcgugcccgucaaguggaagcgcugaggacuagucccuguucccagagcccacuuuuuuuucuuuuuuugaaauaaaauagccugucuuucagaucucaaaggcucuuuucagagccaccaaaaaaaaaaaaaaaaaaaaaaaaaaaaaaaaaaaaaaaaaaaaaaaaaaaaaaaaaaaaaaaaaaaaaaaaaaaaaaaaaaaaaaaaaaaaaaaaaaaaa

SEQ ID NO: 14519 - RNA, 1764 nt, Artificial Sequence
  mRNA product Design a-2 (hSL-A100) comprising derived and/or modified sequence from LASV(LASV035-NIG-2009;Clade II)__AIT17588__GPC (opt5)
aggagaguccgcucagccagguugcagaagcggcuuagcguguguccuaaucuucucucugcguguagguaggccugugccgcaaacaagcuuaccaugggccagaucauuaccuucuuucaagaggugccccacgucaucgaagagguuaugaacauugugcugaucgcccucagccugcuugcuauucugaaggggaucuacaauguggccacaugcggacucuucggccuggucuccuuucuucugcucugugggagaucuugcagcacgaccuauaaaggaguguacgaacugcagacacuggagcucgacauggcgucccugaacaugaccaugccucuuucuuguacaaagaauaacagccaucacuauaucaugguuggcaaugaaaccgggcuggagcucacacugaccaacacguccauuaucaaucauaaauucugcaaccuuucugaugcucacaagaaaaaucuguacgaccaugcccucaugagcauuaucuccaccuuucaccugagcauuccgaacuucaaucaguaugaggccaugucuugugauuuuaacggaggcaagaucuccgugcaguacaaucugagccacgcuuaugccgucgacgcugccaaccauugcggcacaauugcgaauggggugcuccaaaccuucaugcggauggccuggggaggcucuuacaucgcucuggauuccgggaagggaagcugggacuguaucaugacaucuuaccaguaucuuauuauccagaacaccacgugggaagaucacugccaguuuucccgccccagcccuauuggcuaccuggggcuccugucccaaagaacacgggacaucuauauuucucgcagacuucugggaaccuucacauggacccucagcgauuccgagggcaacgaaacccccggcggguacugucugacacgguggaugcugaucgaggccgagcucaaaugcuuuggaaauacggcuguugccaaguguaacgaaaaacaugacgaggaguucugcgauaugcugcgccuuuuugacuucaauaagcaggcgaucagacggcugaaagccgaagcucagaugagcauucagcucaucaacaaggccgugaaugcucugauuaacgaucaacuuaucaugaagaaucaucugcgcgacauuaugggcaucccuuauugcaacuacucuaaauauugguaccucaaucacaccgucacagggaagaccucccugcccagauguuggcuggugagcaacggaucuuaccucaaugaaacacacuucagcgacgauaucgagcagcaggccgacaacaugauuaccgagcugcuucaaaaagaauauaucgaucggcagggcaagacgccucuggggcucguggaccuguuugucuucuccacaucuuuuuaccugauuagcaucuuccuucaccucguuaaaauuccgacccaucgccacgugaucggaaagcccugcccuaaaccccauagacugaaucacaugggcauuuguuccugcggccuguauaagcacccuggggugcccgucaaguggaaacggugaggacuagucccuguucccagagcccacuuuuuuuucuuuuuuugaaauaaaauagccugucuuucagaucucaaaggcucuuuucagagccaccaaaaaaaaaaaaaaaaaaaaaaaaaaaaaaaaaaaaaaaaaaaaaaaaaaaaaaaaaaaaaaaaaaaaaaaaaaaaaaaaaaaaaaaaaaaaaaaaaaaaa

SEQ ID NO: 14520 - RNA, 1764 nt, Artificial Sequence
  mRNA product Design a-2 (hSL-A100) comprising derived and/or modified sequence from LASV(LASV1000-NIG-2009;Clade II)__AIT17782__GPC (opt5)
aggagaguccgcucagccagguugcagaagcggcuuagcguguguccuaaucuucucucugcguguagguaggccugugccgcaaacaagcuuaccaugggccagaucauuaccuucuuucaagaggugccccacgucaucgaagagguuaugaacauugugcugaucgcccucagccugcuugcuauucugaaggggaucuacaauguggccacaugcggacucuucggccuggucuccuuucuucugcucugugggagaucuugcagcacgaccuauaaaggaguguacgaacugcagacacuggagcucgacauggcgucccugaacaugaccaugccucuuucuuguacaaagaauaacagccaucacuauaucaugguuggcaaugaaaccgggcuggagcucacacugaccaacacguccauuaucaaucauaaauucugcaaccuuucugaugcucacaagaaaaaucuguacgaccaugcccucaugagcauuaucuccaccuuucaccugagcauuccgaacuucaaucaguaugaggccaugucuugugauuuuaacggaggcaagaucuccgugcaguacaaucugagccacacauaugcugucgacgccgcuaaccauugcggcaccauugccaauggggugcuccaaacauucaugcggauggcguggggaggcucuuacaucgcccuggauuccgggaagggaagcugggacuguaucaugaccucuuaccaguaucuuauuauccagaacacgacaugggaagaucacugccaguuuucccgccccagcccuauuggcuaccuggggcuccugucccaaagaacccgggacaucuauauuucucgcagacuucugggaacauucaccuggacccucagcgauuccgagggcaacgaaacacccggcggguacugucugacgcgguggaugcugaucgaggcugagcucaaaugcuuuggaaauaccgccguugcuaaguguaacgaaaaacaugacgaggaguucugcgauaugcugcgccuuuuugacuucaauaagcaggccaucaaaagacugaagacagaagcgcagaugagcauucagcucaucaacaaggccgugaaugcucugauuaacgaucaacuuaucaugaaaaaucaucugcgggacauuaugggcaucccuuauugcaacuacucuaaguauugguaccucaaucacaccgucacagggaaaaccucccugccccgcuguuggcuggugagcaacggaucuuaccucaaugaaacgcacuucagcgacgauaucgagcagcaggccgacaacaugauuacagagcugcuucaaaaggaauauaucgauagacagggcaaaaccccucuggggcucguggaccuguuugucuucuccaccucuuuuuaccugauuagcaucuuccuucaccucguuaagauuccgacacaucggcacguggugggaaaacccugcccuaagccccaucgccugaaucacaugggcaucuguuccugcggccuguauaagcacccugggguccccgugaaauggaagagaugaggacuagucccuguucccagagcccacuuuuuuuucuuuuuuugaaauaaaauagccugucuuucagaucucaaaggcucuuuucagagccaccaaaaaaaaaaaaaaaaaaaaaaaaaaaaaaaaaaaaaaaaaaaaaaaaaaaaaaaaaaaaaaaaaaaaaaaaaaaaaaaaaaaaaaaaaaaaaaaaaaaaa

SEQ ID NO: 14521 - RNA, 1764 nt, Artificial Sequence
  mRNA product Design a-2 (hSL-A100) comprising derived and/or modified sequence from LASV(LASV221-NIG-2010;Clade II)__AIT17624__GPC (opt5)
aggagaguccgcucagccagguugcagaagcggcuuagcguguguccuaaucuucucucugcguguagguaggccugugccgcaaacaagcuuaccaugggccagaucauuaccuucuuucaagaggugccccacgucaucgaagagguuaugaacauugugcugaucgcccucagccugcuugcuauucugaaggggaucuacaauguggccacaugcggacucuucggccuggucuccuuucuucugcucugugggagaucuugcagcacgaccuauaaaggaguguacgaacugcagacacuggagcucgacauggcgucccugaacaugaccaugccucuuucuuguacaaagaauaacagccaucacuauaucaugguuggcaaugaaaccgggcuggagcucacacugaccaacacguccauuaucaaucauaaauucugcaaccuuucugaugcucacaagaaaaaucuguacgaccaugcccucaugagcauuaucuccaccuuucaccugagcauuccgaacuucaaucaguaugaggccaugucuugugauuuuaacggaggcaagaucuccgugcaguacaaucugagccacacauaugcuauugacgccgcuaaccauugcggcaccaucgccaaugggguccuccaaacauucaugcggauggcguggggaggcucuuacaucgcccuggauuccgggaagggaagcugggacuguauuaugaccucuuaccaguaucuuaucauucagaacacgacaugggaagaucacugccaguuuucccgccccagcccuaucggcuaccuggggcuccugucccaaagaacccgggacauuuauaucucucgcagacuucugggaacauucaccuggacccucagcgauuccgagggcaacgaaacacccggcggguacugucugacgcgguggaugcugaucgaggcugagcucaaaugcuuuggaaauaccgccguggcuaaguguaacgaaaaacaugacgaggaguucugcgauaugcugcgccuuuuugacuucaauaagcaggccauuagacggcugaaaacagaagcgcagaugagcauccagcucauuaacaaggccguuaaugcucugaucaacgaucaacuuauuaugaagaaucaucugcgcgacaucaugggcaucccuuauugcaacuacucuaaauauugguaccucaaucacaccgugacagggaagaccucccugcccagauguuggcuggucagcaacggaucuuaccucaaugaaacgcacuucagcgacgauauugagcagcaggccgacaacaugaucacagagaugcugcaaaaagaauauauggaucggcagggcaagaccccucuugggcugguggaccucuuuguguucuccaccucuuuuuaccugauuagcaucuuccugcaccuugucaaaauuccgacacaucgccacguuaucggaaagcccugcccuaaaccccauagacucaaucacaugggcauuuguuccugcggccuguauaagcacccuggggugcccgugaaguggaaacggugaggacuagucccuguucccagagcccacuuuuuuuucuuuuuuugaaauaaaauagccugucuuucagaucucaaaggcucuuuucagagccaccaaaaaaaaaaaaaaaaaaaaaaaaaaaaaaaaaaaaaaaaaaaaaaaaaaaaaaaaaaaaaaaaaaaaaaaaaaaaaaaaaaaaaaaaaaaaaaaaaaaaa

SEQ ID NO: 14522 - RNA, 1764 nt, Artificial Sequence
  mRNA product Design a-2 (hSL-A100) comprising derived and/or modified sequence from LASV(LASV237-NIG-2010;Clade II)__AIT17638__GPC (opt5)
aggagaguccgcucagccagguugcagaagcggcuuagcguguguccuaaucuucucucugcguguagguaggccugugccgcaaacaagcuuaccaugggccagaucauuaccuucuuucaagaggugccccacgucaucgaagagguuaugaacauugugcugaucgcccucagccugcuugcuauucugaaggggaucuacaauguggccacaugcggacucuucggccuggucuccuuucuucugcucugugggagaucuugcagcacgaccuauaaaggaguguacgaacugcagacacuggagcucgacauggcgucccugaacaugaccaugccucuuucuuguacaaagaauaacagccaucacuauaucaugguuggcaaugaaaccgggcuggagcucacacugaccaacacguccauuaucaaucauaaauucugcaaccuuucugaugcucacaagaaagaccuguacgaucaugcccucaugagcauuaucuccaccuuucaccugagcauuccgaauuucaaccaguaugaggccaugucuugugacuuuaauggaggcaagaucuccgugcaguacaaccugagccacacauaugcugucgaugccgcuaaucauugcggcaccauugccaacggggugcuccaaacauucaugcggauggcguggggaggcucuuacaucgcccuggacuccgggaagggaagcugggauuguaucaugaccucuuaccaguaucuuauuauccagaauacgacaugggaagaccacugccaguuuucccgccccagcccuauuggcuaccuggggcuccugucccaaagaacccgggauaucuauauuucucgcagacuucugggaacauucaccuggacccucagcgacuccgagggcaacgaaacacccggcggguacugucugacgcgguggaugcugaucgaggcugagcucaaaugcuuuggaaacaccgccguugcuaaguguaaugaaaaacaugaugaggaguucugcgacaugcugcgccuuuuugauuucaacaagcaggccaucagacggcugaaaacagaagcgcagaugagcauucagcucaucaauaaggccgugaacgcucugauuaaugaccaacuuaucaugaagaaccaucugcgcgacauuaugggcaucccuuauugcaauuacucuaaauauugguaccucaaccacaccgucacagggaagaccucccugcccagauguuggcuggugagcaauggaucuuaccucaacgaaacgcacuucagcgaugacaucgagcagcaggccgauaauaugauuacagagcugcuucaaaaagaauauauggaccggcagggcaagaccccucuggggcucguggaucuguuugucuucuccaccucuuuuuaccugaucagcauuuuccuucaccucaucaaaauuccgacacaucgccacaucaccggaaagcccugcccuaaaccccauagacugaaccacaugggcauuuguuccugcggccuguauaagcacccugggguucccgugaaguggaaacggugaggacuagucccuguucccagagcccacuuuuuuuucuuuuuuugaaauaaaauagccugucuuucagaucucaaaggcucuuuucagagccaccaaaaaaaaaaaaaaaaaaaaaaaaaaaaaaaaaaaaaaaaaaaaaaaaaaaaaaaaaaaaaaaaaaaaaaaaaaaaaaaaaaaaaaaaaaaaaaaaaaaaa

SEQ ID NO: 14523 - RNA, 1764 nt, Artificial Sequence
  mRNA product Design a-2 (hSL-A100) comprising derived and/or modified sequence from LASV(LASV253-NIG-2011;Clade II)__AIT17670__GPC (opt5)
aggagaguccgcucagccagguugcagaagcggcuuagcguguguccuaaucuucucucugcguguagguaggccugugccgcaaacaagcuuaccaugggccagaucauuaccuucuuucaagaggugccccacgucaucgaagagguuaugaacauugugcugaucgcccucagccugcuugcuauucugaaggggaucuacaauguggccacaugcggacucuucggccuggucuccuuucuucugcucugugggagaucuugcagcacgaccuauaaaggaguguacgaacugcagacacuggagcucgacauggcgucccugaacaugaccaugccucuuucuuguacaaagaauaacagccaucacuauaucaugguuggcaaugaaaccgggcuggagcucacacugaccaacacguccauuaucaaucauaaauucugcaaccuuucugaugcucacaagaaaaaucuguacgaccaugcccucaugagcauuaucuccaccuuucaccugagcauuccgaacuucaaucaguaugaggccaugucuugugauuuuaacggaggcaagaucuccgugcaguacaaucugagccacacauaugcugucgacgccgcuaaccauugcggcaccauugccaauggggugcuccaaacauucaugcggauggcguggggaggcucuuacaucgcccuggauuccgggaagggaagcugggacuguaucaugaccucuuaccaguaucuuauuauccagaacacgacaugggaagaucacugccaguuuucccgccccagcccuauuggcuaccuggggcuccugucccaaagaacccgggacaucuauauuucucgcagacuucugggaacauucaccuggacccucagcgauuccgagggcaacgaaacacccggcggguacugucugacgcgguggaugcugaucgaggcugagcucaaaugcuuuggaaauaccgccguugcuaaguguaacgaaaaacaugacgaggaguucugcgauaugcugcgccuuuuugacuucaauaagcaggccaucagacggcugaaagcggaagcccagaugagcauucagcucaucaacaaggcugugaaugcccugauuaacgaucaacuuaucaugaagaaucaucugcgcgacauuaugggcaucccuuauugcaacuacucuaaauauugguaccucaaucacacagucaccgggagaacaucccugccccgguguuggcuggugagcaacggaucuuaccucaaugaaacccacuucagcgacgauaucgagcagcaggcugacaacaugauuacggagcugcuucaaaaggaauauaucgaucgccagggcaaaacaccucuggggcucguggaccuguuugucuucuccaccucuuuuuaccugauuagcaucuuccuucaccucguuaagauuccgacccauagacacaucauuggaaaacccugcccuaagccccaucggcugaaucacaugggcaucuguuccugcggccuguauaaacacccuggggugcccgugaaguggaagcgcugaggacuagucccuguucccagagcccacuuuuuuuucuuuuuuugaaauaaaauagccugucuuucagaucucaaaggcucuuuucagagccaccaaaaaaaaaaaaaaaaaaaaaaaaaaaaaaaaaaaaaaaaaaaaaaaaaaaaaaaaaaaaaaaaaaaaaaaaaaaaaaaaaaaaaaaaaaaaaaaaaaaaa

SEQ ID NO: 14524 - RNA, 1764 nt, Artificial Sequence
  mRNA product Design a-2 (hSL-A100) comprising derived and/or modified sequence from LASV(LASV254-NIG-2011;Clade II)__AIT17674__GPC (opt5)
aggagaguccgcucagccagguugcagaagcggcuuagcguguguccuaaucuucucucugcguguagguaggccugugccgcaaacaagcuuaccaugggccagaucauuaccuucuuucaagaggugccccacgucaucgaagagguuaugaacauugugcugaucgcccucagccugcuugcuauucugaaggggaucuacaauguggccacaugcggacucuucggccuggucuccuuucuucugcucugugggagaucuugcagcacgaccuauaaaggaguguacgaacugcagacacuggagcucgacaugaccaaccugaauaugacaaugccucuuuccuguaccaagaacaauucucaucacuauaucaugguuggcaacgaaacagggcuggagcucacccugacgaauaccagcauuaucaaccauaaauucugcaaucuuuccgaugcgcacaagaaaaaccuguacaaucaugcucucaugucuauuaucagcacauuucaccuguccauuccgaacuucaaucaguaugaggccaugagcugugacuuuaacggaggcaagaucucugugcaguacaaucugucccacagcuaugccgucgaugcugccaaccauugcggcaccauugcuaacggggugcuccaaacauucaugcggauggccuggggaggcucuuacaucgcgcuggacuccgggaagggaaauugggauuguaucaugaccagcuaccaguaucuuauuauccagaacacgacaugggaagaccacugccaguuuucucgccccuccccuauuggcuaccuggggcuccugagccaaagaacccgggauaucuauauuucccgcagacuucugggaacauucaccuggacccucucugacagcgagggcaaugaaacacccggcggguacugucugacgcgguggaugcugaucgaggccgagcucaaaugcuuuggaaacaccgcuguugccaaguguaaugaaaaacaugaugaggaguucugcgacaugcugcgccuuuuugauuucaacaagcaggcuaucagacggcugaaaacagaagcccaggcgaauauucagcucaucaacaaggccgugaaugcucugauuaacgaccaacuuaucaugaagaaucaucugcgcgauauuaugggcaucccuuauugcaacuacuccaaauauugguaccucaaucacaccgucacagggaagaccagccugcccagauguuggcuggugucuaacggauccuaccucaaugaaacgcacuucagcgacgacaucgagcagcaggccgauaacaugauuacagagcugcuucaaaaagaauauauggaccggcagggcaagaccccucuggggcucguggaucuguuugucuucucuaccagcuuuuaccugaucuccauuuuccuucaccucguuaaaaucccgacacaucgccacgugauuggaaagcccugcccuaaaccccauagacugaaccacaugggcaucuguucuugcggccuguauaagcacccuggggugcccgucaaguggaaacggugaggacuagucccuguucccagagcccacuuuuuuuucuuuuuuugaaauaaaauagccugucuuucagaucucaaaggcucuuuucagagccaccaaaaaaaaaaaaaaaaaaaaaaaaaaaaaaaaaaaaaaaaaaaaaaaaaaaaaaaaaaaaaaaaaaaaaaaaaaaaaaaaaaaaaaaaaaaaaaaaaaaaa

SEQ ID NO: 14525 - RNA, 1764 nt, Artificial Sequence
  mRNA product Design a-2 (hSL-A100) comprising derived and/or modified sequence from LASV(Nig08-A19;Clade III)__ADU56618__GPC (opt5)
aggagaguccgcucagccagguugcagaagcggcuuagcguguguccuaaucuucucucugcguguagguaggccugugccgcaaacaagcuuaccaugggccagaucgugaccuucuuucaagaggucccccacguuauugaagaggugaugaacaucgugcugauugcccucagcauccuggcuauucuuaaggggcuguacaauaucgccacaugcggacucaucggccuggucacguuccuucugcucuccgggagaucuuguagcaugaccuauaaaggaguguacgaacugcagacacuggagcucaacaugaauacccugaacaugacaaugccucuuuccugcaccaagaauaacucucaucacuauauuaugguuggcaaugaaacagggcuggagcucacccugacgaacaccagccuucugcaucacaaauuuuguaaucucuccgacgcgcauaagaaaaaccuguacgaucacacacugaugucuaucauuagcaccuuccaccucuccaucccgaauuuuaaccaguaugaggcuaugagcugcgacuucaauggaggcaagauuacagugcaguacaaccugucucauuccuaugccaucgaugccgcuaaucacuguggcaccgucgccaacggggugcuucaaacguuuaugcggauggcuuggggaggcagcuacauugcccuggacucugggcgcggaaagugggauugcaucaugacauccuaccaguaucucaucauucagaacaccacaugggaagaccauugucaguucagcagacccucuccuaucggcuaccuggggcuucugucccaacggacccgcgauauuuauaucagcagacggcuccugggaaccuuuacauggacgcuguccgacucugagggcaaugaaacccccggcggguacugccucacacgcuggaugcugauugaggcggagcuuaaauguuucggaaacaccgccguugcuaagugcaaugaaaaacacgaugaggaauuuugugacaugcugagacucuucgauuuuaacaagcaggccauccggcgccugaaagcugaggcccagaugagcauccagcuuauuaauaaggcggugaacgcccugaucaaugaccaacucauuaugaagaaccaccugagagauaucaugggcauuccuuauugcaauuacuccaaauauugguaccugaaccauacaagcaccgggcggacgucucucccccgcugcuggcuggucuccaauggaagcuaccuuaacgaaacacacuucucugacgacaucgagcagcaggcugauaauaugaucaccgagaugcugcaaaaggaauaucucgacagacagggcaaaaccccucuggggcugguggaucuuuucguguuuagcacauccuucuaccucauuucuaucuuucugcaucuggucaagauuccgacccaccggcauaucguuggaaaacccuguccuaagccccaccgccucaaccacaugggcauuugcagcuguggccuguauaaacagccuggggugcccgugagauggaagcggugaggacuagucccuguucccagagcccacuuuuuuuucuuuuuuugaaauaaaauagccugucuuucagaucucaaaggcucuuuucagagccaccaaaaaaaaaaaaaaaaaaaaaaaaaaaaaaaaaaaaaaaaaaaaaaaaaaaaaaaaaaaaaaaaaaaaaaaaaaaaaaaaaaaaaaaaaaaaaaaaaaaaa

SEQ ID NO: 14526 - RNA, 1767 nt, Artificial Sequence
  mRNA product Design a-2 (hSL-A100) comprising derived and/or modified sequence from LASV(G1180-SLE-2010;Clade IV)__AIT17168__GPC (opt5)
aggagaguccgcucagccagguugcagaagcggcuuagcguguguccuaaucuucucucugcguguagguaggccugugccgcaaacaagcuuaccaugggccagaucgugaccuucuuucaagaggucccccacguuauugaagaggugaugaacaucgugcugauugcccucagcauccuggcuguccuuaaggggcuguacaauuucgccacaugcggacucgugggccugcuuacguuucugcuccugugugggagauccugcaccgcgucucgguauaaaggaguuuacgaacugcagacacucgagcugaacauggaaacccuuaauaugacaaugccucugagcuguaccaagaacaauucccaucacuauauuauggugggcaacgagacagggcucgagcugacccuuacgaauaccucuaucaucaaccauaaauucugcaaucugagcgacgcucacaagaaaaaccucuacgaucaugcccugauguccauuaucucuacauuucaccugagcauuccgaauuucaaccaguaugaagccauguccugugacuuuaauggaggcaagaucagcguccaguacaaccucucucacuccuaugcuggcgaugccgcuaaucauugcgggaccguggccaacggaguucugcaaacauucaugcgcauggcguggggcgggagcuacauugcccuugacucuggacacggcuccugggauuguaucaugaccagcuaccaguaucugauuauccagaacacgacaugggaggaccauugccaguuuucuagacccuccccuaucggguaccucggacugcuuagccaacggacccgcgauauuuauaucuccagacggcugcucggcacauucaccuggacccugucugacagcgaaggcaaggauacacccgggggauacugucugacgcgcuggaugcucauugaggcugagcugaaaugcuuuggcaauaccgccguggcuaaguguaacgaaaaacacgacgaggaguucugcgauaugcuuagacuguuugacuucaauaagcaggccauccagcggcucaaagcggaagcccagauguccauucaacugaucaacaaggcugucaaugcccuuaucaacgaucagcugauuaugaagaaucaccuccgcgacaucauggggauuccuuauugcaacuacagcaaauauugguaccugaaucauacaaccacaggaaagaccucucugcccaaauguuggcucguguccaacggcagcuaccugaaugaaacgcacuucucugacgauaucgagcagcaagcugacaacaugauuacagagaugcuucagaaggaauauauggagagacaggggaaaaccccucugggacucguggaucuguuugucuucagcaccuccuuuuaccugaucucuaucuuccuucaucucguuaagauuccgacacaccggcauaucgugggcaaaagcugccccaagccucaccgccugaaucacaugggcauuuguuccugcgggcuguauaagcagcccggagugccugucaaauggaagagaugaggacuagucccuguucccagagcccacuuuuuuuucuuuuuuugaaauaaaauagccugucuuucagaucucaaaggcucuuuucagagccaccaaaaaaaaaaaaaaaaaaaaaaaaaaaaaaaaaaaaaaaaaaaaaaaaaaaaaaaaaaaaaaaaaaaaaaaaaaaaaaaaaaaaaaaaaaaaaaaaaaaaa

SEQ ID NO: 14527 - RNA, 1767 nt, Artificial Sequence
  mRNA product Design a-2 (hSL-A100) comprising derived and/or modified sequence from LASV(G1442-SLE-2011;Clade IV)__AIT17180__GPC (opt5)
aggagaguccgcucagccagguugcagaagcggcuuagcguguguccuaaucuucucucugcguguagguaggccugugccgcaaacaagcuuaccaugggccagaucgugaccuucuuucaagaggucccccacguuauugaagaggugaugaacaucgugcugauugcccucagcauccuggcuguccuuaaggggcuguacaauguggccacaugcggacucauuggccugguuacguuccuucugcucugugggagauccugcaccacaacccuguauaaaggaguguacgaacugcagacacucgagcugaacauggaaacccuuaauaugacaaugccucugucuuguaccaagaacaauagccaucacuauauccgggucggcaacgagacggggcucgagcugacccuuacaaauaccuccaucauuaaccauaaauuuugcaaucugucugacgcgcacaagaaaaaccucuacgaucaugcucugaugagcaucauuuccacauuccaccugucuaucccgaauuuuaaccaguaugaagccaugagcugugacuucaauggaggcaagauuuccgugcaguacaaccucagccacucuuaugccggcgaugcugccaaucauugcgggaccguugcuaacggagugcugcaaacguuuaugcgcauggccuggggcggguccuacaucgcgcuugacagcggaagaggcaacugggauuguauuaugacaucuuaccaguaucugaucauccagaauaccacaugggacgaucacugccaguucucccggcccagcccuauuggguaccucggacugcuuucucaacgcaccagagacgucuauaucucccggcgccugcucggcaccuuuacauggacgcugagcgauuccgagggcaaggacacccccgggggauacugucugacaagauggaugcucauugaagccgagcugaaaugcuucggcaacaccgcuguggccaaguguaaugagaaacaugaugaagaguuuugcgacaugcuucggcuguucgauuuuaacaagcaggcuauccagcgccucaaagccgaagcgcagaugucuauucaacugaucaauaaggccgugaacgcucuuaucaaugaccagcugauuaugaagaaccaccucagagacaucauggggauuccuuauugcaauuacagcaaauauugguaccugaacaauacagccaccggaaagacgucccugcccaaauguuggcucaucagcaacggcucuuaccugaaugagacacacuucuccgaugacauugaacaggaggcugauaacaugaucaccgagaugcuucaaaaggaauauauggagcggcaggggaaaaccccucugggacucgucgaccuguucguuuuuagcacaucuuucuaccugaucagcauuuuucuucaucucgugaagaucccgacccaccgccauauugugggcaaauccugccccaagccucacagacugaaucauaugggcaucuguucuugcgggcuguauaagcagcccggagucccugugcgguggaaacgcugaggacuagucccuguucccagagcccacuuuuuuuucuuuuuuugaaauaaaauagccugucuuucagaucucaaaggcucuuuucagagccaccaaaaaaaaaaaaaaaaaaaaaaaaaaaaaaaaaaaaaaaaaaaaaaaaaaaaaaaaaaaaaaaaaaaaaaaaaaaaaaaaaaaaaaaaaaaaaaaaaaaaa

SEQ ID NO: 14528 - RNA, 1767 nt, Artificial Sequence
  mRNA product Design a-2 (hSL-A100) comprising derived and/or modified sequence from LASV(G3010-SLE-2013;Clade IV)__AIT17344__GPC (opt5)
aggagaguccgcucagccagguugcagaagcggcuuagcguguguccuaaucuucucucugcguguagguaggccugugccgcaaacaagcuuaccaugggccagaucgugaccuucuuucaagaggucccccacguuauugaagaggugaugaacaucgugcugauugcccucagcauccuggcuguccuuaaggggcuguacaauuucgccacaugcggacucgugggccugguuacguuucuucugcucugugggagauccugcaccacaucucuguauaaaggaguguacgaacugcagacccucgagcugaacauggaaacacuuaauaugaccaugccucugagcuguacaaagaacaauucccaucacuauauuauggucggcaacgagaccgggcucgagcugacgcuuaccaauacaucuaucaucaaccauaaauucugcaaucugagcgacgcgcacaagaaaaaccucuacaaucaugcucugauguccauuaucucuaccuuucaccugagcauuccgaacuucaaucaguaugaagccauguccugugauuuuaacggaggcaagaucagcgugcaguacaaucucucucacuccuaugccggcgacgcugccagccauugcgggacaguugcuaacggagugcugcaaaccuucaugcggauggccuggggcgggucuuacauugcgcuugauuccggauacggcaagugggacuguaucaugacgagcuaucaguaccugauuauccagaacacaaccugggaggaucacugccaguuuucucgccccuccccuaucggguaucucggacugcuuagccaaagaacacgggacauuuacaucucccgcagacugcucggcaccuucaccuggacacugucugauagcgaaggcaaagacacgcccgggggauauugucugacccgguggaugcucauugaggccgagcugaagugcuuuggcaauacagcugucgccaaauguaacgaaaagcaugaugaggaguucugcgacaugcuucgccuguuugauuucaauaaacaggcuauccagagacucaagaccgaagcccagauguccauucaacugaucaacaaggcggugaaugcccuuaucaacgaccagcugauuaugaaaaaucaccuccgggauaucauggggauuccuuacugcaacuauagcaaguacugguaccugaaucacacaaccacgggaaaaacaucucugcccaaguguuggcucguguccaacggcagcuaucugaaugaaacccauuucucugacgacaucgagcagcaagcugauaacaugauuaccgagaugcuucagaaagaauacauggagcgccaggggaagacaccucugggacucgucgaccuguuuguuuucagcaccuccuuuuaucugaucucuaucuuccuucaccucgugaaaauuccgacacauagacacaucgugggcaagagcugccccaagccucaucggcugaaucacaugggcauuuguuccugcgggcuguacaaacagcccggagucccugugcgcuggaagagaugaggacuagucccuguucccagagcccacuuuuuuuucuuuuuuugaaauaaaauagccugucuuucagaucucaaaggcucuuuucagagccaccaaaaaaaaaaaaaaaaaaaaaaaaaaaaaaaaaaaaaaaaaaaaaaaaaaaaaaaaaaaaaaaaaaaaaaaaaaaaaaaaaaaaaaaaaaaaaaaaaaaaa

SEQ ID NO: 14529 - RNA, 1767 nt, Artificial Sequence
  mRNA product Design a-2 (hSL-A100) comprising derived and/or modified sequence from LASV(G502-SLE-2009;Clade IV)__AIT17126__GPC (opt5)
aggagaguccgcucagccagguugcagaagcggcuuagcguguguccuaaucuucucucugcguguagguaggccugugccgcaaacaagcuuaccaugggccagaucgugaccuucuuucaagaggucccccacguuauugaagaggugaugaacaucgugcugauugcccucagcauccuggcuguccuuaaggggcuguacaauuucgccacaugcggacucgugggccugcuuacguuucugcuccugugugggagauccugcaccacaggacuguauaaaggcguuuacgaacuccagacccuggagcuuaacauggaaacacugaauaugaccaugccucucucuuguacaaagaacaauagccaucacuauauuaugguggggaacgagaccggacuggagcuuacgcugaccaauacauccaucaucaaccauaaauucugcaaucucucugacgcgcacaagaaaaaccuguacgaucaugcucugaugagcauuaucuccaccuuucaccucucuauuccgaauuucaaccaguaugaagccaugagcugugacuuuaauggcggcaagaucuccguccaguacaaccugagccacucuuaugccggggaugcugccgaccauugcggaacaguggcuaauggcguucuucaaaccuucaugcggauggccuggggaggguccuacauugcgcuggauagcggccgcgggagaugggacuguaucaugacgucuuaccaguaucucauuauccagaacacaaccugggaggaucacugccaguuuucccggcccagcccuaucggauaccugggccuucugucucaacgcacaagagacauuuauaucucccggcgccuccugggcaccuucaccuggacacugagcgauuccgaagggaaggacacgcccggaggcuacugucucaccagauggaugcugauugaggccgagcuuaaaugcuuugggaacacagcuguggccaaguguaaugaaaaacaugaugaggaguucugcgacaugcugcggcucuuugauuucaacaagcaggcuauccagcgccugaaagccgaagcgcagaugucuauucaacuuaucaauaaggccgucaacgcucugaucaaugaccagcucgugaugaagaaccaccugagagacauuaugggaaucccuuauugcaauuacagccgguauugguaccugaaccacaccacaaccggccgcacgucccuccccaaauguuggcuggugagcaaugggucuuaccuuaacgaaacacauuucuccgaugacauugagcagcaagccgauaauaugaucaccgagaugcugcagaaggaauauauggagagacagggaaaaaccccucucggccuggucgaccuguuuguuuucagcacaucuuuuuaccuuauuagcaucuuccuccaccuggugaagaucccgacccaucggcacauugugggcaaauccugccccaagccucaucgccugaaccacauggggaucuguucuugcggacucuauaaacagcccggcgucccugugaaguggaagagaugaggacuagucccuguucccagagcccacuuuuuuuucuuuuuuugaaauaaaauagccugucuuucagaucucaaaggcucuuuucagagccaccaaaaaaaaaaaaaaaaaaaaaaaaaaaaaaaaaaaaaaaaaaaaaaaaaaaaaaaaaaaaaaaaaaaaaaaaaaaaaaaaaaaaaaaaaaaaaaaaaaaaa

SEQ ID NO: 14530 - RNA, 1767 nt, Artificial Sequence
  mRNA product Design a-2 (hSL-A100) comprising derived and/or modified sequence from LASV(G733-SLE-2010;Clade IV)__AIT17154__GPC (opt5)
aggagaguccgcucagccagguugcagaagcggcuuagcguguguccuaaucuucucucugcguguagguaggccugugccgcaaacaagcuuaccaugggccagaucgugaccuucuuucaagaggucccccacguuauugaagaggugaugaacaucgugcugauugcccucagcauccuggcuguccuuaaggggcuguacaauuucgccacaugcggaauugugggccucguuuccuuucugcuucugugugggagaucuugcacgaccagccucuauaaaggaguguacgaacugcagacacuggagcucaacauggaaacccugaauaugacaaugccucuuuccuguaccaagaacaauucucaucacuauaucauggucggcaacgagacagggcuggagcucacccugacgaauaccagcaucauuaaccauaaauucugcaaucuuuccgacgcgcacaagaaaaaccuguacgaucaugcucucaugucuaucauuagcacauuucaccuguccaucccgaauuucaaccaguaugaagccaugagcugugacuuuaauggaggcaagauuucugugcaguacaaccugucccacagcuaugccggcgaugcugccaaucauugcgggaccaucgcuaacggaguucuccaaacauucaugcggauggccuggggcgggucuuacauugcgcuggacuccggacgcgauagaugggacuguaucaugaccagcuaccaguaucuuaucauucagaacacgacaugggaggaucacugccaguuuucucggcccuccccuaucggcuaccuggggcuccugagccaacgcaccagagacauuuauaucucccggcgccuucugggaacauucaccuggacccucucugauagcgaaggcaaggacacacccggcggguacugucugacgagauggaugcugauugaggccgagcucaaaugcuuuggaaauaccgcuguggccaaguguaacgaaaaacaugaugaggaguucugcgacaugcugcggcuuuuugauuucaauaagcaggcuauccagcgccugaaagccgaagcgcagauguccauccaacucauuaacaaggccgucaaugcucugaucaacgaccagcuuauuaugaagaaucaccugagagacaucaugggcauuccuuauugcaacuacagcaaauauugguaccucaaucacacaaccacagggaagaccucucugcccaaauguuggcugguguccaacggaagcuaccucaaugaaacgcauuucucugaugacaucgagcagcaagccgauaacaugaucacagagaugcugcagaaggaauauauggagcggcagggcaaaaccccucuugggcugguggaccucuuugucuucagcaccuccuuuuaccugauuucuaucuuccugcaccuuguuaagauuccgacacaucgccacguggugggaaaaagcugccccaagccucauagacucaaucacaugggcaucuguuccugcggccuguaugggcagcccggagucccugugaaguggaaacggugaggacuagucccuguucccagagcccacuuuuuuuucuuuuuuugaaauaaaauagccugucuuucagaucucaaaggcucuuuucagagccaccaaaaaaaaaaaaaaaaaaaaaaaaaaaaaaaaaaaaaaaaaaaaaaaaaaaaaaaaaaaaaaaaaaaaaaaaaaaaaaaaaaaaaaaaaaaaaaaaaaaaa

SEQ ID NO: 14531 - RNA, 1767 nt, Artificial Sequence
  mRNA product Design a-2 (hSL-A100) comprising derived and/or modified sequence from MOPV/LASV reassortant(IGS-1;Clade IV)__AFY05576__GPC (opt5)
aggagaguccgcucagccagguugcagaagcggcuuagcguguguccuaaucuucucucugcguguagguaggccugugccgcaaacaagcuuaccaugggccagaucgugaccuucuuucaagaggucccccacguuauugaagaggugaugaacaucgugcugauugcccucagcguccuggcugugcuuaaggggcuguacaauuucgccacaugcggacucguuggccuggugacguuucuucugcucugugggagauccugcaccacaucucuguauaaaggagucuacgaacugcagacccucgagcugaacauggaaacacuuaauaugaccaugccucugagcuguacaaagaacaauucccaucacuauaucauggugggcaacgagaccgggcucgagcugacgcuuaccaauacaucuauuaucaaccauaaauucugcaaucugagcgacgcgcacaagaaaaaccucuacgaucaugcucugauguccaucauuucuaccuuucaccugagcaucccgaauuucaaccaguaugaagccauguccugugacuuuaauggaggcaagauuagcguucaguacaaccucucucacuccuaugccggcgaugcugccaaucauugcgggacaguggcuaacggaguccugcaaaccuucaugcggauggccuggggcgggagcuacaucgcgcuugacucuggacgcggcaacugggauuguauuaugacguccuaccaguaucugaucauucagaauacaaccugggaggaccacugccaguuuagcagacccucuccuaucggguaccucggacugcuuucccaacggacacgcgauaucuauauuagcagacggcugcucggcaccuucaccuggacacuguccgacucugaaggcgaggauacgcccgggggauacugucugacccgcuggaugcucaucgaggccgaacugaagugcuuuggcaacacagcuguggccaaauguaaugagaagcaugacgaagaguucugcgauaugcuuagacuguuugacuucaacaaacaggcuauucagcggcucaaggccgaagcgcagaugagcauccaacugauuaauaaagccgugaacgcucuuaucaaugaucagcugaucaugaagaaccaccuccgcgacauuauggggaucccuuauugcaauuacuccaaguauugguaccugaaccacaccacaaccggaagaacgagccugcccaaauguuggcucgucucuaauggcuccuaccugaacgagacacauuucagcgacgauauugagcagcaagccgacaauaugaucaccgaaaugcuucagaaggaguauauggaacggcaggggaaaaccccucugggacucguugaucuguuuguguucucuaccagcuuuuaccugauuuccaucuuccuucaccucgugaagaucccgacacaucgccacauugucggcaaaucuugccccaagccucauagacugaaccacaugggcaucuguagcugcgggcuguauaaacagcccggagugccuguuaaguggaagcggugaggacuagucccuguucccagagcccacuuuuuuuucuuuuuuugaaauaaaauagccugucuuucagaucucaaaggcucuuuucagagccaccaaaaaaaaaaaaaaaaaaaaaaaaaaaaaaaaaaaaaaaaaaaaaaaaaaaaaaaaaaaaaaaaaaaaaaaaaaaaaaaaaaaaaaaaaaaaaaaaaaaaa

SEQ ID NO: 14532 - RNA, 1767 nt, Artificial Sequence
  mRNA product Design a-2 (hSL-A100) comprising derived and/or modified sequence from LASV(LM765-SLE-2012;Clade IV)__AIT17814__GPC (opt5)
aggagaguccgcucagccagguugcagaagcggcuuagcguguguccuaaucuucucucugcguguagguaggccugugccgcaaacaagcuuaccaugggccagaucgugaccuucuuucaagaggucccccacguuauugaagaggugaugaacaucgugcugauugcccucagcauccuggcuguccuuaaggggcuguacaauuucgccacaugcggacucgugggccugguuacguuucuucugcucugugggagauccugcaccacaucucuguauaaaggaguguacgaacugcagacccucgagcugaacauggaaacacuuaauaugaccaugccucugagcuguacaaagaacaauucccaucacuauauuauggucggcaacgagaccgggcucgagcugacgcuuaccaauacaucuaucaucgaccauaaauucugcaaccugagcgaugcgcaccggaagaaucucuacgaccaugcucugauguccauuaucucuaccuuucaccugagcauuccgaacuucaaucaguaugaagccauguccugugauuuuaacggaggcaaaaucagcgugcaguacaaucucucucacuccuaugccaaggacgcugccgaucauugcggcacaguugcuaacggggugcugcaaaccuucaugcgcauggccuggggaggcagcuacauugcgcuugacucugggagaggacggugggauuguaucaugacguccuaccaguaucugauuauccagaauacaaccugggaggaccacugccaguuuagccgccccucuccuaucggcuaccucgggcugcuuucccaaagaacacgggauauuuauaucagccgcagacugcucggaaccuucaccuggacacuguccgacucugaaggcaaggauacgcccggcggguacugucugacccgguggaugcucauugaggccgagcugaaaugcuuuggaaacacagcugucgccaaguguaacgaaaaacaugacgaggaguucugcgauaugcuucgccuguuugacuucaauaagcaggcuauccagagacucaaagccgaagcgcagaugagcauucaacugaucaacaaggccgugaaugcucuuaucaacgaccagcugauuaugaagaaucaccuccgggauaucaugggcauuccuuauugcaacuacuccaaauauugguaccugaaucacaccacaaccgggaagacgagccugcccaaauguuggcucgugucuaacggauccuaccugaaugaaacacauuucagcgacgauaucgagcagcaagccgacaacaugauuaccgagaugcuucagaaggaauauauggagcgccagggcaaaaccccucuggggcucgucgaucuguuuguuuucucuaccagcuuuuaccugaucuccaucuuccuucaccucgugaagauuccgacacauagacacaucgugggaaaacccugcccuaagccccaucggcugaaucacaugggcauuuguucuugcggccuguauaagcagccugggguccccgugaaauggaagcgcugaggacuagucccuguucccagagcccacuuuuuuuucuuuuuuugaaauaaaauagccugucuuucagaucucaaaggcucuuuucagagccaccaaaaaaaaaaaaaaaaaaaaaaaaaaaaaaaaaaaaaaaaaaaaaaaaaaaaaaaaaaaaaaaaaaaaaaaaaaaaaaaaaaaaaaaaaaaaaaaaaaaaa

SEQ ID NO: 14533 - RNA, 1767 nt, Artificial Sequence
  mRNA product Design a-2 (hSL-A100) comprising derived and/or modified sequence from LASV(LM776-SLE-2012;Clade IV)__AIT17824__GPC (opt5)
aggagaguccgcucagccagguugcagaagcggcuuagcguguguccuaaucuucucucugcguguagguaggccugugccgcaaacaagcuuaccaugggccagaucgugaccuucuuucaagaggucccccacguuauugaagaggugaugaacaucgugcugauugcccucagcauccuggcuguccuuaaggggcuguacaauuucgccacaugcggacucgugggccugguuacguuucuucugcucugugggagauccugcaccacaucuguguauaaaggagucuacgaacugcagacccuggagcucaacauggaaacacugaauaugaccaugccucuuagcuguacaaagaacaauucccaucacuauauuauggugggcaacgagaccgggcuggagcucacgcugaccaauacaucuaucaucaaccauaaauucugcaaucuuagcgacgcgcacaagaaaaaccuguacgaucaugcucucauguccauuaucucuaccuuucaccugagcauuccgaauuucaaccaguaugaagccauguccugugacuuuaauggaggcaagaucagcguucaguacaaccugucucacuccuaugccggcgaugcugccaaucauugcgggacaguggcuaacggaguccuccaaaccuucaugcggauggccuggggcgggagcuacauugcgcuggacucuggacacggcaagugggauuguaucaugacguccuaccaguaucuuauuauccagaacacaaccugggaggaccauugccaguuuagccgccccucuccuaucggguaccugggacuccugucccaaagaacacgggauauuuauaucagccgcagacuucugggcaccuucaccuggacacucuccgacucugaaggcaaagauacgcccgggggauacugucugacccgguggaugcugauugaggccgagcucaagugcuuuggcaauacagcuguggccaaauguaacgaaaagcacgacgaggaguucugcgauaugcugcgccuuuuugacuucaauaaacaggcuauccagagacugaaggccgaagcgcagaugagcauucaacucaucaacaaggccgugaaugcucugaucaacgaucagcuuauuaugaaaaaucaucugcgggacaucauggggauuccuuauugcaacuacuccaaguauugguaccucaaucacaccacaaccggaaaaacgagccugcccaaguguuggcuggucucuaacggcuccuaccucaaugaaacacacuucagcgacgauaucgagcagcaagccgacaacaugauuaccgagaugcugcagaaagaauauauggagcgccaggggaagaccccucuuggacugguugaucucuuuguguucucuaccagcuuuuaccugaucuccaucuuccugcaucuugugaaaauuccgacacacagacauaucgucggcaagucuugccccaagccucaccggcucaaucacaugggcauuuguagcugcgggcuguauaaacagcccggagugccuguucgcuggaagagaugaggacuagucccuguucccagagcccacuuuuuuuucuuuuuuugaaauaaaauagccugucuuucagaucucaaaggcucuuuucagagccaccaaaaaaaaaaaaaaaaaaaaaaaaaaaaaaaaaaaaaaaaaaaaaaaaaaaaaaaaaaaaaaaaaaaaaaaaaaaaaaaaaaaaaaaaaaaaaaaaaaaaa

SEQ ID NO: 14534 - RNA, 1767 nt, Artificial Sequence
  mRNA product Design a-2 (hSL-A100) comprising derived and/or modified sequence from LASV(Mad39;Clade IV)__ANH09722__GPC (opt5)
aggagaguccgcucagccagguugcagaagcggcuuagcguguguccuaaucuucucucugcguguagguaggccugugccgcaaacaagcuuaccaugggccagaucgugaccuucuuucaagaggucccccacguuauugaagaggugaugaacaucgugcugauugcccucagcauccuggcuguccuuaaggggcuguacaauguggccacaugcggacucauuggccugguuacguuccuucugcucugugggagauccugcaccacaacccuguauaaaggaguguacgaacugcaggcgcucgagcugaacauggaaacacuuaauaugaccaugccucugucuuguacaaagaacaauagccaucacuauauccgggucggcaacgagaccgggcucgagcugacgcuuaccaauacaucccugaucaaccauaaauuuugcaaucucucugacgcucacaagaaaaaccuguacgaucaugcccugaugagcauuaucuccaccuuccaccucucuauuccgaauuuuaaccaguaugaagccaugagcugugacuucaaugauggaaagaucuccgugcaguacaaccugagccacacauaugcuggcgacaccgccaaucauugcggcacgguugcuaacggggugcuucaaacauuuaugcgcauggccuggggaggcucuuacauugcgcuggauuccgggagaggaggcugggacuguaucaugaccagcuaccaguaucucauuauccagaacacaaccugggaggaucacugccaguucucucggcccuccccuaucggguaccugggacuucugagccaacgcaccagagacauuuauaucucucggcgccuccugggcacauuuacguggacccuguccgauagcgaaggcaaggacacacccgggggauacugucucaccagauggaugcugauugaggccgagcuuaaaugcuucggcaauacagcugucgccaaguguaacgaaaaacaugaugaggaauuuugcgacaugcugcgccucuucgauuuuaauaagcaggcuauccagcggcugaaagccgaggcgcagauguccauucaacuuaucaacaaggccgugaaugcucugaucaacgaccagcucauuaugaagaaucaccugagagacaucauggggauuccuuauugcaacuacucuaaauauugguaccugaaucacaccgugacgggaaagacaagccuccccaaauguuggcuggucuccaacggcagcuaccuuaaugaaacccauuucucugaugacaucgagcagcaagccgauaacaugauuaccgagaugcugcagaaggaauauauggagcggcaggggaaaacaccucucggacugguugaccuguucguguuuuccaccagcuucuaccuuaucucuaucuuucuccaccuggugaagauuccgacacaucgccacgucgugggcaaacccugcccuaagccccauagacugaaucacaugggcaucuguagcugcggguucuauaagcagccuggaguucccgugcgguggaaacgcugaggacuagucccuguucccagagcccacuuuuuuuucuuuuuuugaaauaaaauagccugucuuucagaucucaaaggcucuuuucagagccaccaaaaaaaaaaaaaaaaaaaaaaaaaaaaaaaaaaaaaaaaaaaaaaaaaaaaaaaaaaaaaaaaaaaaaaaaaaaaaaaaaaaaaaaaaaaaaaaaaaaaa

SEQ ID NO: 14535 - RNA, 1767 nt, Artificial Sequence
  mRNA product Design a-2 (hSL-A100) comprising derived and/or modified sequence from LASV(Z0947-SLE-2011;Clade IV)__AIT17840__GPC (opt5)
aggagaguccgcucagccagguugcagaagcggcuuagcguguguccuaaucuucucucugcguguagguaggccugugccgcaaacaagcuuaccaugggccagaucgugaccuucuuucaagaggucccccacguuauugaagaggugaugaacaucgugcugauugcccucagcauccuggcuguccuuaaggggcuguacaauuucgccacaugcggacucgugggccugguuacguuucuucugcucugugggagauccugcaccauuucucuguauaaaggaguguacgaacugcagacacucgagcugaacauggaaacccuuaauaugacaaugccucugagcuguaccaagaacaauucccaucacuauaucauggucggcaacgagacagggcucgagcugacccuuacgaauaccucuaucauuaaccauaaauucugcaaucugagcgacgcgcacaagaaaaaccucuacgaucaugcucugauguccaucauuucuacauuucaccugagcaucccgaauuucaaccaguaugaagccauguccugugacuuuaauggaggcaagauuagcgugcaguacaaccucucucacuccuaugccggcgaugcugccaaucauugcgggaccguugcuaacggagugcugcaaacauucaugcggauggccuggggcgggagcuacaucgcgcuugacucuggacgcgauagaugggacuguauuaugaccuccuaccaguaucugaucauccagaacacgacaugggaggaucacugccaguuuagccggcccucuccuauuggcuaccucgggcugcuuucccaacgcaccagagacaucuauauuagccggcgccugcucggaacauucaccuggacccuguccgauucugaaggcaaggacacacccggcggguacugucugacgagauggaugcucaucgaggccgagcugaaaugcuuuggaaauaccgcugucgccaaguguaacgaaaaacaugaugaggaguucugcgacaugcuucggcuguuugauuucaauaagcaggcuauucagcgccucaaagccgaagcgcagaugagcauccaacugaucaacaaggccgugaaugcucuuauuaacgaccagcugaucaugaagaaucaccucagagacauuaugggcaucccuuauugcaacuacuccaaauauugguaccugaaucacacaaccacagggaagaccagccugcccaaauguuggcucgugucuaacggauccuaccugaaugaaacgcauuucagcgaugacauugagcagcaagccgauaacaugaucacagagaugcuucagaaggaauauauggagcggcagggcaaaaccccucuggggcucgucgaccuguuuguuuucucuaccagcuuuuaccugaucuccauuuuccuucaccucgugaagaucccgacacaucgccacauugugggaaaacccugcccuaagccccauagacugaaucacaugggcaucuguucuugcggccuguauaagcagccugggguccccgugaaauggaagcggugaggacuagucccuguucccagagcccacuuuuuuuucuuuuuuugaaauaaaauagccugucuuucagaucucaaaggcucuuuucagagccaccaaaaaaaaaaaaaaaaaaaaaaaaaaaaaaaaaaaaaaaaaaaaaaaaaaaaaaaaaaaaaaaaaaaaaaaaaaaaaaaaaaaaaaaaaaaaaaaaaaaaa

SEQ ID NO: 14536 - RNA, 1743 nt, Artificial Sequence
  mRNA product Design a-2 (A100) comprising derived and/or modified sequence from LASV(Josiah;Clade IV)__NP_694870__GPC (opt1)
aggagaguccgcucagccagguugcagaagcggcuuagcguguguccuaaucuucucucugcguguagguaggccugugccgcaaacaagcuuaccaugggccagaucgugaccuucuuccaggaggucccccacgugaucgaggaggugaugaacaucguccugaucgcccucagcgugcuggccgugcugaaggggcucuacaacuucgcgaccugcggccuggucgggcuggugacguuccuccugcugugcggccgcuccugcaccaccagccucuacaaggggguguacgagcugcagacccuggagcucaacauggagacgcugaacaugaccaugccgcuguccugcaccaagaacaacagccaccacuacaucauggucggcaacgagaccggccucgagcugacgcugaccaacaccuccaucaucaaccacaaguucugcaaccucagcgacgcccacaagaagaaccuguacgaccacgcccugauguccaucaucagcaccuuccaccucuccauccccaacuucaaccaguacgaggccaugagcugcgacuucaacgggggcaagaucuccgugcaguacaaccugagccacuccuacgccggggacgcggccaaccacugcggcacgguggccaacgggguccugcagaccuucaugcggauggccuggggcggcagcuacaucgcgcucgacuccgggcgcggcaacugggacugcaucaugaccagcuaccaguaccugaucauccagaacaccacgugggaggaccacugccaguucucccggcccagccccaucggguaccugggccuccugucccagcgcacccgggacaucuacaucagccgccggcugcucggcaccuucaccuggacgcugagcgacuccgaggggaaggacaccccgggcggguacugccugacccgcuggaugcucaucgaggccgagcugaagugcuucggcaacaccgccguggccaagugcaacgagaagcacgacgaggaguucugcgacaugcugcggcuguucgacuucaacaagcaggccauccagcgccugaaggcggaggcccagaugagcauccagcugaucaacaaggccgugaacgcccucaucaacgaccagcugaucaugaagaaccaccuccgggacaucauggggauccccuacugcaacuacuccaaguacugguaccucaaccacacgaccaccggccgcaccagccugcccaagugcuggcuggucuccaacggcagcuaccucaacgagacgcacuucuccgacgacaucgagcagcaggccgacaacaugaucaccgagaugcugcagaaggaguacauggagcggcaggggaagacgccccugggccucguggaccuguucguguucagcaccuccuucuaccugaucagcaucuuccugcaccucgucaagaucccgacccaccgccacaucguggggaaguccugccccaagccccaccggcugaaccacaugggcaucugcagcugcgggcuguacaagcagcccggcgugccggucaaguggaagcgcugaggacuagucccuguucccagagcccacuuuuuuuucuuuuuuugaaauaaaauagccugucuuucagaucuaaaaaaaaaaaaaaaaaaaaaaaaaaaaaaaaaaaaaaaaaaaaaaaaaaaaaaaaaaaaaaaaaaaaaaaaaaaaaaaaaaaaaaaaaaaaaaaaaaaa

SEQ ID NO: 14537 - RNA, 1740 nt, Artificial Sequence
  mRNA product Design a-2 (A100) comprising derived and/or modified sequence from LASV(LP;Clade I)__AAF86701__GPC (opt1)
aggagaguccgcucagccagguugcagaagcggcuuagcguguguccuaaucuucucucugcguguagguaggccugugccgcaaacaagcuuaccaugggccagaucaucaccuucuuccaggaggugccccacgucaucgaggaggugaugaacaucgugcugaucgcccucagccugcuggccauccucaaggggcuguacaacaucgcgaccugcggcaucaucgggcuggucgccuuccucuuccugugcggcaaguccugcagccugacgcucaagggcggguacgagcugcagacccuggagcucaacauggagacccugaacaugaccaugccgcuguccugcacgaagaacagcucccaccacuacauccgcgugggcaacgagaccgggcucgagcugacccugaccaacacgagcaucaucaaccacaaguucugcaaccucuccgacgcccacaagaagaaccuguacgaccacgcccugaugagcaucaucuccaccuuccaccucagcauccccaacuucaaccaguacgaggccauguccugcgacuucaacggcgggaagaucagcgugcaguacaaccugucccacagcuacgcgggcgacgccgccgagcacugcgggaccgucgccaacggcgugcugcagaccuucaugcggauggcguggggcgggcgcuacaucgcccucgacuccggcaaggggaacugggacugcaucaugacgagcuaccaguaccugaucauccagaacaccaccugggaggaccacugccaguucucccggcccagccccaucggcuaccugggccuccugucccagcgcacccgggacaucuacaucagccgccggcugcucgggacguucaccuggacccugagcgacuccgagggcaacgagacccccgggggcuacugccugacgcgcuggaugcucaucgaggccgagcugaagugcuucgggaacaccgccguggccaagugcaacgagaagcacgacgaggaguucugcgacaugcugcggcuguucgacuucaacaagcaggcgauccgccggcugaaggccgaggcccagaugagcauccagcugaucaacaaggccgucaacgcccucaucaacgaccagcugaucaugaagaaccaccuccgcgacaucaugggcauccccuacugcaacuacuccaaguacugguaccucaaccacaccagcuccggccggaccagccugcccaagugcuggcugaucuccaacgggagcuaccucaacgagacgcaguucuccgacgacaucgagcagcaggcggacaacaugaucaccgagaugcugcagaaggaguacaucgagcgccagggcaagaccccgcuggggcucguggacaucuucaucuucagcaccuccuucuaccugaucagcaucuuccugcaccugaucaagaucccgacgcaccggcacaucgugggcaagcccugccccaagccccaccgccucaaccacaugggggucugcuccugcggccuguacaagcacccgggcgugcccaccaaguggaagcggugaggacuagucccuguucccagagcccacuuuuuuuucuuuuuuugaaauaaaauagccugucuuucagaucuaaaaaaaaaaaaaaaaaaaaaaaaaaaaaaaaaaaaaaaaaaaaaaaaaaaaaaaaaaaaaaaaaaaaaaaaaaaaaaaaaaaaaaaaaaaaaaaaaaaa

SEQ ID NO: 14538 - RNA, 1740 nt, Artificial Sequence
  mRNA product Design a-2 (A100) comprising derived and/or modified sequence from LASV(803213;Clade II)__AAF86703__GPC (opt1)
aggagaguccgcucagccagguugcagaagcggcuuagcguguguccuaaucuucucucugcguguagguaggccugugccgcaaacaagcuuaccaugggccagaucaucaccuucuuccaggaggugccccacgucaucgaggaggugaugaacaucgugcugaucgcccucagccugcuggccauccucaaggggaucuacaacgucgcgaccugcggccuguucgggcugaucuccuuccuccugcugugcggccgcagcugcuccgugacguacaaggggguguacgagcuccagacccuggagcugaacauggccaaccucaacaugaccaugccgcugagcugcaccaagaacaacucccaccacuacaucauggucggcaacgagacgggccuggagcucacccugaccaacaccagcaucaucaaccacaaguucugcaaccuguccgacgcccacaagaagaaccucuacgaccacgcccugaugagcaucaucuccacguuccaccugagcauccccaacuucaaccaguacgaggccauguccugcgacuucaacgggggcaagaucagcgugcaguacaaccucucccacagcuucgcgguggacgccgccaaccacugcgggaccaucgccaacggcguccugcagaccuucaugcggauggcguggggcggguccuacaucgcccuggacagcggcaaggggaacugggacugcaucaugaccuccuaccaguaccucaucauccagaacacgaccugggaggaccacugccaguucagccgccccucccccaucggcuaccuggggcugcucagccagcggacccgcgacaucuacaucagccggcgccugcugggcaccuucacguggacccucuccgacagcgagggcaacgaggcccccgggggcuacugccugacccgguggaugcugaucgaggccgagcucaagugcuucgggaacaccgccguggcgaagugcaacgagaagcacgacgaggaguucugcgacaugcugcgccuguucgacuucaacaagcaggccaucaagcggcucaagacggaggcccagauguccauccagcugaucaacaaggccgugaacgcccugaucaacgaccagcucaucaugaagaaccaccuccgcgacaucaugggcauccccuacugcaacuacagccgguacugguaccugaaccacaccgucaccgggaagaccucccugccccgcugcuggcuggugagcaacggcuccuaccugaacgagacgcacuucagcgacgacaucgagcagcaggcggacaacaugaucaccgagaugcuccagaaggaguacauggaccggcagggcaagaccccgcuggggcugguggaccucuucgucuucuccaccagcuucuaccugaucuccaucuuccugcaccuggugaagaucccgacgcaccgccacaucgugggcaagcccugccccaagccccaccggcucaaccacauggggaucugcagcugcggccuguacaagcacccggggguccccgugaaguggaagcgcugaggacuagucccuguucccagagcccacuuuuuuuucuuuuuuugaaauaaaauagccugucuuucagaucuaaaaaaaaaaaaaaaaaaaaaaaaaaaaaaaaaaaaaaaaaaaaaaaaaaaaaaaaaaaaaaaaaaaaaaaaaaaaaaaaaaaaaaaaaaaaaaaaaaaa

SEQ ID NO: 14539 - RNA, 1740 nt, Artificial Sequence
  mRNA product Design a-2 (A100) comprising derived and/or modified sequence from LASV(GA391;Clade III)__CAA36645__GPC (opt1)
aggagaguccgcucagccagguugcagaagcggcuuagcguguguccuaaucuucucucugcguguagguaggccugugccgcaaacaagcuuaccaugggccagaucgugaccuucuuccaggaggucccccacgugaucgaggaggugaugaacaucguccugaucgcccucagcauccuggccauccugaaggggcucuacaacguggcgaccugcggccugaucgggcuggugacguuccuccugcuguccggccgcagcugcucccucaucuacaaggggaccuacgagcugcagacccuggagcucaacauggagacccugaacaugacgaugccgcugagcugcaccaagaacaacucccaccacuacauccgggucggcaacgagaccggccucgagcugacccugacgaacaccagcauccucaaccacaaguucugcaaccuguccgacgcccacaagcgcaaccuguacgaccacagccucauguccaucaucagcaccuuccaccuguccauccccaacuucaaccaguacgaggccaugagcugcgacuucaacgggggcaagaucaccgugcaguacaaccugucccacagcuucgccguggacgccgcggggcacugcggcacgcucgccaacgggguccugcagaccuucaugcggauggccuggggcggcuccuacaucgcccuggacagcgggcgcggcaacugggacugcaucaugaccuccuaccaguaccucaucauccagaacaccacgugggacgaccacugccaguucagccggcccucccccaucggguaccugggccugcucagccagcgcacccgggacaucuacaucagccgccggcugcugggcaccuucaccuggacgcucuccgacagcgaggggaacgagaccccgggcggguacugccugacccgcuggaugcugaucgaggcggagcucaagugcuucggcaacaccgccguggccaagugcaacgagaagcacgacgaggaguucugcgacaugcugcggcuguucgacuucaacaagcaggccauccgccggcucaagacggaggcccagauguccauccagcugaucaacaaggcggugaacgcccugaucaacgaccagcucaucaugaagaaccaccuccgcgacaucauggggauccccuacugcaacuacagccgguacugguaccugaaccacaccuccaccggcaagaccagccugccccgcugcuggcugaucuccaacggcagcuaccugaacgagacgaaguucuccgacgacaucgagcagcaggccgacaacaugaucaccgagaugcuccagaaggaguacaucgaccggcaggggaagacgccccugggccuggucgaccuguucguguucagcaccuccuucuaccucaucagcaucuuccugcaccuggugaagaucccgacccaccgccacaucgucgggaagcccugccccaagccccaccggcucaaccacaugggcaucugcuccugcgggcuguacaagcagccgggcgugcccgugcgcuggaagcggugaggacuagucccuguucccagagcccacuuuuuuuucuuuuuuugaaauaaaauagccugucuuucagaucuaaaaaaaaaaaaaaaaaaaaaaaaaaaaaaaaaaaaaaaaaaaaaaaaaaaaaaaaaaaaaaaaaaaaaaaaaaaaaaaaaaaaaaaaaaaaaaaaaaaa

SEQ ID NO: 14540 - RNA, 1743 nt, Artificial Sequence
  mRNA product Design a-2 (A100) comprising derived and/or modified sequence from LASV(AV;Clade V)__CCA30314__GPC (opt1)
aggagaguccgcucagccagguugcagaagcggcuuagcguguguccuaaucuucucucugcguguagguaggccugugccgcaaacaagcuuaccaugggccagaucgugaccuucuuccaggaggucccccacgugaucgaggaggugaugaacaucguccugaucgcccucagcauccuggccgugcugaaggggcucuacaacaucgcgaccugcggccugaucgggcugaucacguuccuccugcugugcggccgcuccugcagcuccaaccucuacaaggggguguacgagcugcagagccuggaccucaacauggagacccugaacaugaccaugccgcuguccugcaccaagaacaacagccaccacuacauccgggucggcaacgacacgggccucgagcugacccugaccaacaccuccauccucaaccacaaguucugcaaccugagcgacgcccacaagaaggaccuguacgaccacgcccucauguccaucaucagcacguuccaccuguccauccccaacuucaaccaguacgaggccaugagcugcgacuucaacgggggcaagaucuccgugcaguacaaccugagccacuccuacgccaucgacgcggccaaccacugcgggaccguggccaacggcauccuccagaccuucaugcgcauggccuggggcgggagcuacaucgcgcuggacuccggccgggggaacugggacugcaucaugaccagcuaccaguaccugaucauccagaacacgaccugggagaaccacugccaguucucccgccccagccccaucggcuaccucgggcugcugagccagcggacccgcgacaucuacaucucccggcgccuccugggcaccuucacguggacccugagcgacuccgagggcaacgccacccccgggggcuacugccucacccgguggaugcugaucgaggccgagcugaagugcuucgggaacacggccgucgccaagugcaacgagaagcacgacgaggaguucugcgacaugcuccgccuguucgacuucaacaagcaggcgaucagccggcugaaguccgaggcccagaugagcauccagcucaucaacaaggccgugaacgcccugaucaacgaccagcugaucaugaagaaccaccuccgcgacaucaugggcauccccuacugcaacuacuccaaguacugguaccugaaccacaccaucaccgggaagaccagccugcccaagugcuggcucguguccaacggcagcuaccugaacgagacgcacuucuccgacgacaucgagcagcaggccgacaacaugaucaccgagaugcugcagaaggaguacauggagcggcagggcaagaccccgcucgggcuggucgaccuguucguguucagcaccuccuucuaccugaucagcaucuuccuccgccuggugaagaucccgacgcaccggcacaucgucggcaagcccugccccaagccccaccgccugaaccacauggggaucugcuccugcggccucuacaagcagccgggggugcccgugcgguggaagcgcugaggacuagucccuguucccagagcccacuuuuuuuucuuuuuuugaaauaaaauagccugucuuucagaucuaaaaaaaaaaaaaaaaaaaaaaaaaaaaaaaaaaaaaaaaaaaaaaaaaaaaaaaaaaaaaaaaaaaaaaaaaaaaaaaaaaaaaaaaaaaaaaaaaaaa

SEQ ID NO: 14541 - RNA, 1740 nt, Artificial Sequence
  mRNA product Design a-2 (A100) comprising derived and/or modified sequence from LASV(Togo/2016/7082;Clade VI)__AMR44577__GPC (opt1)
aggagaguccgcucagccagguugcagaagcggcuuagcguguguccuaaucuucucucugcguguagguaggccugugccgcaaacaagcuuaccaugggccagaucaucaccuucuuccaggaggugccccacgucaucgaggaggugaugaacaucgugcugaucgcccucagccugcuggccauccucaagggggucuacaacguggcgaccugcggcaucaucgggcuggugacguuccuguuccucugcggccgcuccugcagccugaucuacaagggguccuacgagcugcagacccucgagcugaacauggagacccugaacaugaccaugccgcucagcugcacgaagaacuccagccaccacuacauccgggucggcaacgagaccggccuggagcugacccucaccaacacguccaucaucaaccacaaguucugcaaccugagcgacgcccacaagcgcaaccuguacgaccacgcccucauguccauccugagcaccuuccaccuguccauccccaacuucaaccaguacgaggccaugagcugcgacuucaacgggggcaagaucuccgugcaguacaaccucagccacgccuacgcgguggacgccgccgagcacugcgggaccgucgccaacggcgugcugcagaccuucaugcggauggcguggggcggguccuacaucgcccuggacagcggccgcgggaacugggacugcaucaugacguccuaccaguaccucaucauccagaacaccaccugggaggaccacugccaguucagccggcccucccccaucggcuaccuggggcugcucagccagcgcacccgggacaucuacaucagccgccggcugcugggcacguucaccuggacccucuccgacagcgagggcaacgagacccccgggggcuacugccugacgcgcuggaugcugaucgaggccgagcucaagugcuucgggaacaccgccguggccaagugcaacgagaagcacgacgaggaguucugcgacaugcugcggcuguucgacuucaacaagcaggcgauccagcgccucaaguccgaggcccagaugagcauccagcugaucaacaaggccgucaacgcccugaucaacgaccagcucaucaugaagaaccaccuccgggacaugaugggcauccccuacugcaacuacuccaaguacugguaccugaaccacaccagcuccgggcgcaccagccugcccaagugcuggcugguguccaacggcagcuaccugaacgagacgcacuucuccgacgacaucgagcagcaggccgacaacaugaucaccgagaugcuccagaaggaguacaucgaccggcagggcaagaccccgcuggggcugguggaccucuucgucuucagcaccuccuucuaccugaucagcaucuuccugcaccugaucaagaucccgacgcaccgccacaucgugggcaagcccugccccaagccccaccggcucaaccacauggggaucugcuccugcggccuguacaagcagccgggggugcccacccgcuggaagcggugaggacuagucccuguucccagagcccacuuuuuuuucuuuuuuugaaauaaaauagccugucuuucagaucuaaaaaaaaaaaaaaaaaaaaaaaaaaaaaaaaaaaaaaaaaaaaaaaaaaaaaaaaaaaaaaaaaaaaaaaaaaaaaaaaaaaaaaaaaaaaaaaaaaaa

SEQ ID NO: 14542 - RNA, 1740 nt, Artificial Sequence
  mRNA product Design a-2 (A100) comprising derived and/or modified sequence from LASV(KAK-428;Clade n.d. (VII))__ANH09740__GPC (opt1)
aggagaguccgcucagccagguugcagaagcggcuuagcguguguccuaaucuucucucugcguguagguaggccugugccgcaaacaagcuuaccaugggccagaucgugaccuucuuccaggaggucccccacgugaucgaggaggugaugaacaucguccugaucgcccucagccugcuggccauccucaaggggcuguacaacuucgcgaccugcggcgugaucgggcugaucacguuccuccugcugugcggccgcuccugcagcgccaccuacaaggggcaguacgagcuccagacccuggagcugaacauggagucccucaacaugaccaugccgcugagcugcacgaagaacaacucccaccacuacauccgggccggcaacaacaccggccuggagcucacccugaccaacacgagcaucaucucccacaaguucugcaaccugagcgacgcccacaagaagaaccucuacgaccacacccugauguccaucaucaccaccuuccaccugagcauccccaacuucaaccaguacgaggccauguccugcgacuucaacgggggcaagaucagcauccaguacaaccucucccacagcuacgcgggggacgccgcccagcacugcggcacgguggccaacgggguccugcagaccuucaugcgcauggcguggggcggcuccuaccuggcccucgacagcgggcggcgcggcugggacugcaucaucuccagcuaccaguaccugaucauccagaacaccaccugggacgaccacugccaguucucccggcccagccccaucggguaccugggcuucgugagccagaagacgcgcgacaucuacaucucccggcgccuccugggcaccuucaccuggacccugagcgacuccgaggggcacgacaugccgggcggguacugccucacgcgguggaugcugaucgaggccgaccugaagugcuucggcaacaccgccguggccaagugcaacgagaagcacgacgaggaguucugcgacauguggcgccucuucgacuucaacaagcaggcgauccagcggcugaaggccgaggcccagaugaacauccagcugaucaacaaggccgucaacgcccucaucaacgaccagcugaugaugaagaaccaccuccgcgacaucauggggauccccuacugcaacuacagcaaguucugguaccugaacaacaccaccacgggccggaccucccugccccgcugcuggcugaucagcaacggcuccuaccucaacgagacccacuucagcgacgacaucgagcagcaggcggacaacaugaucaccgagaugcugcagaaggaguacauggaccggcaggggaagacgccccugggccucguggaccuguucguguucuccaccagcuucuaccugaucaccaucuuccuccaccuggucaagaucccgacccaccgccacaucguggggaagcccugccccaagccccaccggcugaaccacaugggcaucugcuccugcgggcuguacaagcagccgggcgugcccguccgcuggaagcggugaggacuagucccuguucccagagcccacuuuuuuuucuuuuuuugaaauaaaauagccugucuuucagaucuaaaaaaaaaaaaaaaaaaaaaaaaaaaaaaaaaaaaaaaaaaaaaaaaaaaaaaaaaaaaaaaaaaaaaaaaaaaaaaaaaaaaaaaaaaaaaaaaaaaa

SEQ ID NO: 14543 - RNA, 1740 nt, Artificial Sequence; identical to SEQ ID NO: 14537
  mRNA product Design a-2 (A100) comprising derived and/or modified sequence from LASV(Pinneo-NIG-1969;Clade I)__AIT17836__GPC (opt1)

SEQ ID NO: 14544 - RNA, 1740 nt, Artificial Sequence
  mRNA product Design a-2 (A100) comprising derived and/or modified sequence from LASV(ISTH0009-NIG-2011;Clade II)__AIT17404__GPC (opt1)
aggagaguccgcucagccagguugcagaagcggcuuagcguguguccuaaucuucucucugcguguagguaggccugugccgcaaacaagcuuaccaugggccagaucaucaccuucuuccaggaggugccccacgucaucgaggaggugaugaacaucgugcugaucgcccucagccugcuggccauccucaaggggaucuacaacgucgcgaccugcggccuguucgggcugguguccuuccuccugcugugcggccgcagcugcuccacgaccuacaaggggguguacgagcuccagacccuggagcuggacauggccagccucaacaugaccaugccgcuguccugcacgaagaacaacagccaccacuacaucauggucggcaacgagaccggccuggagcucacccugaccaacacguccaucaucaaccacaaguucugcaaccugagcgacgcccacaagaagaaccucuacgaccacgcccugauguccaucaucagcaccuuccaccuguccauccccaacuucaaccaguacgaggccaugagcugcgacuucaacgggggcaagaucuccgugcaguacaaccucagccacgcguacgccguggacgccgccaaccacugcgggaccaucgcgaacggcguccugcagaccuucaugcggauggccuggggcggguccuacaucgcccuggacagcggcaagggguccugggacugcaucaugacgagcuaccaguaccucaucauccagaacaccaccugggaggaccacugccaguucucccgccccagccccaucggcuaccuggggcugcucagccagcggacccgcgacaucuacaucucccggcgccugcugggcacguucaccuggacccucagcgacuccgagggcaacgagacccccgggggcuacugccugacgcgguggaugcugaucgaggccgagcucaagugcuucgggaacaccgccguggcgaagugcaacgagaagcacgacgaggaguucugcgacaugcugcgccuguucgacuucaacaagcaggccauccggcgccucaagaccgaggcccagaugagcauccagcugaucaacaaggccgugaacgcccugaucaacgaccagcucaucaugaagaaccaccuccgggacaucaugggcaucccguacugcaacuacuccaaguacugguaccugaaccacaccgucacggggaagaccagccugccccgcugcuggcugguguccaacggcagcuaccugaacgagacccacuucuccgacgacaucgagcagcaggcggacaacaugaucaccgagcuccugcagaaggaguacauggaccggcagggcaagacgccccuggggcucguggaccuguucgucuucagcaccuccuucuaccugaucagcaucuuccugcaccucaucaagaucccgacccaccgccacaucaccggcaagcccugccccaagccccaccggcugaaccacauggggaucugcuccugcggccuguacaagcacccgggggugcccgugaaguggaagcgcugaggacuagucccuguucccagagcccacuuuuuuuucuuuuuuugaaauaaaauagccugucuuucagaucuaaaaaaaaaaaaaaaaaaaaaaaaaaaaaaaaaaaaaaaaaaaaaaaaaaaaaaaaaaaaaaaaaaaaaaaaaaaaaaaaaaaaaaaaaaaaaaaaaaaa

SEQ ID NO: 14545 - RNA, 1740 nt, Artificial Sequence
  mRNA product Design a-2 (A100) comprising derived and/or modified sequence from LASV(ISTH2010-NIG-2012;Clade II)__AIT17482__GPC (opt1)
aggagaguccgcucagccagguugcagaagcggcuuagcguguguccuaaucuucucucugcguguagguaggccugugccgcaaacaagcuuaccaugggccagaucaucaccuucuuccaggaggugccccacgucaucgaggaggugaugaacaucgugcugaucgcccucagccugcuggccauccucaaggggaucuacaacgucgcgaccugcggccuguucgggcugguguccuuccuccugcugugcggccgcagcugcuccacgaccuacaaggggguguacgagcuccagacccuggagcuggacauggccagccucaacaugaccaugccgcuguccugcacgaagaacaacagccaccacuacaucauggucggcaacgagaccggccuggagcucacccugaccaacacguccaucaucaaccacaaguucugcaaccugagcgacgcccacaagaagaaccucuacgaccacgcccugauguccaucaucagcaccuuccaccuguccauccccaacuucaaccaguacgaggccaugagcugcgacuucaacgggggcaagaucuccgugcaguacaaccucagccacgcguacgccguggacgccgccaaccacugcgggaccaucgcgaacggcguccugcagaccuucaugcggauggccuggggcggguccuacaucgcccuggacagcggcaagggguccugggacugcaucaugacgagcuaccaguaccucaucauccagaacaucaccugggaggaccacugccaguucucccgccccagccccaucggcuaccuggggcugcucagccagcggacccgcgacaucuacaucucccggcgccugcugggcaccuucacguggacccucagcgacuccgagggcaacgagacccccgggggcuacugccugacccgguggaugcugaucgaggccgagcucaagugcuucgggaacacggccguggcgaagugcaacgagaagcacgacgaggaguucugcgacaugcugcgccuguucgacuucaacaagcaggccauccggcgccucaagaccgaggcccagaugagcauccagcugaucaacaaggccgugaacgcccugaucaacgaccagcucaucaugaagaaccaccuccgggacaucaugggcauccccuacugcaacuacuccaaguacugguaccugaaccacaccgucaccgggaagacgagccugccccgcugcuggcugguguccaacggcagcuaccugaacgagacccacuucuccgacgacaucgagcagcaggcggacaacaugaucaccgagcuccugcagaaggaguacaucgaccggcagggcaagaccccgcuggggcucguggaccuguucgucuucagcacguccuucuaccugaucagcaucuuccugcaccucgugaagaucccgacccaccgccacguggucggcaagcccugccccaagccccaccggcugaaccacauggggaucugcuccugcggccuguacaagcacccgggggugcccgugaaguggaagcgcugaggacuagucccuguucccagagcccacuuuuuuuucuuuuuuugaaauaaaauagccugucuuucagaucuaaaaaaaaaaaaaaaaaaaaaaaaaaaaaaaaaaaaaaaaaaaaaaaaaaaaaaaaaaaaaaaaaaaaaaaaaaaaaaaaaaaaaaaaaaaaaaaaaaaa

SEQ ID NO: 14546 - RNA, 1740 nt, Artificial Sequence
  mRNA product Design a-2 (A100) comprising derived and/or modified sequence from LASV(Lassa virus/H.sapiens-wt/NGA/2015/ISTH_0543;Clade II)__AVO03639__GPC (opt1)
aggagaguccgcucagccagguugcagaagcggcuuagcguguguccuaaucuucucucugcguguagguaggccugugccgcaaacaagcuuaccaugggccagaucaucaccuucuuccaggaggugccccacgucaucgaggaggugaugaacaucgugcugaucgcccucagccugcuggccauccucaaggggaucuacaacgucgcgaccugcggccuguucgggcugguguccuuccuccugcugugcggccgcagcugcuccacgaccuacaaggggguguacgagcuccagacccuggagcuggacauggccaaccucaacaugaccaugccgcugagcugcacgaagaacaacucccaccacuacaucauggucggcaacgagaccggccuggagcucacccugaccaacacgagcaucaucaaccacaaguucugcaaccuguccgacgcccacaagaagaaccucuacgaccacgcccugaugagcaucaucuccaccuuccaccugagcauccccaacuucaaccaguacgaggccauguccugcgacuucaacgggggcaagaucagcgugcaguacaaccucucccacaccuacgcgguggacgccgccaaccacugcgggaccaucgccaacggcguccugcagacguucaugcggauggcguggggcgggagcuacaucgcccuggacuccggcaaggggagcugggacugcaucaugaccuccuaccaguaccucgugauccagaacaccaccugggaggaccacugccaguucagccgccccucccccaucggcuaccuggggcugcucagccagcggacgcgcgacaucuacaucagccggcgccugcugggcaccuucaccuggacccucuccgacagcgagggcaacgagacgcccgggggcuacugccugacccgguggaugcugaucgaggccgagcucaagugcuucgggaacaccgccguggccaagugcaacgagaagcacgacgaggaguucugcgacaugcugcgccuguucgacuucaacaagcaggcgauccggcgccucaagaccgaggcccagauguccauccagcugaucaacaaggccgucaacgcccugaucaacgaccagcucaucaugaagaaccaccuccgggacaucaugggcauccccuacugcaacuacagcaaguacugguaccugaaccacacggugaccgggaagaccucccugccccgcugcuggcuggugagcaacggcuccuaccugaacgagacccacuucagcgacgacaucgagcagcaggccgacaacaugaucacggagcuccugcagaaggaguacaucgaccggcagggcaagaccccgcuggggcucgucgaccuguucguguucuccaccagcuucuaccugaucuccaucuuccugcaccucgugaagaucccgacccaccgccacaucacgggcaagcccugccccaagccccaccggcugaaccacauggggaucugcagcugcggccuguacaagcacccggggguccccgugaaguggaagcgcugaggacuagucccuguucccagagcccacuuuuuuuucuuuuuuugaaauaaaauagccugucuuucagaucuaaaaaaaaaaaaaaaaaaaaaaaaaaaaaaaaaaaaaaaaaaaaaaaaaaaaaaaaaaaaaaaaaaaaaaaaaaaaaaaaaaaaaaaaaaaaaaaaaaaa

SEQ ID NO: 14547 - RNA, 1740 nt, Artificial Sequence
  mRNA product Design a-2 (A100) comprising derived and/or modified sequence from LASV(Lassa virus/H.sapiens-wt/NGA/2016/ISTH_0009;Clade II)__AVO03571__GPC (opt1)
aggagaguccgcucagccagguugcagaagcggcuuagcguguguccuaaucuucucucugcguguagguaggccugugccgcaaacaagcuuaccaugggccagaucaucaccuucuuccaggaggugccccacgucaucgaggaggugaugaacaucgugcugaucgcccucagccugcuggccauccucaaggggaucuacaacgucgcgaccugcggccugcuggggcucguguccuuccugcugcucugcggccgcagcugcuccacgaccuacaaggggguguacgagcugcagacccuggagcucgacauggccagccugaacaugaccaugccgcuguccugcacgaagaacaacagccaccacuacaucauggucggcaacgagaccggccucgagcugacccugaccaacacguccaucaucaaccacaaguucugcaaccucagcgacgcccacaagaagaaccuguacgaccacgcccugauguccaucaucagcaccuuccaccucuccauccccaacuucaaccaguacgaggccaugagcugcgacuucaacgggggccggaucuccgugcaguacaaccugagccacuccuacgcgguggacgccgccaaccacugcgggaccaucgccaacggcguccugcagaccuucaugcgcauggcguggggcgggagcuacaucgcccucgacuccggcaaggggagcugggacugcaucaugacguccuaccaguaccugaucauccagaacaccaccugggaggaccacugccaguucagccggcccagccccaucggcuaccuggggcuccugucccagcgcacccgggacaucuacaucagccgccggcugcucggcacguucaccuggacccuguccgacagcgagggcaacgagacccccgggggcuacugccugacgcgcuggaugcucaucgaggccgagcugaagugcuucgggaacaccgccguggccaagugcaacgagaagcacgacgaggaguucugcgacaugcugcggcuguucgacuucaacaagcaggcgauccgccggcugaagaccgaggcccagauguccauccagcugaucaacaaggccgugaacgcccucaucaacgaccagcugaucaugaagaaccaccuccgcgacaucaugggcaucccguacugcaacuacagcaaguacugguaccucaaccacaccgucacggggaagaccucccugccccggugcuggcuggugagcaacggcuccuaccucaacgagacccacuucagcgacgacaucgagcagcaggccgacaacaugaucaccgagcugcugcagaaggaguacaucgaccgccagggcaagacgccccucgggcugguggaccuguucgucuucuccaccagcuucuaccugaucuccaucuuccuccaccuggugaagaucccgacccaccggcacaucaccggcaagcccugccccaagccccaccgccugaaccacauggggaucugcagcugcggccucuacaaccacccgggggugcccgucaaguggaagcggugaggacuagucccuguucccagagcccacuuuuuuuucuuuuuuugaaauaaaauagccugucuuucagaucuaaaaaaaaaaaaaaaaaaaaaaaaaaaaaaaaaaaaaaaaaaaaaaaaaaaaaaaaaaaaaaaaaaaaaaaaaaaaaaaaaaaaaaaaaaaaaaaaaaaa

SEQ ID NO: 14548 - RNA, 1740 nt, Artificial Sequence
  mRNA product Design a-2 (A100) comprising derived and/or modified sequence from LASV(Lassa virus/H.sapiens-wt/NGA/2016/ISTH_0017;Clade II)__AVO03567__GPC (opt1)
aggagaguccgcucagccagguugcagaagcggcuuagcguguguccuaaucuucucucugcguguagguaggccugugccgcaaacaagcuuaccaugggccagaucaucaccuucuuccaggaggugccccacgucaucgaggaggugaugaacaucgugcugaucgcccucagccugcuggccauccucaaggggaucuacaacgucgcgaccugcggccuguucgggcugguguccuuccuccugcugugcggccgcagcugcuccacgaccuacaaggggguguacgagcuccagacccuggagcuggacauggccagccucaacaugaccaugccgcuguccugcacgaagaacaacagccaccacuacaucauggucggcaacgagaccggccuggagcucacccugaccaacacguccaucaucaaccacaaguucugcaaccugagcgacgcccacaagaagaaccucuacgaccacgcccugauguccaucaucagcaccuuccaccuguccauccccaacuucaaccaguacgaggccaugagcugcgacuucaacgggggcaagaucuccgugcaguacaaccucagccacaccuacgcgaucgacgccgccaaccacugcgggaccaucgccaacggcgugcugcagacguucaugcggauggcguggggcggguccuacaucgcccuggacagcggcaagggguccugggacugcaucaugaccagcuaccaguaccucaucauccagaacaccaccugggaggaccacugccaguucucccgccccagccccaucggcuaccuggggcugcucagccagcggacgcgcgacaucuacaucucccggcgccugcugggcaccuucaccuggacccucagcgacuccgagggcaacgagacgcccgggggcuacugccugacccgguggaugcugaucgaggccgagcucaagugcuucgggaacaccgccgucgccaagugcaacgagaagcacgacgaggaguucugcgacaugcugcgccuguucgacuucaacaagcaggcgauccggcgccucaagaccgaggcccagaugagcauccagcugaucaacaaggccgugaacgcccugaucaacgaccagcucaucaugaagaaccaccuccgggacaucaugggcauccccuacugcaacuacuccaaguacugguaccugaaccacacggugaccgggaagaccagccugccccgcugcuggcuggucuccaacggcagcuaccugaacgagacccacuucuccgacgacaucgagcagcaggccgacaacaugaucacggagcuccugcagaaggaguacauggaccggcagggcaagaccccgcuggggcucguggaccuguucguguucagcaccuccuucuaccugaucagcaucuuccugcaccucguccgcaucccgacccaccggcacgugaucggcaagcccugccccaagccccaccgccugaaccacauggggaucugcuccugcggccuguacaagcacccgggggugcccgucaaguggaagcggugaggacuagucccuguucccagagcccacuuuuuuuucuuuuuuugaaauaaaauagccugucuuucagaucuaaaaaaaaaaaaaaaaaaaaaaaaaaaaaaaaaaaaaaaaaaaaaaaaaaaaaaaaaaaaaaaaaaaaaaaaaaaaaaaaaaaaaaaaaaaaaaaaaaaa

SEQ ID NO: 14549 - RNA, 1740 nt, Artificial Sequence
  mRNA product Design a-2 (A100) comprising derived and/or modified sequence from LASV(Lassa virus/H.sapiens-wt/NGA/2018/ISTH_0959;Clade II)__AVV65099__GPC (opt1)
aggagaguccgcucagccagguugcagaagcggcuuagcguguguccuaaucuucucucugcguguagguaggccugugccgcaaacaagcuuaccaugggccagaucaucaccuucuuccaggaggugccccacgucaucgaggaggugaugaacaucgugcugaucgcccucagccugcuggccauccucaaggggaucuacaacgucgugaccugcggccuguucgggcugguguccuuccuccugcugugcggccgcagcugcuccacgaccuacaagggggucuacgagcuccagacccuggagcuggacauggcgagccucaacaugaccaugccgcuguccugcacgaagaacaacagccaccacuacaucauggugggcaacgagaccggccuggagcucacccugaccaacacguccaucaucaaccacaaguucugcaaccugagcgacgcccacaagaagaaccucuacgaccacgcccugauguccaucaucagcaccuuccaccuguccauccccaacuucaaccaguacgaggccaugagcugcgacuucaacgggggcaagaucuccgugcaguacaaccucagccacgccuacgcgaucgacgccgccaaccacugcgggaccaucgccaacggcguccugcagaccuucaugcggauggcguggggcggguccuacaucgcccuggacagcggcaagggguccugggacugcaucaugacgagcuaccaguaccucaucauccagaacaccaccugggaggaccacugccaguucucccgccccagccccaucggcuaccuggggcugcucagccagcggacccgcgacaucuacaucucccggcgccugcugggcacguucaccuggacccucagcgacuccgagggcaacgagacccccgggggcuacugccugacgcgguggaugcugaucgaggccgagcucaagugcuucgggaacaccgccguggccaagugcaacgagaagcacgacgaggaguucugcgacaugcugcgccuguucgacuucaacaagcaggcgauccggcgccucaagaccgaggcccagaugagcauccagcugaucaacaaggccgugaacgcccugaucaacgaccagcucaucaugaagaaccaccuccgggacaucaugggcaucccguacugcaacuacuccaaguacugguaccugaaccacaccgucacggggaagaccagccugccccgcugcuggcugguguccaacggcagcuaccugaacgagacccacuucuccgacgacaucgagcagcaggccgacaacaugaucaccgagcuccugcagaaggaguacaucgaccggcagggcaagacgccccuggggcucguggaccuguucgucuucagcaccuccuucuaccugaucagcaucuuccugcaccucgugaagaucccgacccaccgccacgugaucggcaagcccugccccaagccccaccggcugaaccacauggggaucugcuccugcggccuguacaagcacccggggguccccgugaaguggaagcgcugaggacuagucccuguucccagagcccacuuuuuuuucuuuuuuugaaauaaaauagccugucuuucagaucuaaaaaaaaaaaaaaaaaaaaaaaaaaaaaaaaaaaaaaaaaaaaaaaaaaaaaaaaaaaaaaaaaaaaaaaaaaaaaaaaaaaaaaaaaaaaaaaaaaaa

SEQ ID NO: 14550 - RNA, 1740 nt, Artificial Sequence
  mRNA product Design a-2 (A100) comprising derived and/or modified sequence from LASV(LASV003-NIG-2008;Clade II)__AIT17580__GPC (opt1)
aggagaguccgcucagccagguugcagaagcggcuuagcguguguccuaaucuucucucugcguguagguaggccugugccgcaaacaagcuuaccaugggccagaucaucaccuucuuccaggaggugccccacgucaucgaggaggugaugaacaucgugcugaucgcccucagccugcuggccauccucaaggggaucuacaacgucgcgaccugcggccuguucgggcugguguccuuccuccugcugugcggccgcagcugcuccacgaccuacaaggggguguacgagcuccagacccuggagcuggacauggccagccucaacaugaccaugccgcuguccugcacgaagaacaacagccaccacuacaucauggucggcaacgagaccggccuggagcucacccugaccaacacguccaucaucaaccacaaguucugcaaccugagcgacgcccacaagaagaaccucuacgaccacgcccugauguccaucaucagcaccuuccaccuguccauccccaacuucaaccaguacgaggccaugagcugcgacuucaacgggggcaagaucuccgugcaguacaaccucagccacaccuacgcgguggacgccgccaaccacugcgggaccaucgccaacggcguccugcagacguucaugcggauggcguggggcggguccuacaucgcccuggacagcggcaagggguccugggacugcaucaugaccagcuaccaguaccucaucauccagaacaccaccugggaggaccacugccaguucucccgccccagccccaucggcuaccuggggcugcucagccagcggacgcgcgacaucuacaucucccggcgccugcugggcaccuucaccuggacccucagcgacuccgagagcaacgagacgccgggcggguacugccugacccgguggaugcugaucgaggccgagcucaagugcuucggcaacaccgccguggccaagugcaacgagaagcacgacgaggaguucugcgacaugcugcgccuguucgacuucaacaagcaggcgauccggcgccucaaggccgaggcccagauguccauccagcugaucaacaaggccgugaacgcccugaucaacgaccagcucaucaugaagaaccaccuccgggacaucauggggauccccuacugcaacuacagcaaguacugguaccugaaccacaccgucacgggccgcaccucccugccccggugcuggcuggugagcaacggguccuaccugaacgagacccacuucagcgacgacaucgagcagcaggcggacaacaugaucaccgagcuccugcagaaggaguacauggaccgccagggcaagacgccccugggccucguggaccuguucgucuucuccaccagcuucuaccugaucuccaucuuccugcaccucgugaagaucccgacccaccggcacgugaucgggaagcccugccccaagccccaccgccugaaccacaugggcaucugcagcugcgggcuguacaagcacccgggcguccccgugaaguggaagcggugaggacuagucccuguucccagagcccacuuuuuuuucuuuuuuugaaauaaaauagccugucuuucagaucuaaaaaaaaaaaaaaaaaaaaaaaaaaaaaaaaaaaaaaaaaaaaaaaaaaaaaaaaaaaaaaaaaaaaaaaaaaaaaaaaaaaaaaaaaaaaaaaaaaaa

SEQ ID NO: 14551 - RNA, 1740 nt, Artificial Sequence
  mRNA product Design a-2 (A100) comprising derived and/or modified sequence from LASV(LASV035-NIG-2009;Clade II)__AIT17588__GPC (opt1)
aggagaguccgcucagccagguugcagaagcggcuuagcguguguccuaaucuucucucugcguguagguaggccugugccgcaaacaagcuuaccaugggccagaucaucaccuucuuccaggaggugccccacgucaucgaggaggugaugaacaucgugcugaucgcccucagccugcuggccauccucaaggggaucuacaacgucgcgaccugcggccuguucgggcugguguccuuccuccugcugugcggccgcagcugcuccacgaccuacaaggggguguacgagcuccagacccuggagcuggacauggccagccucaacaugaccaugccgcuguccugcacgaagaacaacagccaccacuacaucauggucggcaacgagaccggccuggagcucacccugaccaacacguccaucaucaaccacaaguucugcaaccugagcgacgcccacaagaagaaccucuacgaccacgcccugauguccaucaucagcaccuuccaccuguccauccccaacuucaaccaguacgaggccaugagcugcgacuucaacgggggcaagaucuccgugcaguacaaccucagccacgcguacgccguggacgccgccaaccacugcgggaccaucgcgaacggcguccugcagaccuucaugcggauggccuggggcggguccuacaucgcccuggacagcggcaagggguccugggacugcaucaugacgagcuaccaguaccucaucauccagaacaccaccugggaggaccacugccaguucucccgccccagccccaucggcuaccuggggcugcucagccagcggacccgcgacaucuacaucucccggcgccugcugggcacguucaccuggacccucagcgacuccgagggcaacgagacccccgggggcuacugccugacgcgguggaugcugaucgaggccgagcucaagugcuucgggaacaccgccguggcgaagugcaacgagaagcacgacgaggaguucugcgacaugcugcgccuguucgacuucaacaagcaggccauccggcgccucaaggccgaggcccagaugagcauccagcugaucaacaaggccgugaacgcgcugaucaacgaccagcucaucaugaagaaccaccuccgggacaucaugggcauccccuacugcaacuacuccaaguacugguaccugaaccacaccgucaccgggaagacgagccugccccgcugcuggcugguguccaacggcagcuaccugaacgagacccacuucuccgacgacaucgagcagcaggccgacaacaugaucaccgagcuccugcagaaggaguacaucgaccggcagggcaagaccccgcuggggcucguggaccuguucgucuucagcacguccuucuaccugaucagcaucuuccugcaccucgugaagaucccgacccaccgccacgugaucggcaagcccugccccaagccccaccggcugaaccacauggggaucugcuccugcggccuguacaagcacccggggguccccgugaaguggaagcgcugaggacuagucccuguucccagagcccacuuuuuuuucuuuuuuugaaauaaaauagccugucuuucagaucuaaaaaaaaaaaaaaaaaaaaaaaaaaaaaaaaaaaaaaaaaaaaaaaaaaaaaaaaaaaaaaaaaaaaaaaaaaaaaaaaaaaaaaaaaaaaaaaaaaaa

SEQ ID NO: 14552 - RNA, 1740 nt, Artificial Sequence
  mRNA product Design a-2 (A100) comprising derived and/or modified sequence from LASV(LASV1000-NIG-2009;Clade II)__AIT17782__GPC (opt1)
aggagaguccgcucagccagguugcagaagcggcuuagcguguguccuaaucuucucucugcguguagguaggccugugccgcaaacaagcuuaccaugggccagaucaucaccuucuuccaggaggugccccacgucaucgaggaggugaugaacaucgugcugaucgcccucagccugcuggccauccucaaggggaucuacaacgucgcgaccugcggccuguucgggcugguguccuuccuccugcugugcggccgcagcugcuccacgaccuacaaggggguguacgagcuccagacccuggagcuggacauggccagccucaacaugaccaugccgcuguccugcacgaagaacaacagccaccacuacaucauggucggcaacgagaccggccuggagcucacccugaccaacacguccaucaucaaccacaaguucugcaaccugagcgacgcccacaagaagaaccucuacgaccacgcccugauguccaucaucagcaccuuccaccuguccauccccaacuucaaccaguacgaggccaugagcugcgacuucaacgggggcaagaucuccgugcaguacaaccucagccacaccuacgcgguggacgccgccaaccacugcgggaccaucgccaacggcguccugcagacguucaugcggauggcguggggcggguccuacaucgcccuggacagcggcaagggguccugggacugcaucaugaccagcuaccaguaccucaucauccagaacaccaccugggaggaccacugccaguucucccgccccagccccaucggcuaccuggggcugcucagccagcggacgcgcgacaucuacaucucccggcgccugcugggcaccuucaccuggacccucagcgacuccgagggcaacgagacgcccgggggcuacugccugacccgguggaugcugaucgaggccgagcucaagugcuucgggaacaccgccguggccaagugcaacgagaagcacgacgaggaguucugcgacaugcugcgccuguucgacuucaacaagcaggcgaucaagcggcucaagaccgaggcccagaugagcauccagcugaucaacaaggccgugaacgcccugaucaacgaccagcucaucaugaagaaccaccuccgcgacaucaugggcauccccuacugcaacuacuccaaguacugguaccugaaccacacggucaccgggaagaccagccugccccggugcuggcugguguccaacggcagcuaccugaacgagacccacuucuccgacgacaucgagcagcaggccgacaacaugaucacggagcuccugcagaaggaguacaucgaccgccagggcaagaccccgcuggggcucguggaccuguucgucuucagcaccuccuucuaccugaucagcaucuuccugcaccucgugaagaucccgacccaccggcacguggucggcaagcccugccccaagccccaccgccugaaccacauggggaucugcuccugcggccuguacaagcacccgggggugcccgugaaguggaagcggugaggacuagucccuguucccagagcccacuuuuuuuucuuuuuuugaaauaaaauagccugucuuucagaucuaaaaaaaaaaaaaaaaaaaaaaaaaaaaaaaaaaaaaaaaaaaaaaaaaaaaaaaaaaaaaaaaaaaaaaaaaaaaaaaaaaaaaaaaaaaaaaaaaaaa

SEQ ID NO: 14553 - RNA, 1740 nt, Artificial Sequence
  mRNA product Design a-2 (A100) comprising derived and/or modified sequence from LASV(LASV221-NIG-2010;Clade II)__AIT17624__GPC (opt1)
aggagaguccgcucagccagguugcagaagcggcuuagcguguguccuaaucuucucucugcguguagguaggccugugccgcaaacaagcuuaccaugggccagaucaucaccuucuuccaggaggugccccacgucaucgaggaggugaugaacaucgugcugaucgcccucagccugcuggccauccucaaggggaucuacaacgucgcgaccugcggccuguucgggcugguguccuuccuccugcugugcggccgcagcugcuccacgaccuacaaggggguguacgagcuccagacccuggagcuggacauggccagccucaacaugaccaugccgcuguccugcacgaagaacaacagccaccacuacaucauggucggcaacgagaccggccuggagcucacccugaccaacacguccaucaucaaccacaaguucugcaaccugagcgacgcccacaagaagaaccucuacgaccacgcccugauguccaucaucagcaccuuccaccuguccauccccaacuucaaccaguacgaggccaugagcugcgacuucaacgggggcaagaucuccgugcaguacaaccucagccacaccuacgcgaucgacgccgccaaccacugcgggaccaucgccaacggcgugcugcagacguucaugcggauggcguggggcggguccuacaucgcccuggacagcggcaagggguccugggacugcaucaugaccagcuaccaguaccucaucauccagaacaccaccugggaggaccacugccaguucucccgccccagccccaucggcuaccuggggcugcucagccagcggacgcgcgacaucuacaucucccggcgccugcugggcaccuucaccuggacccucagcgacuccgagggcaacgagacgcccgggggcuacugccugacccgguggaugcugaucgaggccgagcucaagugcuucgggaacaccgccgucgccaagugcaacgagaagcacgacgaggaguucugcgacaugcugcgccuguucgacuucaacaagcaggcgauccggcgccucaagaccgaggcccagaugagcauccagcugaucaacaaggccgugaacgcccugaucaacgaccagcucaucaugaagaaccaccuccgggacaucaugggcauccccuacugcaacuacuccaaguacugguaccugaaccacacggugaccgggaagaccagccugccccgcugcuggcuggucuccaacggcagcuaccugaacgagacccacuucuccgacgacaucgagcagcaggccgacaacaugaucacggagaugcuccagaaggaguacauggaccggcagggcaagaccccgcuggggcugguggaccucuucguguucagcaccuccuucuaccugaucagcaucuuccugcaccuggucaagaucccgacccaccgccacgugaucggcaagcccugccccaagccccaccggcucaaccacauggggaucugcuccugcggccuguacaagcacccgggggugcccgucaaguggaagcgcugaggacuagucccuguucccagagcccacuuuuuuuucuuuuuuugaaauaaaauagccugucuuucagaucuaaaaaaaaaaaaaaaaaaaaaaaaaaaaaaaaaaaaaaaaaaaaaaaaaaaaaaaaaaaaaaaaaaaaaaaaaaaaaaaaaaaaaaaaaaaaaaaaaaaa

SEQ ID NO: 14554 - RNA, 1740 nt, Artificial Sequence
  mRNA product Design a-2 (A100) comprising derived and/or modified sequence from LASV(LASV237-NIG-2010;Clade II)__AIT17638__GPC (opt1)
aggagaguccgcucagccagguugcagaagcggcuuagcguguguccuaaucuucucucugcguguagguaggccugugccgcaaacaagcuuaccaugggccagaucaucaccuucuuccaggaggugccccacgucaucgaggaggugaugaacaucgugcugaucgcccucagccugcuggccauccucaaggggaucuacaacgucgcgaccugcggccuguucgggcugguguccuuccuccugcugugcggccgcagcugcuccacgaccuacaaggggguguacgagcuccagacccuggagcuggacauggccagccucaacaugaccaugccgcuguccugcacgaagaacaacagccaccacuacaucauggucggcaacgagaccggccuggagcucacccugaccaacacguccaucaucaaccacaaguucugcaaccugagcgacgcccacaagaaggaccucuacgaccacgcccugauguccaucaucagcaccuuccaccuguccauccccaacuucaaccaguacgaggccaugagcugcgacuucaacgggggcaagaucuccgugcaguacaaccucagccacaccuacgcgguggacgccgccaaccacugcgggaccaucgccaacggcguccugcagacguucaugcggauggcguggggcggguccuacaucgcccuggacagcggcaagggguccugggacugcaucaugaccagcuaccaguaccucaucauccagaacaccaccugggaggaccacugccaguucucccgccccagccccaucggcuaccuggggcugcucagccagcggacgcgcgacaucuacaucucccggcgccugcugggcaccuucaccuggacccucagcgacuccgagggcaacgagacgcccgggggcuacugccugacccgguggaugcugaucgaggccgagcucaagugcuucgggaacaccgccguggccaagugcaacgagaagcacgacgaggaguucugcgacaugcugcgccuguucgacuucaacaagcaggcgauccggcgccucaagaccgaggcccagaugagcauccagcugaucaacaaggccgugaacgcccugaucaacgaccagcucaucaugaagaaccaccuccgggacaucaugggcauccccuacugcaacuacuccaaguacugguaccugaaccacacggucaccgggaagaccagccugccccgcugcuggcugguguccaacggcagcuaccugaacgagacccacuucuccgacgacaucgagcagcaggccgacaacaugaucacggagcuccugcagaaggaguacauggaccggcagggcaagaccccgcuggggcucguggaccuguucgucuucagcaccuccuucuaccugaucagcaucuuccugcaccucaucaagaucccgacccaccgccacaucacgggcaagcccugccccaagccccaccggcugaaccacauggggaucugcuccugcggccuguacaagcacccgggggugcccgugaaguggaagcgcugaggacuagucccuguucccagagcccacuuuuuuuucuuuuuuugaaauaaaauagccugucuuucagaucuaaaaaaaaaaaaaaaaaaaaaaaaaaaaaaaaaaaaaaaaaaaaaaaaaaaaaaaaaaaaaaaaaaaaaaaaaaaaaaaaaaaaaaaaaaaaaaaaaaaa

SEQ ID NO: 14555 - RNA, 1740 nt, Artificial Sequence
  mRNA product Design a-2 (A100) comprising derived and/or modified sequence from LASV(LASV253-NIG-2011;Clade II)__AIT17670__GPC (opt1)
aggagaguccgcucagccagguugcagaagcggcuuagcguguguccuaaucuucucucugcguguagguaggccugugccgcaaacaagcuuaccaugggccagaucaucaccuucuuccaggaggugccccacgucaucgaggaggugaugaacaucgugcugaucgcccucagccugcuggccauccucaaggggaucuacaacgucgcgaccugcggccuguucgggcugguguccuuccuccugcugugcggccgcagcugcuccacgaccuacaaggggguguacgagcuccagacccuggagcuggacauggccagccucaacaugaccaugccgcuguccugcacgaagaacaacagccaccacuacaucauggucggcaacgagaccggccuggagcucacccugaccaacacguccaucaucaaccacaaguucugcaaccugagcgacgcccacaagaagaaccucuacgaccacgcccugauguccaucaucagcaccuuccaccuguccauccccaacuucaaccaguacgaggccaugagcugcgacuucaacgggggcaagaucuccgugcaguacaaccucagccacaccuacgcgguggacgccgccaaccacugcgggaccaucgccaacggcguccugcagacguucaugcggauggcguggggcggguccuacaucgcccuggacagcggcaagggguccugggacugcaucaugaccagcuaccaguaccucaucauccagaacaccaccugggaggaccacugccaguucucccgccccagccccaucggcuaccuggggcugcucagccagcggacgcgcgacaucuacaucucccggcgccugcugggcaccuucaccuggacccucagcgacuccgagggcaacgagacgcccgggggcuacugccugacccgguggaugcugaucgaggccgagcucaagugcuucgggaacaccgccguggccaagugcaacgagaagcacgacgaggaguucugcgacaugcugcgccuguucgacuucaacaagcaggcgauccggcgccucaaggccgaggcccagaugagcauccagcugaucaacaaggccgugaacgcccugaucaacgaccagcucaucaugaagaaccaccuccgggacaucaugggcaucccguacugcaacuacuccaaguacugguaccugaaccacaccgucacggggcgcaccagccugccccggugcuggcugguguccaacggcagcuaccugaacgagacccacuucuccgacgacaucgagcagcaggcggacaacaugaucaccgagcuccugcagaaggaguacaucgaccgccagggcaagacgccccuggggcucguggaccuguucgucuucagcaccuccuucuaccugaucagcaucuuccugcaccucgugaagaucccgacccaccggcacaucaucggcaagcccugccccaagccccaccgccugaaccacauggggaucugcuccugcggccuguacaagcacccgggggugcccgucaaguggaagcggugaggacuagucccuguucccagagcccacuuuuuuuucuuuuuuugaaauaaaauagccugucuuucagaucuaaaaaaaaaaaaaaaaaaaaaaaaaaaaaaaaaaaaaaaaaaaaaaaaaaaaaaaaaaaaaaaaaaaaaaaaaaaaaaaaaaaaaaaaaaaaaaaaaaaa

SEQ ID NO: 14556 - RNA, 1740 nt, Artificial Sequence
  mRNA product Design a-2 (A100) comprising derived and/or modified sequence from LASV(LASV254-NIG-2011;Clade II)__AIT17674__GPC (opt1)
aggagaguccgcucagccagguugcagaagcggcuuagcguguguccuaaucuucucucugcguguagguaggccugugccgcaaacaagcuuaccaugggccagaucaucaccuucuuccaggaggugccccacgucaucgaggaggugaugaacaucgugcugaucgcccucagccugcuggccauccucaaggggaucuacaacgucgcgaccugcggccuguucgggcugguguccuuccuccugcugugcggccgcagcugcuccacgaccuacaaggggguguacgagcuccagacccuggagcuggacaugaccaaccucaacaugacgaugccgcugagcugcaccaagaacaacucccaccacuacaucauggucggcaacgagaccggccuggagcucacccugacgaacaccagcaucaucaaccacaaguucugcaaccuguccgacgcccacaagaagaaccucuacaaccacgcccugaugagcaucaucuccaccuuccaccugagcauccccaacuucaaccaguacgaggccauguccugcgacuucaacgggggcaagaucagcgugcaguacaaccucucccacagcuacgccguggacgcggccaaccacugcgggaccaucgccaacggcguccugcagacguucaugcggauggccuggggcggguccuacaucgcgcuggacagcggcaaggggaacugggacugcaucaugaccuccuaccaguaccucaucauccagaacaccaccugggaggaccacugccaguucagccgccccucccccaucggcuaccuggggcugcucagccagcggacgcgcgacaucuacaucagccggcgccugcugggcaccuucaccuggacccucuccgacagcgagggcaacgagacgcccgggggcuacugccugacccgguggaugcugaucgaggccgagcucaagugcuucgggaacaccgccguggccaagugcaacgagaagcacgacgaggaguucugcgacaugcugcgccuguucgacuucaacaagcaggccauccggcgccucaagaccgaggcgcaggccaacauccagcugaucaacaaggccgugaacgcccugaucaacgaccagcucaucaugaagaaccaccuccgggacaucaugggcauccccuacugcaacuacuccaaguacugguaccugaaccacacggucaccgggaagaccagccugccccgcugcuggcugguguccaacggcagcuaccugaacgagacccacuucuccgacgacaucgagcagcaggccgacaacaugaucacggagcuccugcagaaggaguacauggaccggcagggcaagaccccgcuggggcucguggaccuguucgucuucagcaccuccuucuaccugaucagcaucuuccugcaccucgugaagaucccgacccaccgccacgugaucggcaagcccugccccaagccccaccggcugaaccacauggggaucugcuccugcggccuguacaagcacccggggguccccgugaaguggaagcgcugaggacuagucccuguucccagagcccacuuuuuuuucuuuuuuugaaauaaaauagccugucuuucagaucuaaaaaaaaaaaaaaaaaaaaaaaaaaaaaaaaaaaaaaaaaaaaaaaaaaaaaaaaaaaaaaaaaaaaaaaaaaaaaaaaaaaaaaaaaaaaaaaaaaaa

SEQ ID NO: 14557 - RNA, 1740 nt, Artificial Sequence
  mRNA product Design a-2 (A100) comprising derived and/or modified sequence from LASV(Nig08-A19;Clade III)__ADU56618__GPC (opt1)
aggagaguccgcucagccagguugcagaagcggcuuagcguguguccuaaucuucucucugcguguagguaggccugugccgcaaacaagcuuaccaugggccagaucgugaccuucuuccaggaggucccccacgugaucgaggaggugaugaacaucguccugaucgcccucagcauccuggccauccugaaggggcucuacaacaucgcgaccugcggccugaucgggcuggugacguuccuccugcuguccggccgcagcugcuccaugaccuacaaggggguguacgagcuccagacccuggagcugaacaugaacacccucaacaugacgaugccgcugagcugcaccaagaacaacucccaccacuacaucauggucggcaacgagaccggccuggagcucacccugacgaacaccagccugcuccaccacaaguucugcaaccuguccgacgcccacaagaagaaccuguacgaccacacccucaugagcaucaucuccaccuuccaccugagcauccccaacuucaaccaguacgaggccauguccugcgacuucaacgggggcaagaucacggugcaguacaaccugagccacuccuacgccaucgacgccgcgaaccacugcgggaccguggccaacggcguccuccagaccuucaugcggauggccuggggcgggagcuacaucgcccuggacuccggccgcgggaagugggacugcaucaugaccagcuaccaguaccugaucauccagaacacgaccugggaggaccacugccaguucucccggcccagccccaucggcuaccucgggcugcugucccagcgcacccgggacaucuacaucagccgccggcuccugggcaccuucacguggacccugagcgacuccgagggcaacgagacccccgggggcuacugccucacccgcuggaugcugaucgaggcggagcugaagugcuucgggaacacggccguggccaagugcaacgagaagcacgacgaggaguucugcgacaugcuccggcuguucgacuucaacaagcaggccauccgccggcugaaggccgaggcgcagaugagcauccagcucaucaacaaggccgugaacgcccugaucaacgaccagcugaucaugaagaaccaccuccgcgacaucaugggcauccccuacugcaacuacuccaaguacugguaccugaaccacaccagcaccgggcggaccucccugccccgcugcuggcucgucagcaacggcuccuaccugaacgagacgcacuucagcgacgacaucgagcagcaggccgacaacaugaucaccgagaugcugcagaaggaguaccucgaccggcagggcaagaccccgcuggggcugguggaccuguucguguucuccaccagcuucuaccucaucuccaucuuccugcaccuggucaagaucccgacgcaccgccacaucgugggcaagcccugccccaagccccaccggcucaaccacauggggaucugcagcugcggccuguacaagcagccgggggugcccguccgcuggaagcggugaggacuagucccuguucccagagcccacuuuuuuuucuuuuuuugaaauaaaauagccugucuuucagaucuaaaaaaaaaaaaaaaaaaaaaaaaaaaaaaaaaaaaaaaaaaaaaaaaaaaaaaaaaaaaaaaaaaaaaaaaaaaaaaaaaaaaaaaaaaaaaaaaaaaa

SEQ ID NO: 14558 - RNA, 1743 nt, Artificial Sequence
  mRNA product Design a-2 (A100) comprising derived and/or modified sequence from LASV(G1180-SLE-2010;Clade IV)__AIT17168__GPC (opt1)
aggagaguccgcucagccagguugcagaagcggcuuagcguguguccuaaucuucucucugcguguagguaggccugugccgcaaacaagcuuaccaugggccagaucgugaccuucuuccaggaggucccccacgugaucgaggaggugaugaacaucguccugaucgcccucagcauccuggccgugcugaaggggcucuacaacuucgcgaccugcggccugguggggcugcucaccuuccugcugcucugcggccgcuccugcaccgccagccgguacaagggggucuacgagcugcagacccuggagcucaacauggagacccugaacaugacgaugccgcuguccugcaccaagaacaacagccaccacuacaucauggugggcaacgagaccggccucgagcugacccugacgaacaccuccaucaucaaccacaaguucugcaaccucagcgacgcccacaagaagaaccuguacgaccacgcccugauguccaucaucagcaccuuccaccucuccauccccaacuucaaccaguacgaggccaugagcugcgacuucaacgggggcaagaucuccgugcaguacaaccugagccacuccuacgcgggggacgccgccaaccacugcggcaccgucgccaacggggugcugcagacguucaugcgcauggcguggggcggcagcuacaucgcccucgacuccgggcacggcagcugggacugcaucaugaccuccuaccaguaccugaucauccagaacaccaccugggaggaccacugccaguucagccggcccucccccaucggguaccugggccuccugagccagcgcacgcgggacaucuacaucagccgccggcugcucggcaccuucaccuggacccuguccgacagcgaggggaaggacacgccgggcggguacugccugacccgcuggaugcucaucgaggccgagcugaagugcuucggcaacaccgccguggccaagugcaacgagaagcacgacgaggaguucugcgacaugcugcggcuguucgacuucaacaagcaggcgauccagcgccugaaggccgaggcccagauguccauccagcugaucaacaaggccgucaacgcccucaucaacgaccagcugaucaugaagaaccaccuccgggacaucauggggauccccuacugcaacuacagcaaguacugguaccucaaccacaccacgaccggcaagaccucccugcccaagugcuggcuggugagcaacggcuccuaccucaacgagacccacuucagcgacgacaucgagcagcaggcggacaacaugaucacggagaugcugcagaaggaguacauggagcgccaggggaagacgccccugggccucguggaccuguucgucuucuccaccagcuucuaccugaucuccaucuuccugcaccucgugaagaucccgacccaccggcacaucgugggcaagagcugccccaagccccaccgccugaaccacauggggaucugcuccugcgggcuguacaagcagcccggcgucccggugaaguggaagcggugaggacuagucccuguucccagagcccacuuuuuuuucuuuuuuugaaauaaaauagccugucuuucagaucuaaaaaaaaaaaaaaaaaaaaaaaaaaaaaaaaaaaaaaaaaaaaaaaaaaaaaaaaaaaaaaaaaaaaaaaaaaaaaaaaaaaaaaaaaaaaaaaaaaaa

SEQ ID NO: 14559 - RNA, 1743 nt, Artificial Sequence
  mRNA product Design a-2 (A100) comprising derived and/or modified sequence from LASV(G1442-SLE-2011;Clade IV)__AIT17180__GPC (opt1)
aggagaguccgcucagccagguugcagaagcggcuuagcguguguccuaaucuucucucugcguguagguaggccugugccgcaaacaagcuuaccaugggccagaucgugaccuucuuccaggaggucccccacgugaucgaggaggugaugaacaucguccugaucgcccucagcauccuggccgugcugaaggggcucuacaacguggcgaccugcggccugaucgggcuggucacguuccuccugcugugcggccgcuccugcaccaccacccucuacaaggggguguacgagcugcagacgcuggagcucaacauggagacccugaacaugaccaugccgcugagcugcaccaagaacaacucccaccacuacauccgggugggcaacgagacgggccucgagcugacccugaccaacaccagcaucaucaaccacaaguucugcaaccucuccgacgcccacaagaagaaccuguacgaccacgcccugaugagcaucaucuccacguuccaccucagcauccccaacuucaaccaguacgaggccauguccugcgacuucaacgggggcaagaucagcguccaguacaaccugucccacagcuacgccggggacgcggccaaccacugcggcaccguggccaacggggugcugcagaccuucaugcgcauggccuggggcggcuccuacaucgcgcucgacagcgggcggggcaacugggacugcaucaugaccuccuaccaguaccugaucauccagaacacgaccugggacgaccacugccaguucagccgccccucccccaucggguaccugggccuccugagccagcggacccgcgacgucuacaucucccggcgccugcucggcaccuucacguggacccugagcgacagcgaggggaaggacaccccgggcggguacugccugacccgguggaugcucaucgaggccgagcugaagugcuucggcaacacggccguggccaagugcaacgagaagcacgacgaggaguucugcgacaugcugcgccucuucgacuucaacaagcaggccauccagcggcugaaggcggaggcccagauguccauccagcugaucaacaaggccgugaacgcccucaucaacgaccagcugaucaugaagaaccaccuccgcgacaucauggggauccccuacugcaacuacagcaaguacugguaccugaacaacaccgccaccggcaagaccucccugcccaagugcuggcugaucagcaacggcuccuaccucaacgagacgcacuucagcgacgacaucgagcaggaggcggacaacaugaucaccgagaugcugcagaaggaguacauggagcggcaggggaagacgccccugggccucgucgaccuguucguguucuccaccagcuucuaccugaucuccaucuuccugcaccucgugaagaucccgacccaccgccacaucgucggcaagagcugccccaagccccaccggcugaaccacauggggaucugcuccugcgggcuguacaagcagcccggcgugccggugcgcuggaagcggugaggacuagucccuguucccagagcccacuuuuuuuucuuuuuuugaaauaaaauagccugucuuucagaucuaaaaaaaaaaaaaaaaaaaaaaaaaaaaaaaaaaaaaaaaaaaaaaaaaaaaaaaaaaaaaaaaaaaaaaaaaaaaaaaaaaaaaaaaaaaaaaaaaaaa

SEQ ID NO: 14560 - RNA, 1743 nt, Artificial Sequence
  mRNA product Design a-2 (A100) comprising derived and/or modified sequence from LASV(G3010-SLE-2013;Clade IV)__AIT17344__GPC (opt1)
aggagaguccgcucagccagguugcagaagcggcuuagcguguguccuaaucuucucucugcguguagguaggccugugccgcaaacaagcuuaccaugggccagaucgugaccuucuuccaggaggucccccacgugaucgaggaggugaugaacaucguccugaucgcccucagcauccuggccgugcugaaggggcucuacaacuucgcgaccugcggccugguggggcuggucacguuccuccugcugugcggccgcuccugcaccaccagccucuacaaggggguguacgagcugcagacccuggagcucaacauggagacgcugaacaugaccaugccgcuguccugcaccaagaacaacagccaccacuacaucauggugggcaacgagaccggccucgagcugacgcugaccaacaccuccaucaucaaccacaaguucugcaaccucagcgacgcccacaagaagaaccuguacaaccacgcccugauguccaucaucagcaccuuccaccucuccauccccaacuucaaccaguacgaggccaugagcugcgacuucaacgggggcaagaucuccguccaguacaaccugagccacuccuacgccggggacgcggccagccacugcggcacgguggccaacggggugcugcagaccuucaugcggauggccuggggcggcuccuacaucgcgcucgacagcggguacggcaagugggacugcaucaugaccuccuaccaguaccugaucauccagaacaccacgugggaggaccacugccaguucagccgccccucccccaucggguaccugggccuccugagccagcggacccgcgacaucuacaucagccggcgccugcucggcaccuucaccuggacgcuguccgacagcgaggggaaggacaccccgggcggguacugccugacccgguggaugcucaucgaggccgagcugaagugcuucggcaacaccgccgucgccaagugcaacgagaagcacgacgaggaguucugcgacaugcugcgccucuucgacuucaacaagcaggccauccagcggcugaagacggaggcgcagauguccauccagcugaucaacaaggccgugaacgcccucaucaacgaccagcugaucaugaagaaccaccuccgcgacaucauggggauccccuacugcaacuacagcaaguacugguaccugaaccacaccaccaccggcaagacgucccugcccaagugcuggcuggugagcaacggcuccuaccucaacgagacccacuucagcgacgacaucgagcagcaggccgacaacaugaucaccgagaugcugcagaaggaguacauggagcggcaggggaagacgccccugggccucgucgaccuguucguguucuccaccagcuucuaccugaucuccaucuuccugcaccucgugaagaucccgacccaccgccacaucgucggcaagagcugccccaagccccaccggcugaaccacauggggaucugcuccugcgggcuguacaagcagcccggcgugccggugcgcuggaagcggugaggacuagucccuguucccagagcccacuuuuuuuucuuuuuuugaaauaaaauagccugucuuucagaucuaaaaaaaaaaaaaaaaaaaaaaaaaaaaaaaaaaaaaaaaaaaaaaaaaaaaaaaaaaaaaaaaaaaaaaaaaaaaaaaaaaaaaaaaaaaaaaaaaaaa

SEQ ID NO: 14561 - RNA, 1743 nt, Artificial Sequence
  mRNA product Design a-2 (A100) comprising derived and/or modified sequence from LASV(G502-SLE-2009;Clade IV)__AIT17126__GPC (opt1)
aggagaguccgcucagccagguugcagaagcggcuuagcguguguccuaaucuucucucugcguguagguaggccugugccgcaaacaagcuuaccaugggccagaucgugaccuucuuccaggaggucccccacgugaucgaggaggugaugaacaucguccugaucgcccucagcauccuggccgugcugaaggggcucuacaacuucgcgaccugcggccugguggggcugcucacguuccugcugcucugcggccgcuccugcaccaccgggcuguacaagggcgucuacgagcugcagacccucgagcugaacauggagacgcugaacaugaccaugccgcucagcugcaccaagaacaacucccaccacuacaucauggugggcaacgagaccgggcuggagcugacgcucaccaacaccagcaucaucaaccacaaguucugcaaccuguccgacgcccacaagaagaaccuguacgaccacgcccucaugagcaucaucuccaccuuccaccugagcauccccaacuucaaccaguacgaggccauguccugcgacuucaacggcgggaagaucagcgugcaguacaaccugucccacagcuacgccggcgacgcggccgaccacugcgggacggucgccaacggcgugcuccagaccuucaugcggauggccuggggcggguccuacaucgcgcuggacagcggccgcgggcggugggacugcaucaugaccuccuaccaguaccugaucauccagaacaccacgugggaggaccacugccaguucagccgccccucccccaucggcuaccucggccugcugagccagcggacccgcgacaucuacaucucccggcgccuccuggggaccuucaccuggacgcugagcgacagcgagggcaaggacacccccgggggcuacugccucacccgguggaugcugaucgaggccgagcugaagugcuucgggaacaccgccguggccaagugcaacgagaagcacgacgaggaguucugcgacaugcuccgccuguucgacuucaacaagcaggccauccagcggcugaaggcggaggcccagauguccauccagcucaucaacaaggccgucaacgcccugaucaacgaccagcuggugaugaagaaccaccuccgcgacaucaugggcauccccuacugcaacuacagccgguacugguaccugaaccacacgaccaccggccgcaccucccugcccaagugcuggcucgugagcaacggguccuaccugaacgagacgcacuucagcgacgacaucgagcagcaggccgacaacaugaucaccgagaugcugcagaaggaguacauggagcggcagggcaagaccccgcucgggcuggucgaccuguucguguucuccaccagcuucuaccugaucuccaucuuccuccaccuggugaagaucccgacgcaccgccacaucgucggcaagagcugccccaagccccaccggcugaaccacauggggaucugcuccugcggccucuacaagcagcccggcgugccggugaaguggaagcgcugaggacuagucccuguucccagagcccacuuuuuuuucuuuuuuugaaauaaaauagccugucuuucagaucuaaaaaaaaaaaaaaaaaaaaaaaaaaaaaaaaaaaaaaaaaaaaaaaaaaaaaaaaaaaaaaaaaaaaaaaaaaaaaaaaaaaaaaaaaaaaaaaaaaaa

SEQ ID NO: 14562 - RNA, 1743 nt, Artificial Sequence
  mRNA product Design a-2 (A100) comprising derived and/or modified sequence from LASV(G733-SLE-2010;Clade IV)__AIT17154__GPC (opt1)
aggagaguccgcucagccagguugcagaagcggcuuagcguguguccuaaucuucucucugcguguagguaggccugugccgcaaacaagcuuaccaugggccagaucgugaccuucuuccaggaggucccccacgugaucgaggaggugaugaacaucguccugaucgcccucagcauccuggccgugcugaaggggcucuacaacuucgcgaccugcggcaucguggggcuggucuccuuccugcuccugugcggccgcagcugcacgaccucccuguacaaggggguguacgagcuccagacccuggagcugaacauggagacccucaacaugacgaugccgcugagcugcaccaagaacaacucccaccacuacaucauggugggcaacgagaccggccuggagcucacccugacgaacaccagcaucaucaaccacaaguucugcaaccuguccgacgcccacaagaagaaccucuacgaccacgcccugaugagcaucaucuccaccuuccaccugagcauccccaacuucaaccaguacgaggccauguccugcgacuucaacgggggcaagaucagcguccaguacaaccucucccacagcuacgccggggacgcggccaaccacugcggcaccaucgccaacggggugcugcagacguucaugcggauggccuggggcggcuccuacaucgcgcuggacagcgggcgcgaccggugggacugcaucaugaccuccuaccaguaccucaucauccagaacaccaccugggaggaccacugccaguucagccgccccucccccaucggcuaccuggggcugcucagccagcggacgcgcgacaucuacaucagccggcgccugcugggcaccuucaccuggacccucuccgacagcgagggcaaggacacgcccgggggcuacugccugacccgguggaugcugaucgaggccgagcucaagugcuucgggaacaccgccguggccaagugcaacgagaagcacgacgaggaguucugcgacaugcugcgccuguucgacuucaacaagcaggccauccagcggcucaaggcggaggcccagauguccauccagcugaucaacaaggccgucaacgcccugaucaacgaccagcucaucaugaagaaccaccuccgcgacaucaugggcauccccuacugcaacuacagcaaguacugguaccugaaccacaccacgaccgggaagaccucccugcccaagugcuggcuggugagcaacggcuccuaccugaacgagacccacuucagcgacgacaucgagcagcaggccgacaacaugaucacggagaugcuccagaaggaguacauggagcggcagggcaagaccccgcuggggcugguggaccucuucgucuucuccaccagcuucuaccugaucuccaucuuccugcaccuggugaagaucccgacccaccgccacguggucggcaagagcugccccaagccccaccggcucaaccacauggggaucugcuccugcggccuguacgggcagcccggcgugccggugaaguggaagcgcugaggacuagucccuguucccagagcccacuuuuuuuucuuuuuuugaaauaaaauagccugucuuucagaucuaaaaaaaaaaaaaaaaaaaaaaaaaaaaaaaaaaaaaaaaaaaaaaaaaaaaaaaaaaaaaaaaaaaaaaaaaaaaaaaaaaaaaaaaaaaaaaaaaaaa

SEQ ID NO: 14563 - RNA, 1743 nt, Artificial Sequence
  mRNA product Design a-2 (A100) comprising derived and/or modified sequence from MOPV/LASV reassortant(IGS-1;Clade IV)__AFY05576__GPC (opt1)
aggagaguccgcucagccagguugcagaagcggcuuagcguguguccuaaucuucucucugcguguagguaggccugugccgcaaacaagcuuaccaugggccagaucgugaccuucuuccaggaggucccccacgugaucgaggaggugaugaacaucguccugaucgcccucagcgugcuggccgugcugaaggggcucuacaacuucgcgaccugcggccuggucgggcuggugacguuccuccugcugugcggccgcuccugcaccaccagccucuacaaggggguguacgagcugcagacccuggagcucaacauggagacgcugaacaugaccaugccgcuguccugcaccaagaacaacagccaccacuacaucauggucggcaacgagaccggccucgagcugacgcugaccaacaccuccaucaucaaccacaaguucugcaaccucagcgacgcccacaagaagaaccuguacgaccacgcccugauguccaucaucagcaccuuccaccucuccauccccaacuucaaccaguacgaggccaugagcugcgacuucaacgggggcaagaucuccgugcaguacaaccugagccacuccuacgccggggacgcggccaaccacugcggcacgguggccaacgggguccugcagaccuucaugcggauggccuggggcggcagcuacaucgcgcucgacuccgggcgcggcaacugggacugcaucaugaccagcuaccaguaccugaucauccagaacaccacgugggaggaccacugccaguucucccggcccagccccaucggguaccugggccuccugucccagcgcacccgggacaucuacaucagccgccggcugcucggcaccuucaccuggacgcugagcgacuccgagggggaggacaccccgggcggguacugccugacccgcuggaugcucaucgaggccgagcugaagugcuucggcaacaccgccguggccaagugcaacgagaagcacgacgaggaguucugcgacaugcugcggcuguucgacuucaacaagcaggccauccagcgccugaaggcggaggcccagaugagcauccagcugaucaacaaggccgugaacgcccucaucaacgaccagcugaucaugaagaaccaccuccgggacaucauggggauccccuacugcaacuacuccaaguacugguaccucaaccacacgaccaccggccgcaccagccugcccaagugcuggcuggucuccaacggcagcuaccucaacgagacgcacuucuccgacgacaucgagcagcaggccgacaacaugaucaccgagaugcugcagaaggaguacauggagcggcaggggaagacgccccugggccucguggaccuguucguguucagcaccuccuucuaccugaucagcaucuuccugcaccucgucaagaucccgacccaccgccacaucguggggaaguccugccccaagccccaccggcugaaccacaugggcaucugcagcugcgggcuguacaagcagcccggcgugccggucaaguggaagcgcugaggacuagucccuguucccagagcccacuuuuuuuucuuuuuuugaaauaaaauagccugucuuucagaucuaaaaaaaaaaaaaaaaaaaaaaaaaaaaaaaaaaaaaaaaaaaaaaaaaaaaaaaaaaaaaaaaaaaaaaaaaaaaaaaaaaaaaaaaaaaaaaaaaaaa

SEQ ID NO: 14564 - RNA, 1743 nt, Artificial Sequence
  mRNA product Design a-2 (A100) comprising derived and/or modified sequence from LASV(LM765-SLE-2012;Clade IV)__AIT17814__GPC (opt1)
aggagaguccgcucagccagguugcagaagcggcuuagcguguguccuaaucuucucucugcguguagguaggccugugccgcaaacaagcuuaccaugggccagaucgugaccuucuuccaggaggucccccacgugaucgaggaggugaugaacaucguccugaucgcccucagcauccuggccgugcugaaggggcucuacaacuucgcgaccugcggccugguggggcuggucacguuccuccugcugugcggccgcuccugcaccaccagccucuacaaggggguguacgagcugcagacccuggagcucaacauggagacgcugaacaugaccaugccgcuguccugcaccaagaacaacagccaccacuacaucauggugggcaacgagaccggccucgagcugacgcugaccaacaccuccaucaucgaccacaaguucugcaaccucagcgacgcccaccggaagaaccuguacgaccacgcccugauguccaucaucagcaccuuccaccucuccauccccaacuucaaccaguacgaggccaugagcugcgacuucaacgggggcaagaucuccguccaguacaaccugagccacuccuacgccaaggacgcggccgaccacugcgggacgguggccaacggcgugcugcagaccuucaugcgcauggccuggggcgggagcuacaucgcgcucgacuccggccgggggcgcugggacugcaucaugaccagcuaccaguaccugaucauccagaacaccacgugggaggaccacugccaguucucccggcccagccccaucggcuaccuggggcuccugucccagcgcacccgggacaucuacaucagccgccggcugcucggcaccuucaccuggacgcugagcgacuccgagggcaaggacacccccgggggcuacugccugacccgcuggaugcucaucgaggccgagcugaagugcuucgggaacaccgccgucgccaagugcaacgagaagcacgacgaggaguucugcgacaugcugcggcuguucgacuucaacaagcaggccauccagcgccugaaggcggaggcccagaugagcauccagcugaucaacaaggccgugaacgcccucaucaacgaccagcugaucaugaagaaccaccuccgggacaucaugggcauccccuacugcaacuacuccaaguacugguaccucaaccacacgaccaccgggaagaccagccugcccaagugcuggcugguguccaacggcagcuaccucaacgagacgcacuucuccgacgacaucgagcagcaggccgacaacaugaucaccgagaugcugcagaaggaguacauggagcgccagggcaagaccccgcuggggcucgucgaccuguucguguucagcaccuccuucuaccugaucagcaucuuccugcaccucgugaagaucccgacgcaccggcacaucgucggcaagcccugccccaagccccaccgccugaaccacauggggaucugcuccugcggccuguacaagcagccgggggugcccgugaaguggaagcggugaggacuagucccuguucccagagcccacuuuuuuuucuuuuuuugaaauaaaauagccugucuuucagaucuaaaaaaaaaaaaaaaaaaaaaaaaaaaaaaaaaaaaaaaaaaaaaaaaaaaaaaaaaaaaaaaaaaaaaaaaaaaaaaaaaaaaaaaaaaaaaaaaaaaa

SEQ ID NO: 14565 - RNA, 1743 nt, Artificial Sequence
  mRNA product Design a-2 (A100) comprising derived and/or modified sequence from LASV(LM776-SLE-2012;Clade IV)__AIT17824__GPC (opt1)
aggagaguccgcucagccagguugcagaagcggcuuagcguguguccuaaucuucucucugcguguagguaggccugugccgcaaacaagcuuaccaugggccagaucgugaccuucuuccaggaggucccccacgugaucgaggaggugaugaacaucguccugaucgcccucagcauccuggccgugcugaaggggcucuacaacuucgcgaccugcggccugguggggcuggucacguuccuccugcugugcggccgcuccugcaccaccagcguguacaaggggguguacgagcuccagacccuggagcugaacauggagacgcucaacaugaccaugccgcuguccugcaccaagaacaacagccaccacuacaucauggucggcaacgagaccggccuggagcucacgcugaccaacaccuccaucaucaaccacaaguucugcaaccugagcgacgcccacaagaagaaccucuacgaccacgcccugauguccaucaucagcaccuuccaccuguccauccccaacuucaaccaguacgaggccaugagcugcgacuucaacgggggcaagaucuccgugcaguacaaccucagccacuccuacgccggggacgcggccaaccacugcggcacgguggccaacgggguccugcagaccuucaugcggauggccuggggcggcagcuacaucgcgcuggacuccgggcacggcaagugggacugcaucaugaccagcuaccaguaccucaucauccagaacaccacgugggaggaccacugccaguucucccgccccagccccaucggguaccugggccugcucucccagcggacccgcgacaucuacaucagccggcgccugcugggcaccuucaccuggacgcucagcgacuccgaggggaaggacaccccgggcggguacugccugacccgguggaugcugaucgaggccgagcucaagugcuucggcaacaccgccguggccaagugcaacgagaagcacgacgaggaguucugcgacaugcugcgccuguucgacuucaacaagcaggccauccagcggcucaaggcggaggcccagaugagcauccagcugaucaacaaggccgugaacgcccugaucaacgaccagcucaucaugaagaaccaccuccgcgacaucauggggauccccuacugcaacuacuccaaguacugguaccugaaccacacgaccaccggcaagaccagccugcccaagugcuggcuggucuccaacggcagcuaccugaacgagacgcacuucuccgacgacaucgagcagcaggccgacaacaugaucaccgagaugcuccagaaggaguacauggagcggcaggggaagacgccccugggccugguggaccucuucguguucagcaccuccuucuaccugaucagcaucuuccugcaccuggucaagaucccgacccaccgccacaucguggggaaguccugccccaagccccaccggcucaaccacaugggcaucugcagcugcgggcuguacaagcagcccggcgugccgguccgcuggaagcggugaggacuagucccuguucccagagcccacuuuuuuuucuuuuuuugaaauaaaauagccugucuuucagaucuaaaaaaaaaaaaaaaaaaaaaaaaaaaaaaaaaaaaaaaaaaaaaaaaaaaaaaaaaaaaaaaaaaaaaaaaaaaaaaaaaaaaaaaaaaaaaaaaaaaa

SEQ ID NO: 14566 - RNA, 1743 nt, Artificial Sequence
  mRNA product Design a-2 (A100) comprising derived and/or modified sequence from LASV(Mad39;Clade IV)__ANH09722__GPC (opt1)
aggagaguccgcucagccagguugcagaagcggcuuagcguguguccuaaucuucucucugcguguagguaggccugugccgcaaacaagcuuaccaugggccagaucgugaccuucuuccaggaggucccccacgugaucgaggaggugaugaacaucguccugaucgcccucagcauccuggccgugcugaaggggcucuacaacguggcgaccugcggccugaucgggcuggucacguuccuccugcugugcggccgcuccugcaccaccacccucuacaaggggguguacgagcugcaggcccuggagcucaacauggagacgcugaacaugaccaugccgcugagcugcaccaagaacaacucccaccacuacauccgggugggcaacgagaccggccucgagcugacgcugaccaacaccagccucaucaaccacaaguucugcaaccuguccgacgcccacaagaagaaccuguacgaccacgcccucaugagcaucaucuccaccuuccaccugagcauccccaacuucaaccaguacgaggccauguccugcgacuucaacgacgggaagaucagcguccaguacaaccugucccacacguacgcgggcgacaccgccaaccacugcgggaccguggccaacggcgugcuccagaccuucaugcgcauggccuggggcgggagcuacaucgcgcuggacuccggccgcgggggcugggacugcaucaugacgagcuaccaguaccugaucauccagaacaccaccugggaggaccacugccaguucucccggcccagccccaucggguaccucggccugcugucccagcggacccgcgacaucuacaucagccggcgccuccugggcacguucaccuggacccuguccgacagcgaggggaaggacaccccgggcggguacugccucacgcgguggaugcugaucgaggccgagcugaagugcuucggcaacaccgccgucgccaagugcaacgagaagcacgacgaggaguucugcgacaugcuccgccuguucgacuucaacaagcaggccauccagcggcugaaggcggaggcccagaugagcauccagcucaucaacaaggccgugaacgcccugaucaacgaccagcugaucaugaagaaccaccuccgcgacaucauggggauccccuacugcaacuacuccaaguacugguaccugaaccacaccgugaccggcaagacgagccugcccaagugcuggcucgucuccaacggcagcuaccugaacgagacccacuucuccgacgacaucgagcagcaggccgacaacaugaucaccgagaugcugcagaaggaguacauggagcggcaggggaagacgccccucggccugguggaccuguucguguucagcaccuccuucuaccugaucagcaucuuccuccaccuggucaagaucccgacccaccgccacgugguggggaagcccugccccaagccccaccggcugaaccacaugggcaucugcuccugcggguucuacaagcagccgggcguccccgugcgcuggaagcggugaggacuagucccuguucccagagcccacuuuuuuuucuuuuuuugaaauaaaauagccugucuuucagaucuaaaaaaaaaaaaaaaaaaaaaaaaaaaaaaaaaaaaaaaaaaaaaaaaaaaaaaaaaaaaaaaaaaaaaaaaaaaaaaaaaaaaaaaaaaaaaaaaaaaa

SEQ ID NO: 14567 - RNA, 1743 nt, Artificial Sequence
  mRNA product Design a-2 (A100) comprising derived and/or modified sequence from LASV(Z0947-SLE-2011;Clade IV)__AIT17840__GPC (opt1)
aggagaguccgcucagccagguugcagaagcggcuuagcguguguccuaaucuucucucugcguguagguaggccugugccgcaaacaagcuuaccaugggccagaucgugaccuucuuccaggaggucccccacgugaucgaggaggugaugaacaucguccugaucgcccucagcauccuggccgugcugaaggggcucuacaacuucgcgaccugcggccugguggggcuggucacguuccuccugcugugcggccgcuccugcaccaucagccucuacaaggggguguacgagcugcagacccuggagcucaacauggagacccugaacaugacgaugccgcuguccugcaccaagaacaacagccaccacuacaucauggugggcaacgagaccggccucgagcugacccugacgaacaccuccaucaucaaccacaaguucugcaaccucagcgacgcccacaagaagaaccuguacgaccacgcccugauguccaucaucagcaccuuccaccucuccauccccaacuucaaccaguacgaggccaugagcugcgacuucaacgggggcaagaucuccguccaguacaaccugagccacuccuacgccggggacgcggccaaccacugcggcaccguggccaacggggugcugcagacguucaugcggauggccuggggcggcagcuacaucgcgcucgacuccgggcgcgaccggugggacugcaucaugaccagcuaccaguaccugaucauccagaacaccaccugggaggaccacugccaguucucccgccccagccccaucggcuaccuggggcuccugucccagcggacgcgcgacaucuacaucagccggcgccugcucggcaccuucaccuggacccugagcgacuccgagggcaaggacacgcccgggggcuacugccugacccgguggaugcucaucgaggccgagcugaagugcuucgggaacaccgccgucgccaagugcaacgagaagcacgacgaggaguucugcgacaugcugcgccucuucgacuucaacaagcaggccauccagcggcugaaggcggaggcccagaugagcauccagcugaucaacaaggccgugaacgcccucaucaacgaccagcugaucaugaagaaccaccuccgcgacaucaugggcauccccuacugcaacuacuccaaguacugguaccugaaccacaccacgaccgggaagaccagccugcccaagugcuggcugguguccaacggcagcuaccucaacgagacccacuucuccgacgacaucgagcagcaggccgacaacaugaucacggagaugcugcagaaggaguacauggagcggcagggcaagaccccgcuggggcucgucgaccuguucguguucagcaccuccuucuaccugaucagcaucuuccugcaccucgugaagaucccgacccaccgccacaucgucggcaagcccugccccaagccccaccggcugaaccacauggggaucugcuccugcggccuguacaagcagccgggggugcccgugaaguggaagcgcugaggacuagucccuguucccagagcccacuuuuuuuucuuuuuuugaaauaaaauagccugucuuucagaucuaaaaaaaaaaaaaaaaaaaaaaaaaaaaaaaaaaaaaaaaaaaaaaaaaaaaaaaaaaaaaaaaaaaaaaaaaaaaaaaaaaaaaaaaaaaaaaaaaaaa

SEQ ID NO: 14568 - RNA, 1743 nt, Artificial Sequence
  mRNA product Design a-2 (A100) comprising derived and/or modified sequence from LASV(Josiah;Clade IV)__NP_694870__GPC (opt4)
aggagaguccgcucagccagguugcagaagcggcuuagcguguguccuaaucuucucucugcguguagguaggccugugccgcaaacaagcuuaccaugggccagaucgugaccuucuuccaggaggugccccacgugaucgaggaggugaugaacaucgugcugaucgcccugagcgugcuggccgugcugaagggccuguacaacuucgccaccugcggccuggugggccuggugaccuuccugcugcugugcggcagaagcugcaccaccagccuguacaagggcguguacgagcugcagacccuggagcugaacauggagacccugaacaugaccaugccccugagcugcaccaagaacaacagccaccacuacaucauggugggcaacgagaccggccuggagcugacccugaccaacaccagcaucaucaaccacaaguucugcaaccugagcgacgcccacaagaagaaccuguacgaccacgcccugaugagcaucaucagcaccuuccaccugagcauccccaacuucaaccaguacgaggccaugagcugcgacuucaacggcggcaagaucagcgugcaguacaaccugagccacagcuacgccggcgacgccgccaaccacugcggcaccguggccaacggcgugcugcagaccuucaugagaauggccuggggcggcagcuacaucgcccuggacagcggcagaggcaacugggacugcaucaugaccagcuaccaguaccugaucauccagaacaccaccugggaggaccacugccaguucagcagacccagccccaucggcuaccugggccugcugagccagagaaccagagacaucuacaucagcagaagacugcugggcaccuucaccuggacccugagcgacagcgagggcaaggacacccccggcggcuacugccugaccagauggaugcugaucgaggccgagcugaagugcuucggcaacaccgccguggccaagugcaacgagaagcacgacgaggaguucugcgacaugcugagacuguucgacuucaacaagcaggccauccagagacugaaggccgaggcccagaugagcauccagcugaucaacaaggccgugaacgcccugaucaacgaccagcugaucaugaagaaccaccugagagacaucaugggcauccccuacugcaacuacagcaaguacugguaccugaaccacaccaccaccggcagaaccagccugcccaagugcuggcuggugagcaacggcagcuaccugaacgagacccacuucagcgacgacaucgagcagcaggccgacaacaugaucaccgagaugcugcagaaggaguacauggagagacagggcaagaccccccugggccugguggaccuguucguguucagcaccagcuucuaccugaucagcaucuuccugcaccuggugaagauccccacccacagacacaucgugggcaagagcugccccaagccccacagacugaaccacaugggcaucugcagcugcggccuguacaagcagcccggcgugcccgugaaguggaagagaugaggacuagucccuguucccagagcccacuuuuuuuucuuuuuuugaaauaaaauagccugucuuucagaucuaaaaaaaaaaaaaaaaaaaaaaaaaaaaaaaaaaaaaaaaaaaaaaaaaaaaaaaaaaaaaaaaaaaaaaaaaaaaaaaaaaaaaaaaaaaaaaaaaaaa

SEQ ID NO: 14569 - RNA, 1740 nt, Artificial Sequence
  mRNA product Design a-2 (A100) comprising derived and/or modified sequence from LASV(LP;Clade I)__AAF86701__GPC (opt4)
aggagaguccgcucagccagguugcagaagcggcuuagcguguguccuaaucuucucucugcguguagguaggccugugccgcaaacaagcuuaccaugggccagaucaucaccuucuuccaggaggugccccacgugaucgaggaggugaugaacaucgugcugaucgcccugagccugcuggccauccugaagggccuguacaacaucgccaccugcggcaucaucggccugguggccuuccuguuccugugcggcaagagcugcagccugacccugaagggcggcuacgagcugcagacccuggagcugaacauggagacccugaacaugaccaugccccugagcugcaccaagaacagcagccaccacuacaucagagugggcaacgagaccggccuggagcugacccugaccaacaccagcaucaucaaccacaaguucugcaaccugagcgacgcccacaagaagaaccuguacgaccacgcccugaugagcaucaucagcaccuuccaccugagcauccccaacuucaaccaguacgaggccaugagcugcgacuucaacggcggcaagaucagcgugcaguacaaccugagccacagcuacgccggcgacgccgccgagcacugcggcaccguggccaacggcgugcugcagaccuucaugagaauggccuggggcggcagauacaucgcccuggacagcggcaagggcaacugggacugcaucaugaccagcuaccaguaccugaucauccagaacaccaccugggaggaccacugccaguucagcagacccagccccaucggcuaccugggccugcugagccagagaaccagagacaucuacaucagcagaagacugcugggcaccuucaccuggacccugagcgacagcgagggcaacgagacccccggcggcuacugccugaccagauggaugcugaucgaggccgagcugaagugcuucggcaacaccgccguggccaagugcaacgagaagcacgacgaggaguucugcgacaugcugagacuguucgacuucaacaagcaggccaucagaagacugaaggccgaggcccagaugagcauccagcugaucaacaaggccgugaacgcccugaucaacgaccagcugaucaugaagaaccaccugagagacaucaugggcauccccuacugcaacuacagcaaguacugguaccugaaccacaccagcagcggcagaaccagccugcccaagugcuggcugaucagcaacggcagcuaccugaacgagacccaguucagcgacgacaucgagcagcaggccgacaacaugaucaccgagaugcugcagaaggaguacaucgagagacagggcaagaccccccugggccugguggacaucuucaucuucagcaccagcuucuaccugaucagcaucuuccugcaccugaucaagauccccacccacagacacaucgugggcaagcccugccccaagccccacagacugaaccacaugggcgugugcagcugcggccuguacaagcaccccggcgugcccaccaaguggaagagaugaggacuagucccuguucccagagcccacuuuuuuuucuuuuuuugaaauaaaauagccugucuuucagaucuaaaaaaaaaaaaaaaaaaaaaaaaaaaaaaaaaaaaaaaaaaaaaaaaaaaaaaaaaaaaaaaaaaaaaaaaaaaaaaaaaaaaaaaaaaaaaaaaaaaa

SEQ ID NO: 14570 - RNA, 1740 nt, Artificial Sequence
  mRNA product Design a-2 (A100) comprising derived and/or modified sequence from LASV(803213;Clade II)__AAF86703__GPC (opt4)
aggagaguccgcucagccagguugcagaagcggcuuagcguguguccuaaucuucucucugcguguagguaggccugugccgcaaacaagcuuaccaugggccagaucaucaccuucuuccaggaggugccccacgugaucgaggaggugaugaacaucgugcugaucgcccugagccugcuggccauccugaagggcaucuacaacguggccaccugcggccuguucggccugaucagcuuccugcugcugugcggcagaagcugcagcgugaccuacaagggcguguacgagcugcagacccuggagcugaacauggccaaccugaacaugaccaugccccugagcugcaccaagaacaacagccaccacuacaucauggugggcaacgagaccggccuggagcugacccugaccaacaccagcaucaucaaccacaaguucugcaaccugagcgacgcccacaagaagaaccuguacgaccacgcccugaugagcaucaucagcaccuuccaccugagcauccccaacuucaaccaguacgaggccaugagcugcgacuucaacggcggcaagaucagcgugcaguacaaccugagccacagcuucgccguggacgccgccaaccacugcggcaccaucgccaacggcgugcugcagaccuucaugagaauggccuggggcggcagcuacaucgcccuggacagcggcaagggcaacugggacugcaucaugaccagcuaccaguaccugaucauccagaacaccaccugggaggaccacugccaguucagcagacccagccccaucggcuaccugggccugcugagccagagaaccagagacaucuacaucagcagaagacugcugggcaccuucaccuggacccugagcgacagcgagggcaacgaggcccccggcggcuacugccugaccagauggaugcugaucgaggccgagcugaagugcuucggcaacaccgccguggccaagugcaacgagaagcacgacgaggaguucugcgacaugcugagacuguucgacuucaacaagcaggccaucaagagacugaagaccgaggcccagaugagcauccagcugaucaacaaggccgugaacgcccugaucaacgaccagcugaucaugaagaaccaccugagagacaucaugggcauccccuacugcaacuacagcagauacugguaccugaaccacaccgugaccggcaagaccagccugcccagaugcuggcuggugagcaacggcagcuaccugaacgagacccacuucagcgacgacaucgagcagcaggccgacaacaugaucaccgagaugcugcagaaggaguacauggacagacagggcaagaccccccugggccugguggaccuguucguguucagcaccagcuucuaccugaucagcaucuuccugcaccuggugaagauccccacccacagacacaucgugggcaagcccugccccaagccccacagacugaaccacaugggcaucugcagcugcggccuguacaagcaccccggcgugcccgugaaguggaagagaugaggacuagucccuguucccagagcccacuuuuuuuucuuuuuuugaaauaaaauagccugucuuucagaucuaaaaaaaaaaaaaaaaaaaaaaaaaaaaaaaaaaaaaaaaaaaaaaaaaaaaaaaaaaaaaaaaaaaaaaaaaaaaaaaaaaaaaaaaaaaaaaaaaaaa

SEQ ID NO: 14571 - RNA, 1740 nt, Artificial Sequence
  mRNA product Design a-2 (A100) comprising derived and/or modified sequence from LASV(GA391;Clade III)__CAA36645__GPC (opt4)
aggagaguccgcucagccagguugcagaagcggcuuagcguguguccuaaucuucucucugcguguagguaggccugugccgcaaacaagcuuaccaugggccagaucgugaccuucuuccaggaggugccccacgugaucgaggaggugaugaacaucgugcugaucgcccugagcauccuggccauccugaagggccuguacaacguggccaccugcggccugaucggccuggugaccuuccugcugcugagcggcagaagcugcagccugaucuacaagggcaccuacgagcugcagacccuggagcugaacauggagacccugaacaugaccaugccccugagcugcaccaagaacaacagccaccacuacaucagagugggcaacgagaccggccuggagcugacccugaccaacaccagcauccugaaccacaaguucugcaaccugagcgacgcccacaagagaaaccuguacgaccacagccugaugagcaucaucagcaccuuccaccugagcauccccaacuucaaccaguacgaggccaugagcugcgacuucaacggcggcaagaucaccgugcaguacaaccugagccacagcuucgccguggacgccgccggccacugcggcacccuggccaacggcgugcugcagaccuucaugagaauggccuggggcggcagcuacaucgcccuggacagcggcagaggcaacugggacugcaucaugaccagcuaccaguaccugaucauccagaacaccaccugggacgaccacugccaguucagcagacccagccccaucggcuaccugggccugcugagccagagaaccagagacaucuacaucagcagaagacugcugggcaccuucaccuggacccugagcgacagcgagggcaacgagacccccggcggcuacugccugaccagauggaugcugaucgaggccgagcugaagugcuucggcaacaccgccguggccaagugcaacgagaagcacgacgaggaguucugcgacaugcugagacuguucgacuucaacaagcaggccaucagaagacugaagaccgaggcccagaugagcauccagcugaucaacaaggccgugaacgcccugaucaacgaccagcugaucaugaagaaccaccugagagacaucaugggcauccccuacugcaacuacagcagauacugguaccugaaccacaccagcaccggcaagaccagccugcccagaugcuggcugaucagcaacggcagcuaccugaacgagaccaaguucagcgacgacaucgagcagcaggccgacaacaugaucaccgagaugcugcagaaggaguacaucgacagacagggcaagaccccccugggccugguggaccuguucguguucagcaccagcuucuaccugaucagcaucuuccugcaccuggugaagauccccacccacagacacaucgugggcaagcccugccccaagccccacagacugaaccacaugggcaucugcagcugcggccuguacaagcagcccggcgugcccgugagauggaagagaugaggacuagucccuguucccagagcccacuuuuuuuucuuuuuuugaaauaaaauagccugucuuucagaucuaaaaaaaaaaaaaaaaaaaaaaaaaaaaaaaaaaaaaaaaaaaaaaaaaaaaaaaaaaaaaaaaaaaaaaaaaaaaaaaaaaaaaaaaaaaaaaaaaaaa

SEQ ID NO: 14572 - RNA, 1743 nt, Artificial Sequence
  mRNA product Design a-2 (A100) comprising derived and/or modified sequence from LASV(AV;Clade V)__CCA30314__GPC (opt4)
aggagaguccgcucagccagguugcagaagcggcuuagcguguguccuaaucuucucucugcguguagguaggccugugccgcaaacaagcuuaccaugggccagaucgugaccuucuuccaggaggugccccacgugaucgaggaggugaugaacaucgugcugaucgcccugagcauccuggccgugcugaagggccuguacaacaucgccaccugcggccugaucggccugaucaccuuccugcugcugugcggcagaagcugcagcagcaaccuguacaagggcguguacgagcugcagagccuggaccugaacauggagacccugaacaugaccaugccccugagcugcaccaagaacaacagccaccacuacaucagagugggcaacgacaccggccuggagcugacccugaccaacaccagcauccugaaccacaaguucugcaaccugagcgacgcccacaagaaggaccuguacgaccacgcccugaugagcaucaucagcaccuuccaccugagcauccccaacuucaaccaguacgaggccaugagcugcgacuucaacggcggcaagaucagcgugcaguacaaccugagccacagcuacgccaucgacgccgccaaccacugcggcaccguggccaacggcauccugcagaccuucaugagaauggccuggggcggcagcuacaucgcccuggacagcggcagaggcaacugggacugcaucaugaccagcuaccaguaccugaucauccagaacaccaccugggagaaccacugccaguucagcagacccagccccaucggcuaccugggccugcugagccagagaaccagagacaucuacaucagcagaagacugcugggcaccuucaccuggacccugagcgacagcgagggcaacgccacccccggcggcuacugccugaccagauggaugcugaucgaggccgagcugaagugcuucggcaacaccgccguggccaagugcaacgagaagcacgacgaggaguucugcgacaugcugagacuguucgacuucaacaagcaggccaucagcagacugaagagcgaggcccagaugagcauccagcugaucaacaaggccgugaacgcccugaucaacgaccagcugaucaugaagaaccaccugagagacaucaugggcauccccuacugcaacuacagcaaguacugguaccugaaccacaccaucaccggcaagaccagccugcccaagugcuggcuggugagcaacggcagcuaccugaacgagacccacuucagcgacgacaucgagcagcaggccgacaacaugaucaccgagaugcugcagaaggaguacauggagagacagggcaagaccccccugggccugguggaccuguucguguucagcaccagcuucuaccugaucagcaucuuccugagacuggugaagauccccacccacagacacaucgugggcaagcccugccccaagccccacagacugaaccacaugggcaucugcagcugcggccuguacaagcagcccggcgugcccgugagauggaagagaugaggacuagucccuguucccagagcccacuuuuuuuucuuuuuuugaaauaaaauagccugucuuucagaucuaaaaaaaaaaaaaaaaaaaaaaaaaaaaaaaaaaaaaaaaaaaaaaaaaaaaaaaaaaaaaaaaaaaaaaaaaaaaaaaaaaaaaaaaaaaaaaaaaaaa

SEQ ID NO: 14573 - RNA, 1740 nt, Artificial Sequence
  mRNA product Design a-2 (A100) comprising derived and/or modified sequence from LASV(Togo/2016/7082;Clade VI)__AMR44577__GPC (opt4)
aggagaguccgcucagccagguugcagaagcggcuuagcguguguccuaaucuucucucugcguguagguaggccugugccgcaaacaagcuuaccaugggccagaucaucaccuucuuccaggaggugccccacgugaucgaggaggugaugaacaucgugcugaucgcccugagccugcuggccauccugaagggcguguacaacguggccaccugcggcaucaucggccuggugaccuuccuguuccugugcggcagaagcugcagccugaucuacaagggcagcuacgagcugcagacccuggagcugaacauggagacccugaacaugaccaugccccugagcugcaccaagaacagcagccaccacuacaucagagugggcaacgagaccggccuggagcugacccugaccaacaccagcaucaucaaccacaaguucugcaaccugagcgacgcccacaagagaaaccuguacgaccacgcccugaugagcauccugagcaccuuccaccugagcauccccaacuucaaccaguacgaggccaugagcugcgacuucaacggcggcaagaucagcgugcaguacaaccugagccacgccuacgccguggacgccgccgagcacugcggcaccguggccaacggcgugcugcagaccuucaugagaauggccuggggcggcagcuacaucgcccuggacagcggcagaggcaacugggacugcaucaugaccagcuaccaguaccugaucauccagaacaccaccugggaggaccacugccaguucagcagacccagccccaucggcuaccugggccugcugagccagagaaccagagacaucuacaucagcagaagacugcugggcaccuucaccuggacccugagcgacagcgagggcaacgagacccccggcggcuacugccugaccagauggaugcugaucgaggccgagcugaagugcuucggcaacaccgccguggccaagugcaacgagaagcacgacgaggaguucugcgacaugcugagacuguucgacuucaacaagcaggccauccagagacugaagagcgaggcccagaugagcauccagcugaucaacaaggccgugaacgcccugaucaacgaccagcugaucaugaagaaccaccugagagacaugaugggcauccccuacugcaacuacagcaaguacugguaccugaaccacaccagcagcggcagaaccagccugcccaagugcuggcuggugagcaacggcagcuaccugaacgagacccacuucagcgacgacaucgagcagcaggccgacaacaugaucaccgagaugcugcagaaggaguacaucgacagacagggcaagaccccccugggccugguggaccuguucguguucagcaccagcuucuaccugaucagcaucuuccugcaccugaucaagauccccacccacagacacaucgugggcaagcccugccccaagccccacagacugaaccacaugggcaucugcagcugcggccuguacaagcagcccggcgugcccaccagauggaagagaugaggacuagucccuguucccagagcccacuuuuuuuucuuuuuuugaaauaaaauagccugucuuucagaucuaaaaaaaaaaaaaaaaaaaaaaaaaaaaaaaaaaaaaaaaaaaaaaaaaaaaaaaaaaaaaaaaaaaaaaaaaaaaaaaaaaaaaaaaaaaaaaaaaaaa

SEQ ID NO: 14574 - RNA, 1740 nt, Artificial Sequence
  mRNA product Design a-2 (A100) comprising derived and/or modified sequence from LASV(KAK-428;Clade n.d. (VII))__ANH09740__GPC (opt4)
aggagaguccgcucagccagguugcagaagcggcuuagcguguguccuaaucuucucucugcguguagguaggccugugccgcaaacaagcuuaccaugggccagaucgugaccuucuuccaggaggugccccacgugaucgaggaggugaugaacaucgugcugaucgcccugagccugcuggccauccugaagggccuguacaacuucgccaccugcggcgugaucggccugaucaccuuccugcugcugugcggcagaagcugcagcgccaccuacaagggccaguacgagcugcagacccuggagcugaacauggagagccugaacaugaccaugccccugagcugcaccaagaacaacagccaccacuacaucagagccggcaacaacaccggccuggagcugacccugaccaacaccagcaucaucagccacaaguucugcaaccugagcgacgcccacaagaagaaccuguacgaccacacccugaugagcaucaucaccaccuuccaccugagcauccccaacuucaaccaguacgaggccaugagcugcgacuucaacggcggcaagaucagcauccaguacaaccugagccacagcuacgccggcgacgccgcccagcacugcggcaccguggccaacggcgugcugcagaccuucaugagaauggccuggggcggcagcuaccuggcccuggacagcggcagaagaggcugggacugcaucaucagcagcuaccaguaccugaucauccagaacaccaccugggacgaccacugccaguucagcagacccagccccaucggcuaccugggcuucgugagccagaagaccagagacaucuacaucagcagaagacugcugggcaccuucaccuggacccugagcgacagcgagggccacgacaugcccggcggcuacugccugaccagauggaugcugaucgaggccgaccugaagugcuucggcaacaccgccguggccaagugcaacgagaagcacgacgaggaguucugcgacauguggagacuguucgacuucaacaagcaggccauccagagacugaaggccgaggcccagaugaacauccagcugaucaacaaggccgugaacgcccugaucaacgaccagcugaugaugaagaaccaccugagagacaucaugggcauccccuacugcaacuacagcaaguucugguaccugaacaacaccaccaccggcagaaccagccugcccagaugcuggcugaucagcaacggcagcuaccugaacgagacccacuucagcgacgacaucgagcagcaggccgacaacaugaucaccgagaugcugcagaaggaguacauggacagacagggcaagaccccccugggccugguggaccuguucguguucagcaccagcuucuaccugaucaccaucuuccugcaccuggugaagauccccacccacagacacaucgugggcaagcccugccccaagccccacagacugaaccacaugggcaucugcagcugcggccuguacaagcagcccggcgugcccgugagauggaagagaugaggacuagucccuguucccagagcccacuuuuuuuucuuuuuuugaaauaaaauagccugucuuucagaucuaaaaaaaaaaaaaaaaaaaaaaaaaaaaaaaaaaaaaaaaaaaaaaaaaaaaaaaaaaaaaaaaaaaaaaaaaaaaaaaaaaaaaaaaaaaaaaaaaaaa

SEQ ID NO: 14575 - RNA, 1740 nt, Artificial Sequence; identical to SEQ ID NO: 14569
  mRNA product Design a-2 (A100) comprising derived and/or modified sequence from LASV(Pinneo-NIG-1969;Clade I)__AIT17836__GPC (opt4)

SEQ ID NO: 14576 - RNA, 1740 nt, Artificial Sequence
  mRNA product Design a-2 (A100) comprising derived and/or modified sequence from LASV(ISTH0009-NIG-2011;Clade II)__AIT17404__GPC (opt4)
aggagaguccgcucagccagguugcagaagcggcuuagcguguguccuaaucuucucucugcguguagguaggccugugccgcaaacaagcuuaccaugggccagaucaucaccuucuuccaggaggugccccacgugaucgaggaggugaugaacaucgugcugaucgcccugagccugcuggccauccugaagggcaucuacaacguggccaccugcggccuguucggccuggugagcuuccugcugcugugcggcagaagcugcagcaccaccuacaagggcguguacgagcugcagacccuggagcuggacauggccagccugaacaugaccaugccccugagcugcaccaagaacaacagccaccacuacaucauggugggcaacgagaccggccuggagcugacccugaccaacaccagcaucaucaaccacaaguucugcaaccugagcgacgcccacaagaagaaccuguacgaccacgcccugaugagcaucaucagcaccuuccaccugagcauccccaacuucaaccaguacgaggccaugagcugcgacuucaacggcggcaagaucagcgugcaguacaaccugagccacgccuacgccguggacgccgccaaccacugcggcaccaucgccaacggcgugcugcagaccuucaugagaauggccuggggcggcagcuacaucgcccuggacagcggcaagggcagcugggacugcaucaugaccagcuaccaguaccugaucauccagaacaccaccugggaggaccacugccaguucagcagacccagccccaucggcuaccugggccugcugagccagagaaccagagacaucuacaucagcagaagacugcugggcaccuucaccuggacccugagcgacagcgagggcaacgagacccccggcggcuacugccugaccagauggaugcugaucgaggccgagcugaagugcuucggcaacaccgccguggccaagugcaacgagaagcacgacgaggaguucugcgacaugcugagacuguucgacuucaacaagcaggccaucagaagacugaagaccgaggcccagaugagcauccagcugaucaacaaggccgugaacgcccugaucaacgaccagcugaucaugaagaaccaccugagagacaucaugggcauccccuacugcaacuacagcaaguacugguaccugaaccacaccgugaccggcaagaccagccugcccagaugcuggcuggugagcaacggcagcuaccugaacgagacccacuucagcgacgacaucgagcagcaggccgacaacaugaucaccgagcugcugcagaaggaguacauggacagacagggcaagaccccccugggccugguggaccuguucguguucagcaccagcuucuaccugaucagcaucuuccugcaccugaucaagauccccacccacagacacaucaccggcaagcccugccccaagccccacagacugaaccacaugggcaucugcagcugcggccuguacaagcaccccggcgugcccgugaaguggaagagaugaggacuagucccuguucccagagcccacuuuuuuuucuuuuuuugaaauaaaauagccugucuuucagaucuaaaaaaaaaaaaaaaaaaaaaaaaaaaaaaaaaaaaaaaaaaaaaaaaaaaaaaaaaaaaaaaaaaaaaaaaaaaaaaaaaaaaaaaaaaaaaaaaaaaa

SEQ ID NO: 14577 - RNA, 1740 nt, Artificial Sequence
  mRNA product Design a-2 (A100) comprising derived and/or modified sequence from LASV(ISTH2010-NIG-2012;Clade II)__AIT17482__GPC (opt4)
aggagaguccgcucagccagguugcagaagcggcuuagcguguguccuaaucuucucucugcguguagguaggccugugccgcaaacaagcuuaccaugggccagaucaucaccuucuuccaggaggugccccacgugaucgaggaggugaugaacaucgugcugaucgcccugagccugcuggccauccugaagggcaucuacaacguggccaccugcggccuguucggccuggugagcuuccugcugcugugcggcagaagcugcagcaccaccuacaagggcguguacgagcugcagacccuggagcuggacauggccagccugaacaugaccaugccccugagcugcaccaagaacaacagccaccacuacaucauggugggcaacgagaccggccuggagcugacccugaccaacaccagcaucaucaaccacaaguucugcaaccugagcgacgcccacaagaagaaccuguacgaccacgcccugaugagcaucaucagcaccuuccaccugagcauccccaacuucaaccaguacgaggccaugagcugcgacuucaacggcggcaagaucagcgugcaguacaaccugagccacgccuacgccguggacgccgccaaccacugcggcaccaucgccaacggcgugcugcagaccuucaugagaauggccuggggcggcagcuacaucgcccuggacagcggcaagggcagcugggacugcaucaugaccagcuaccaguaccugaucauccagaacaucaccugggaggaccacugccaguucagcagacccagccccaucggcuaccugggccugcugagccagagaaccagagacaucuacaucagcagaagacugcugggcaccuucaccuggacccugagcgacagcgagggcaacgagacccccggcggcuacugccugaccagauggaugcugaucgaggccgagcugaagugcuucggcaacaccgccguggccaagugcaacgagaagcacgacgaggaguucugcgacaugcugagacuguucgacuucaacaagcaggccaucagaagacugaagaccgaggcccagaugagcauccagcugaucaacaaggccgugaacgcccugaucaacgaccagcugaucaugaagaaccaccugagagacaucaugggcauccccuacugcaacuacagcaaguacugguaccugaaccacaccgugaccggcaagaccagccugcccagaugcuggcuggugagcaacggcagcuaccugaacgagacccacuucagcgacgacaucgagcagcaggccgacaacaugaucaccgagcugcugcagaaggaguacaucgacagacagggcaagaccccccugggccugguggaccuguucguguucagcaccagcuucuaccugaucagcaucuuccugcaccuggugaagauccccacccacagacacguggugggcaagcccugccccaagccccacagacugaaccacaugggcaucugcagcugcggccuguacaagcaccccggcgugcccgugaaguggaagagaugaggacuagucccuguucccagagcccacuuuuuuuucuuuuuuugaaauaaaauagccugucuuucagaucuaaaaaaaaaaaaaaaaaaaaaaaaaaaaaaaaaaaaaaaaaaaaaaaaaaaaaaaaaaaaaaaaaaaaaaaaaaaaaaaaaaaaaaaaaaaaaaaaaaaa

SEQ ID NO: 14578 - RNA, 1740 nt, Artificial Sequence
  mRNA product Design a-2 (A100) comprising derived and/or modified sequence from LASV(Lassa virus/H.sapiens-wt/NGA/2015/ISTH_0543;Clade II)__AVO03639__GPC (opt4)
aggagaguccgcucagccagguugcagaagcggcuuagcguguguccuaaucuucucucugcguguagguaggccugugccgcaaacaagcuuaccaugggccagaucaucaccuucuuccaggaggugccccacgugaucgaggaggugaugaacaucgugcugaucgcccugagccugcuggccauccugaagggcaucuacaacguggccaccugcggccuguucggccuggugagcuuccugcugcugugcggcagaagcugcagcaccaccuacaagggcguguacgagcugcagacccuggagcuggacauggccaaccugaacaugaccaugccccugagcugcaccaagaacaacagccaccacuacaucauggugggcaacgagaccggccuggagcugacccugaccaacaccagcaucaucaaccacaaguucugcaaccugagcgacgcccacaagaagaaccuguacgaccacgcccugaugagcaucaucagcaccuuccaccugagcauccccaacuucaaccaguacgaggccaugagcugcgacuucaacggcggcaagaucagcgugcaguacaaccugagccacaccuacgccguggacgccgccaaccacugcggcaccaucgccaacggcgugcugcagaccuucaugagaauggccuggggcggcagcuacaucgcccuggacagcggcaagggcagcugggacugcaucaugaccagcuaccaguaccuggugauccagaacaccaccugggaggaccacugccaguucagcagacccagccccaucggcuaccugggccugcugagccagagaaccagagacaucuacaucagcagaagacugcugggcaccuucaccuggacccugagcgacagcgagggcaacgagacccccggcggcuacugccugaccagauggaugcugaucgaggccgagcugaagugcuucggcaacaccgccguggccaagugcaacgagaagcacgacgaggaguucugcgacaugcugagacuguucgacuucaacaagcaggccaucagaagacugaagaccgaggcccagaugagcauccagcugaucaacaaggccgugaacgcccugaucaacgaccagcugaucaugaagaaccaccugagagacaucaugggcauccccuacugcaacuacagcaaguacugguaccugaaccacaccgugaccggcaagaccagccugcccagaugcuggcuggugagcaacggcagcuaccugaacgagacccacuucagcgacgacaucgagcagcaggccgacaacaugaucaccgagcugcugcagaaggaguacaucgacagacagggcaagaccccccugggccugguggaccuguucguguucagcaccagcuucuaccugaucagcaucuuccugcaccuggugaagauccccacccacagacacaucaccggcaagcccugccccaagccccacagacugaaccacaugggcaucugcagcugcggccuguacaagcaccccggcgugcccgugaaguggaagagaugaggacuagucccuguucccagagcccacuuuuuuuucuuuuuuugaaauaaaauagccugucuuucagaucuaaaaaaaaaaaaaaaaaaaaaaaaaaaaaaaaaaaaaaaaaaaaaaaaaaaaaaaaaaaaaaaaaaaaaaaaaaaaaaaaaaaaaaaaaaaaaaaaaaaa

SEQ ID NO: 14579 - RNA, 1740 nt, Artificial Sequence
  mRNA product Design a-2 (A100) comprising derived and/or modified sequence from LASV(Lassa virus/H.sapiens-wt/NGA/2016/ISTH_0009;Clade II)__AVO03571__GPC (opt4)
aggagaguccgcucagccagguugcagaagcggcuuagcguguguccuaaucuucucucugcguguagguaggccugugccgcaaacaagcuuaccaugggccagaucaucaccuucuuccaggaggugccccacgugaucgaggaggugaugaacaucgugcugaucgcccugagccugcuggccauccugaagggcaucuacaacguggccaccugcggccugcugggccuggugagcuuccugcugcugugcggcagaagcugcagcaccaccuacaagggcguguacgagcugcagacccuggagcuggacauggccagccugaacaugaccaugccccugagcugcaccaagaacaacagccaccacuacaucauggugggcaacgagaccggccuggagcugacccugaccaacaccagcaucaucaaccacaaguucugcaaccugagcgacgcccacaagaagaaccuguacgaccacgcccugaugagcaucaucagcaccuuccaccugagcauccccaacuucaaccaguacgaggccaugagcugcgacuucaacggcggcagaaucagcgugcaguacaaccugagccacagcuacgccguggacgccgccaaccacugcggcaccaucgccaacggcgugcugcagaccuucaugagaauggccuggggcggcagcuacaucgcccuggacagcggcaagggcagcugggacugcaucaugaccagcuaccaguaccugaucauccagaacaccaccugggaggaccacugccaguucagcagacccagccccaucggcuaccugggccugcugagccagagaaccagagacaucuacaucagcagaagacugcugggcaccuucaccuggacccugagcgacagcgagggcaacgagacccccggcggcuacugccugaccagauggaugcugaucgaggccgagcugaagugcuucggcaacaccgccguggccaagugcaacgagaagcacgacgaggaguucugcgacaugcugagacuguucgacuucaacaagcaggccaucagaagacugaagaccgaggcccagaugagcauccagcugaucaacaaggccgugaacgcccugaucaacgaccagcugaucaugaagaaccaccugagagacaucaugggcauccccuacugcaacuacagcaaguacugguaccugaaccacaccgugaccggcaagaccagccugcccagaugcuggcuggugagcaacggcagcuaccugaacgagacccacuucagcgacgacaucgagcagcaggccgacaacaugaucaccgagcugcugcagaaggaguacaucgacagacagggcaagaccccccugggccugguggaccuguucguguucagcaccagcuucuaccugaucagcaucuuccugcaccuggugaagauccccacccacagacacaucaccggcaagcccugccccaagccccacagacugaaccacaugggcaucugcagcugcggccuguacaaccaccccggcgugcccgugaaguggaagagaugaggacuagucccuguucccagagcccacuuuuuuuucuuuuuuugaaauaaaauagccugucuuucagaucuaaaaaaaaaaaaaaaaaaaaaaaaaaaaaaaaaaaaaaaaaaaaaaaaaaaaaaaaaaaaaaaaaaaaaaaaaaaaaaaaaaaaaaaaaaaaaaaaaaaa

SEQ ID NO: 14580 - RNA, 1740 nt, Artificial Sequence
  mRNA product Design a-2 (A100) comprising derived and/or modified sequence from LASV(Lassa virus/H.sapiens-wt/NGA/2016/ISTH_0017;Clade II)__AVO03567__GPC (opt4)
aggagaguccgcucagccagguugcagaagcggcuuagcguguguccuaaucuucucucugcguguagguaggccugugccgcaaacaagcuuaccaugggccagaucaucaccuucuuccaggaggugccccacgugaucgaggaggugaugaacaucgugcugaucgcccugagccugcuggccauccugaagggcaucuacaacguggccaccugcggccuguucggccuggugagcuuccugcugcugugcggcagaagcugcagcaccaccuacaagggcguguacgagcugcagacccuggagcuggacauggccagccugaacaugaccaugccccugagcugcaccaagaacaacagccaccacuacaucauggugggcaacgagaccggccuggagcugacccugaccaacaccagcaucaucaaccacaaguucugcaaccugagcgacgcccacaagaagaaccuguacgaccacgcccugaugagcaucaucagcaccuuccaccugagcauccccaacuucaaccaguacgaggccaugagcugcgacuucaacggcggcaagaucagcgugcaguacaaccugagccacaccuacgccaucgacgccgccaaccacugcggcaccaucgccaacggcgugcugcagaccuucaugagaauggccuggggcggcagcuacaucgcccuggacagcggcaagggcagcugggacugcaucaugaccagcuaccaguaccugaucauccagaacaccaccugggaggaccacugccaguucagcagacccagccccaucggcuaccugggccugcugagccagagaaccagagacaucuacaucagcagaagacugcugggcaccuucaccuggacccugagcgacagcgagggcaacgagacccccggcggcuacugccugaccagauggaugcugaucgaggccgagcugaagugcuucggcaacaccgccguggccaagugcaacgagaagcacgacgaggaguucugcgacaugcugagacuguucgacuucaacaagcaggccaucagaagacugaagaccgaggcccagaugagcauccagcugaucaacaaggccgugaacgcccugaucaacgaccagcugaucaugaagaaccaccugagagacaucaugggcauccccuacugcaacuacagcaaguacugguaccugaaccacaccgugaccggcaagaccagccugcccagaugcuggcuggugagcaacggcagcuaccugaacgagacccacuucagcgacgacaucgagcagcaggccgacaacaugaucaccgagcugcugcagaaggaguacauggacagacagggcaagaccccccugggccugguggaccuguucguguucagcaccagcuucuaccugaucagcaucuuccugcaccuggugagaauccccacccacagacacgugaucggcaagcccugccccaagccccacagacugaaccacaugggcaucugcagcugcggccuguacaagcaccccggcgugcccgugaaguggaagagaugaggacuagucccuguucccagagcccacuuuuuuuucuuuuuuugaaauaaaauagccugucuuucagaucuaaaaaaaaaaaaaaaaaaaaaaaaaaaaaaaaaaaaaaaaaaaaaaaaaaaaaaaaaaaaaaaaaaaaaaaaaaaaaaaaaaaaaaaaaaaaaaaaaaaa

SEQ ID NO: 14581 - RNA, 1740 nt, Artificial Sequence
  mRNA product Design a-2 (A100) comprising derived and/or modified sequence from LASV(Lassa virus/H.sapiens-wt/NGA/2018/ISTH_0959;Clade II)__AVV65099__GPC (opt4)
aggagaguccgcucagccagguugcagaagcggcuuagcguguguccuaaucuucucucugcguguagguaggccugugccgcaaacaagcuuaccaugggccagaucaucaccuucuuccaggaggugccccacgugaucgaggaggugaugaacaucgugcugaucgcccugagccugcuggccauccugaagggcaucuacaacguggugaccugcggccuguucggccuggugagcuuccugcugcugugcggcagaagcugcagcaccaccuacaagggcguguacgagcugcagacccuggagcuggacauggccagccugaacaugaccaugccccugagcugcaccaagaacaacagccaccacuacaucauggugggcaacgagaccggccuggagcugacccugaccaacaccagcaucaucaaccacaaguucugcaaccugagcgacgcccacaagaagaaccuguacgaccacgcccugaugagcaucaucagcaccuuccaccugagcauccccaacuucaaccaguacgaggccaugagcugcgacuucaacggcggcaagaucagcgugcaguacaaccugagccacgccuacgccaucgacgccgccaaccacugcggcaccaucgccaacggcgugcugcagaccuucaugagaauggccuggggcggcagcuacaucgcccuggacagcggcaagggcagcugggacugcaucaugaccagcuaccaguaccugaucauccagaacaccaccugggaggaccacugccaguucagcagacccagccccaucggcuaccugggccugcugagccagagaaccagagacaucuacaucagcagaagacugcugggcaccuucaccuggacccugagcgacagcgagggcaacgagacccccggcggcuacugccugaccagauggaugcugaucgaggccgagcugaagugcuucggcaacaccgccguggccaagugcaacgagaagcacgacgaggaguucugcgacaugcugagacuguucgacuucaacaagcaggccaucagaagacugaagaccgaggcccagaugagcauccagcugaucaacaaggccgugaacgcccugaucaacgaccagcugaucaugaagaaccaccugagagacaucaugggcauccccuacugcaacuacagcaaguacugguaccugaaccacaccgugaccggcaagaccagccugcccagaugcuggcuggugagcaacggcagcuaccugaacgagacccacuucagcgacgacaucgagcagcaggccgacaacaugaucaccgagcugcugcagaaggaguacaucgacagacagggcaagaccccccugggccugguggaccuguucguguucagcaccagcuucuaccugaucagcaucuuccugcaccuggugaagauccccacccacagacacgugaucggcaagcccugccccaagccccacagacugaaccacaugggcaucugcagcugcggccuguacaagcaccccggcgugcccgugaaguggaagagaugaggacuagucccuguucccagagcccacuuuuuuuucuuuuuuugaaauaaaauagccugucuuucagaucuaaaaaaaaaaaaaaaaaaaaaaaaaaaaaaaaaaaaaaaaaaaaaaaaaaaaaaaaaaaaaaaaaaaaaaaaaaaaaaaaaaaaaaaaaaaaaaaaaaaa

SEQ ID NO: 14582 - RNA, 1740 nt, Artificial Sequence
  mRNA product Design a-2 (A100) comprising derived and/or modified sequence from LASV(LASV003-NIG-2008;Clade II)__AIT17580__GPC (opt4)
aggagaguccgcucagccagguugcagaagcggcuuagcguguguccuaaucuucucucugcguguagguaggccugugccgcaaacaagcuuaccaugggccagaucaucaccuucuuccaggaggugccccacgugaucgaggaggugaugaacaucgugcugaucgcccugagccugcuggccauccugaagggcaucuacaacguggccaccugcggccuguucggccuggugagcuuccugcugcugugcggcagaagcugcagcaccaccuacaagggcguguacgagcugcagacccuggagcuggacauggccagccugaacaugaccaugccccugagcugcaccaagaacaacagccaccacuacaucauggugggcaacgagaccggccuggagcugacccugaccaacaccagcaucaucaaccacaaguucugcaaccugagcgacgcccacaagaagaaccuguacgaccacgcccugaugagcaucaucagcaccuuccaccugagcauccccaacuucaaccaguacgaggccaugagcugcgacuucaacggcggcaagaucagcgugcaguacaaccugagccacaccuacgccguggacgccgccaaccacugcggcaccaucgccaacggcgugcugcagaccuucaugagaauggccuggggcggcagcuacaucgcccuggacagcggcaagggcagcugggacugcaucaugaccagcuaccaguaccugaucauccagaacaccaccugggaggaccacugccaguucagcagacccagccccaucggcuaccugggccugcugagccagagaaccagagacaucuacaucagcagaagacugcugggcaccuucaccuggacccugagcgacagcgagagcaacgagacccccggcggcuacugccugaccagauggaugcugaucgaggccgagcugaagugcuucggcaacaccgccguggccaagugcaacgagaagcacgacgaggaguucugcgacaugcugagacuguucgacuucaacaagcaggccaucagaagacugaaggccgaggcccagaugagcauccagcugaucaacaaggccgugaacgcccugaucaacgaccagcugaucaugaagaaccaccugagagacaucaugggcauccccuacugcaacuacagcaaguacugguaccugaaccacaccgugaccggcagaaccagccugcccagaugcuggcuggugagcaacggcagcuaccugaacgagacccacuucagcgacgacaucgagcagcaggccgacaacaugaucaccgagcugcugcagaaggaguacauggacagacagggcaagaccccccugggccugguggaccuguucguguucagcaccagcuucuaccugaucagcaucuuccugcaccuggugaagauccccacccacagacacgugaucggcaagcccugccccaagccccacagacugaaccacaugggcaucugcagcugcggccuguacaagcaccccggcgugcccgugaaguggaagagaugaggacuagucccuguucccagagcccacuuuuuuuucuuuuuuugaaauaaaauagccugucuuucagaucuaaaaaaaaaaaaaaaaaaaaaaaaaaaaaaaaaaaaaaaaaaaaaaaaaaaaaaaaaaaaaaaaaaaaaaaaaaaaaaaaaaaaaaaaaaaaaaaaaaaa

SEQ ID NO: 14583 - RNA, 1740 nt, Artificial Sequence
  mRNA product Design a-2 (A100) comprising derived and/or modified sequence from LASV(LASV035-NIG-2009;Clade II)__AIT17588__GPC (opt4)
aggagaguccgcucagccagguugcagaagcggcuuagcguguguccuaaucuucucucugcguguagguaggccugugccgcaaacaagcuuaccaugggccagaucaucaccuucuuccaggaggugccccacgugaucgaggaggugaugaacaucgugcugaucgcccugagccugcuggccauccugaagggcaucuacaacguggccaccugcggccuguucggccuggugagcuuccugcugcugugcggcagaagcugcagcaccaccuacaagggcguguacgagcugcagacccuggagcuggacauggccagccugaacaugaccaugccccugagcugcaccaagaacaacagccaccacuacaucauggugggcaacgagaccggccuggagcugacccugaccaacaccagcaucaucaaccacaaguucugcaaccugagcgacgcccacaagaagaaccuguacgaccacgcccugaugagcaucaucagcaccuuccaccugagcauccccaacuucaaccaguacgaggccaugagcugcgacuucaacggcggcaagaucagcgugcaguacaaccugagccacgccuacgccguggacgccgccaaccacugcggcaccaucgccaacggcgugcugcagaccuucaugagaauggccuggggcggcagcuacaucgcccuggacagcggcaagggcagcugggacugcaucaugaccagcuaccaguaccugaucauccagaacaccaccugggaggaccacugccaguucagcagacccagccccaucggcuaccugggccugcugagccagagaaccagagacaucuacaucagcagaagacugcugggcaccuucaccuggacccugagcgacagcgagggcaacgagacccccggcggcuacugccugaccagauggaugcugaucgaggccgagcugaagugcuucggcaacaccgccguggccaagugcaacgagaagcacgacgaggaguucugcgacaugcugagacuguucgacuucaacaagcaggccaucagaagacugaaggccgaggcccagaugagcauccagcugaucaacaaggccgugaacgcccugaucaacgaccagcugaucaugaagaaccaccugagagacaucaugggcauccccuacugcaacuacagcaaguacugguaccugaaccacaccgugaccggcaagaccagccugcccagaugcuggcuggugagcaacggcagcuaccugaacgagacccacuucagcgacgacaucgagcagcaggccgacaacaugaucaccgagcugcugcagaaggaguacaucgacagacagggcaagaccccccugggccugguggaccuguucguguucagcaccagcuucuaccugaucagcaucuuccugcaccuggugaagauccccacccacagacacgugaucggcaagcccugccccaagccccacagacugaaccacaugggcaucugcagcugcggccuguacaagcaccccggcgugcccgugaaguggaagagaugaggacuagucccuguucccagagcccacuuuuuuuucuuuuuuugaaauaaaauagccugucuuucagaucuaaaaaaaaaaaaaaaaaaaaaaaaaaaaaaaaaaaaaaaaaaaaaaaaaaaaaaaaaaaaaaaaaaaaaaaaaaaaaaaaaaaaaaaaaaaaaaaaaaaa

SEQ ID NO: 14584 - RNA, 1740 nt, Artificial Sequence
  mRNA product Design a-2 (A100) comprising derived and/or modified sequence from LASV(LASV1000-NIG-2009;Clade II)__AIT17782__GPC (opt4)
aggagaguccgcucagccagguugcagaagcggcuuagcguguguccuaaucuucucucugcguguagguaggccugugccgcaaacaagcuuaccaugggccagaucaucaccuucuuccaggaggugccccacgugaucgaggaggugaugaacaucgugcugaucgcccugagccugcuggccauccugaagggcaucuacaacguggccaccugcggccuguucggccuggugagcuuccugcugcugugcggcagaagcugcagcaccaccuacaagggcguguacgagcugcagacccuggagcuggacauggccagccugaacaugaccaugccccugagcugcaccaagaacaacagccaccacuacaucauggugggcaacgagaccggccuggagcugacccugaccaacaccagcaucaucaaccacaaguucugcaaccugagcgacgcccacaagaagaaccuguacgaccacgcccugaugagcaucaucagcaccuuccaccugagcauccccaacuucaaccaguacgaggccaugagcugcgacuucaacggcggcaagaucagcgugcaguacaaccugagccacaccuacgccguggacgccgccaaccacugcggcaccaucgccaacggcgugcugcagaccuucaugagaauggccuggggcggcagcuacaucgcccuggacagcggcaagggcagcugggacugcaucaugaccagcuaccaguaccugaucauccagaacaccaccugggaggaccacugccaguucagcagacccagccccaucggcuaccugggccugcugagccagagaaccagagacaucuacaucagcagaagacugcugggcaccuucaccuggacccugagcgacagcgagggcaacgagacccccggcggcuacugccugaccagauggaugcugaucgaggccgagcugaagugcuucggcaacaccgccguggccaagugcaacgagaagcacgacgaggaguucugcgacaugcugagacuguucgacuucaacaagcaggccaucaagagacugaagaccgaggcccagaugagcauccagcugaucaacaaggccgugaacgcccugaucaacgaccagcugaucaugaagaaccaccugagagacaucaugggcauccccuacugcaacuacagcaaguacugguaccugaaccacaccgugaccggcaagaccagccugcccagaugcuggcuggugagcaacggcagcuaccugaacgagacccacuucagcgacgacaucgagcagcaggccgacaacaugaucaccgagcugcugcagaaggaguacaucgacagacagggcaagaccccccugggccugguggaccuguucguguucagcaccagcuucuaccugaucagcaucuuccugcaccuggugaagauccccacccacagacacguggugggcaagcccugccccaagccccacagacugaaccacaugggcaucugcagcugcggccuguacaagcaccccggcgugcccgugaaguggaagagaugaggacuagucccuguucccagagcccacuuuuuuuucuuuuuuugaaauaaaauagccugucuuucagaucuaaaaaaaaaaaaaaaaaaaaaaaaaaaaaaaaaaaaaaaaaaaaaaaaaaaaaaaaaaaaaaaaaaaaaaaaaaaaaaaaaaaaaaaaaaaaaaaaaaaa

SEQ ID NO: 14585 - RNA, 1740 nt, Artificial Sequence
  mRNA product Design a-2 (A100) comprising derived and/or modified sequence from LASV(LASV221-NIG-2010;Clade II)__AIT17624__GPC (opt4)
aggagaguccgcucagccagguugcagaagcggcuuagcguguguccuaaucuucucucugcguguagguaggccugugccgcaaacaagcuuaccaugggccagaucaucaccuucuuccaggaggugccccacgugaucgaggaggugaugaacaucgugcugaucgcccugagccugcuggccauccugaagggcaucuacaacguggccaccugcggccuguucggccuggugagcuuccugcugcugugcggcagaagcugcagcaccaccuacaagggcguguacgagcugcagacccuggagcuggacauggccagccugaacaugaccaugccccugagcugcaccaagaacaacagccaccacuacaucauggugggcaacgagaccggccuggagcugacccugaccaacaccagcaucaucaaccacaaguucugcaaccugagcgacgcccacaagaagaaccuguacgaccacgcccugaugagcaucaucagcaccuuccaccugagcauccccaacuucaaccaguacgaggccaugagcugcgacuucaacggcggcaagaucagcgugcaguacaaccugagccacaccuacgccaucgacgccgccaaccacugcggcaccaucgccaacggcgugcugcagaccuucaugagaauggccuggggcggcagcuacaucgcccuggacagcggcaagggcagcugggacugcaucaugaccagcuaccaguaccugaucauccagaacaccaccugggaggaccacugccaguucagcagacccagccccaucggcuaccugggccugcugagccagagaaccagagacaucuacaucagcagaagacugcugggcaccuucaccuggacccugagcgacagcgagggcaacgagacccccggcggcuacugccugaccagauggaugcugaucgaggccgagcugaagugcuucggcaacaccgccguggccaagugcaacgagaagcacgacgaggaguucugcgacaugcugagacuguucgacuucaacaagcaggccaucagaagacugaagaccgaggcccagaugagcauccagcugaucaacaaggccgugaacgcccugaucaacgaccagcugaucaugaagaaccaccugagagacaucaugggcauccccuacugcaacuacagcaaguacugguaccugaaccacaccgugaccggcaagaccagccugcccagaugcuggcuggugagcaacggcagcuaccugaacgagacccacuucagcgacgacaucgagcagcaggccgacaacaugaucaccgagaugcugcagaaggaguacauggacagacagggcaagaccccccugggccugguggaccuguucguguucagcaccagcuucuaccugaucagcaucuuccugcaccuggugaagauccccacccacagacacgugaucggcaagcccugccccaagccccacagacugaaccacaugggcaucugcagcugcggccuguacaagcaccccggcgugcccgugaaguggaagagaugaggacuagucccuguucccagagcccacuuuuuuuucuuuuuuugaaauaaaauagccugucuuucagaucuaaaaaaaaaaaaaaaaaaaaaaaaaaaaaaaaaaaaaaaaaaaaaaaaaaaaaaaaaaaaaaaaaaaaaaaaaaaaaaaaaaaaaaaaaaaaaaaaaaaa

SEQ ID NO: 14586 - RNA, 1740 nt, Artificial Sequence
  mRNA product Design a-2 (A100) comprising derived and/or modified sequence from LASV(LASV237-NIG-2010;Clade II)__AIT17638__GPC (opt4)
aggagaguccgcucagccagguugcagaagcggcuuagcguguguccuaaucuucucucugcguguagguaggccugugccgcaaacaagcuuaccaugggccagaucaucaccuucuuccaggaggugccccacgugaucgaggaggugaugaacaucgugcugaucgcccugagccugcuggccauccugaagggcaucuacaacguggccaccugcggccuguucggccuggugagcuuccugcugcugugcggcagaagcugcagcaccaccuacaagggcguguacgagcugcagacccuggagcuggacauggccagccugaacaugaccaugccccugagcugcaccaagaacaacagccaccacuacaucauggugggcaacgagaccggccuggagcugacccugaccaacaccagcaucaucaaccacaaguucugcaaccugagcgacgcccacaagaaggaccuguacgaccacgcccugaugagcaucaucagcaccuuccaccugagcauccccaacuucaaccaguacgaggccaugagcugcgacuucaacggcggcaagaucagcgugcaguacaaccugagccacaccuacgccguggacgccgccaaccacugcggcaccaucgccaacggcgugcugcagaccuucaugagaauggccuggggcggcagcuacaucgcccuggacagcggcaagggcagcugggacugcaucaugaccagcuaccaguaccugaucauccagaacaccaccugggaggaccacugccaguucagcagacccagccccaucggcuaccugggccugcugagccagagaaccagagacaucuacaucagcagaagacugcugggcaccuucaccuggacccugagcgacagcgagggcaacgagacccccggcggcuacugccugaccagauggaugcugaucgaggccgagcugaagugcuucggcaacaccgccguggccaagugcaacgagaagcacgacgaggaguucugcgacaugcugagacuguucgacuucaacaagcaggccaucagaagacugaagaccgaggcccagaugagcauccagcugaucaacaaggccgugaacgcccugaucaacgaccagcugaucaugaagaaccaccugagagacaucaugggcauccccuacugcaacuacagcaaguacugguaccugaaccacaccgugaccggcaagaccagccugcccagaugcuggcuggugagcaacggcagcuaccugaacgagacccacuucagcgacgacaucgagcagcaggccgacaacaugaucaccgagcugcugcagaaggaguacauggacagacagggcaagaccccccugggccugguggaccuguucguguucagcaccagcuucuaccugaucagcaucuuccugcaccugaucaagauccccacccacagacacaucaccggcaagcccugccccaagccccacagacugaaccacaugggcaucugcagcugcggccuguacaagcaccccggcgugcccgugaaguggaagagaugaggacuagucccuguucccagagcccacuuuuuuuucuuuuuuugaaauaaaauagccugucuuucagaucuaaaaaaaaaaaaaaaaaaaaaaaaaaaaaaaaaaaaaaaaaaaaaaaaaaaaaaaaaaaaaaaaaaaaaaaaaaaaaaaaaaaaaaaaaaaaaaaaaaaa

SEQ ID NO: 14587 - RNA, 1740 nt, Artificial Sequence
  mRNA product Design a-2 (A100) comprising derived and/or modified sequence from LASV(LASV253-NIG-2011;Clade II)__AIT17670__GPC (opt4)
aggagaguccgcucagccagguugcagaagcggcuuagcguguguccuaaucuucucucugcguguagguaggccugugccgcaaacaagcuuaccaugggccagaucaucaccuucuuccaggaggugccccacgugaucgaggaggugaugaacaucgugcugaucgcccugagccugcuggccauccugaagggcaucuacaacguggccaccugcggccuguucggccuggugagcuuccugcugcugugcggcagaagcugcagcaccaccuacaagggcguguacgagcugcagacccuggagcuggacauggccagccugaacaugaccaugccccugagcugcaccaagaacaacagccaccacuacaucauggugggcaacgagaccggccuggagcugacccugaccaacaccagcaucaucaaccacaaguucugcaaccugagcgacgcccacaagaagaaccuguacgaccacgcccugaugagcaucaucagcaccuuccaccugagcauccccaacuucaaccaguacgaggccaugagcugcgacuucaacggcggcaagaucagcgugcaguacaaccugagccacaccuacgccguggacgccgccaaccacugcggcaccaucgccaacggcgugcugcagaccuucaugagaauggccuggggcggcagcuacaucgcccuggacagcggcaagggcagcugggacugcaucaugaccagcuaccaguaccugaucauccagaacaccaccugggaggaccacugccaguucagcagacccagccccaucggcuaccugggccugcugagccagagaaccagagacaucuacaucagcagaagacugcugggcaccuucaccuggacccugagcgacagcgagggcaacgagacccccggcggcuacugccugaccagauggaugcugaucgaggccgagcugaagugcuucggcaacaccgccguggccaagugcaacgagaagcacgacgaggaguucugcgacaugcugagacuguucgacuucaacaagcaggccaucagaagacugaaggccgaggcccagaugagcauccagcugaucaacaaggccgugaacgcccugaucaacgaccagcugaucaugaagaaccaccugagagacaucaugggcauccccuacugcaacuacagcaaguacugguaccugaaccacaccgugaccggcagaaccagccugcccagaugcuggcuggugagcaacggcagcuaccugaacgagacccacuucagcgacgacaucgagcagcaggccgacaacaugaucaccgagcugcugcagaaggaguacaucgacagacagggcaagaccccccugggccugguggaccuguucguguucagcaccagcuucuaccugaucagcaucuuccugcaccuggugaagauccccacccacagacacaucaucggcaagcccugccccaagccccacagacugaaccacaugggcaucugcagcugcggccuguacaagcaccccggcgugcccgugaaguggaagagaugaggacuagucccuguucccagagcccacuuuuuuuucuuuuuuugaaauaaaauagccugucuuucagaucuaaaaaaaaaaaaaaaaaaaaaaaaaaaaaaaaaaaaaaaaaaaaaaaaaaaaaaaaaaaaaaaaaaaaaaaaaaaaaaaaaaaaaaaaaaaaaaaaaaaa

SEQ ID NO: 14588 - RNA, 1740 nt, Artificial Sequence
  mRNA product Design a-2 (A100) comprising derived and/or modified sequence from LASV(LASV254-NIG-2011;Clade II)__AIT17674__GPC (opt4)
aggagaguccgcucagccagguugcagaagcggcuuagcguguguccuaaucuucucucugcguguagguaggccugugccgcaaacaagcuuaccaugggccagaucaucaccuucuuccaggaggugccccacgugaucgaggaggugaugaacaucgugcugaucgcccugagccugcuggccauccugaagggcaucuacaacguggccaccugcggccuguucggccuggugagcuuccugcugcugugcggcagaagcugcagcaccaccuacaagggcguguacgagcugcagacccuggagcuggacaugaccaaccugaacaugaccaugccccugagcugcaccaagaacaacagccaccacuacaucauggugggcaacgagaccggccuggagcugacccugaccaacaccagcaucaucaaccacaaguucugcaaccugagcgacgcccacaagaagaaccuguacaaccacgcccugaugagcaucaucagcaccuuccaccugagcauccccaacuucaaccaguacgaggccaugagcugcgacuucaacggcggcaagaucagcgugcaguacaaccugagccacagcuacgccguggacgccgccaaccacugcggcaccaucgccaacggcgugcugcagaccuucaugagaauggccuggggcggcagcuacaucgcccuggacagcggcaagggcaacugggacugcaucaugaccagcuaccaguaccugaucauccagaacaccaccugggaggaccacugccaguucagcagacccagccccaucggcuaccugggccugcugagccagagaaccagagacaucuacaucagcagaagacugcugggcaccuucaccuggacccugagcgacagcgagggcaacgagacccccggcggcuacugccugaccagauggaugcugaucgaggccgagcugaagugcuucggcaacaccgccguggccaagugcaacgagaagcacgacgaggaguucugcgacaugcugagacuguucgacuucaacaagcaggccaucagaagacugaagaccgaggcccaggccaacauccagcugaucaacaaggccgugaacgcccugaucaacgaccagcugaucaugaagaaccaccugagagacaucaugggcauccccuacugcaacuacagcaaguacugguaccugaaccacaccgugaccggcaagaccagccugcccagaugcuggcuggugagcaacggcagcuaccugaacgagacccacuucagcgacgacaucgagcagcaggccgacaacaugaucaccgagcugcugcagaaggaguacauggacagacagggcaagaccccccugggccugguggaccuguucguguucagcaccagcuucuaccugaucagcaucuuccugcaccuggugaagauccccacccacagacacgugaucggcaagcccugccccaagccccacagacugaaccacaugggcaucugcagcugcggccuguacaagcaccccggcgugcccgugaaguggaagagaugaggacuagucccuguucccagagcccacuuuuuuuucuuuuuuugaaauaaaauagccugucuuucagaucuaaaaaaaaaaaaaaaaaaaaaaaaaaaaaaaaaaaaaaaaaaaaaaaaaaaaaaaaaaaaaaaaaaaaaaaaaaaaaaaaaaaaaaaaaaaaaaaaaaaa

SEQ ID NO: 14589 - RNA, 1740 nt, Artificial Sequence
  mRNA product Design a-2 (A100) comprising derived and/or modified sequence from LASV(Nig08-A19;Clade III)__ADU56618__GPC (opt4)
aggagaguccgcucagccagguugcagaagcggcuuagcguguguccuaaucuucucucugcguguagguaggccugugccgcaaacaagcuuaccaugggccagaucgugaccuucuuccaggaggugccccacgugaucgaggaggugaugaacaucgugcugaucgcccugagcauccuggccauccugaagggccuguacaacaucgccaccugcggccugaucggccuggugaccuuccugcugcugagcggcagaagcugcagcaugaccuacaagggcguguacgagcugcagacccuggagcugaacaugaacacccugaacaugaccaugccccugagcugcaccaagaacaacagccaccacuacaucauggugggcaacgagaccggccuggagcugacccugaccaacaccagccugcugcaccacaaguucugcaaccugagcgacgcccacaagaagaaccuguacgaccacacccugaugagcaucaucagcaccuuccaccugagcauccccaacuucaaccaguacgaggccaugagcugcgacuucaacggcggcaagaucaccgugcaguacaaccugagccacagcuacgccaucgacgccgccaaccacugcggcaccguggccaacggcgugcugcagaccuucaugagaauggccuggggcggcagcuacaucgcccuggacagcggcagaggcaagugggacugcaucaugaccagcuaccaguaccugaucauccagaacaccaccugggaggaccacugccaguucagcagacccagccccaucggcuaccugggccugcugagccagagaaccagagacaucuacaucagcagaagacugcugggcaccuucaccuggacccugagcgacagcgagggcaacgagacccccggcggcuacugccugaccagauggaugcugaucgaggccgagcugaagugcuucggcaacaccgccguggccaagugcaacgagaagcacgacgaggaguucugcgacaugcugagacuguucgacuucaacaagcaggccaucagaagacugaaggccgaggcccagaugagcauccagcugaucaacaaggccgugaacgcccugaucaacgaccagcugaucaugaagaaccaccugagagacaucaugggcauccccuacugcaacuacagcaaguacugguaccugaaccacaccagcaccggcagaaccagccugcccagaugcuggcuggugagcaacggcagcuaccugaacgagacccacuucagcgacgacaucgagcagcaggccgacaacaugaucaccgagaugcugcagaaggaguaccuggacagacagggcaagaccccccugggccugguggaccuguucguguucagcaccagcuucuaccugaucagcaucuuccugcaccuggugaagauccccacccacagacacaucgugggcaagcccugccccaagccccacagacugaaccacaugggcaucugcagcugcggccuguacaagcagcccggcgugcccgugagauggaagagaugaggacuagucccuguucccagagcccacuuuuuuuucuuuuuuugaaauaaaauagccugucuuucagaucuaaaaaaaaaaaaaaaaaaaaaaaaaaaaaaaaaaaaaaaaaaaaaaaaaaaaaaaaaaaaaaaaaaaaaaaaaaaaaaaaaaaaaaaaaaaaaaaaaaaa

SEQ ID NO: 14590 - RNA, 1743 nt, Artificial Sequence
  mRNA product Design a-2 (A100) comprising derived and/or modified sequence from LASV(G1180-SLE-2010;Clade IV)__AIT17168__GPC (opt4)
aggagaguccgcucagccagguugcagaagcggcuuagcguguguccuaaucuucucucugcguguagguaggccugugccgcaaacaagcuuaccaugggccagaucgugaccuucuuccaggaggugccccacgugaucgaggaggugaugaacaucgugcugaucgcccugagcauccuggccgugcugaagggccuguacaacuucgccaccugcggccuggugggccugcugaccuuccugcugcugugcggcagaagcugcaccgccagcagauacaagggcguguacgagcugcagacccuggagcugaacauggagacccugaacaugaccaugccccugagcugcaccaagaacaacagccaccacuacaucauggugggcaacgagaccggccuggagcugacccugaccaacaccagcaucaucaaccacaaguucugcaaccugagcgacgcccacaagaagaaccuguacgaccacgcccugaugagcaucaucagcaccuuccaccugagcauccccaacuucaaccaguacgaggccaugagcugcgacuucaacggcggcaagaucagcgugcaguacaaccugagccacagcuacgccggcgacgccgccaaccacugcggcaccguggccaacggcgugcugcagaccuucaugagaauggccuggggcggcagcuacaucgcccuggacagcggccacggcagcugggacugcaucaugaccagcuaccaguaccugaucauccagaacaccaccugggaggaccacugccaguucagcagacccagccccaucggcuaccugggccugcugagccagagaaccagagacaucuacaucagcagaagacugcugggcaccuucaccuggacccugagcgacagcgagggcaaggacacccccggcggcuacugccugaccagauggaugcugaucgaggccgagcugaagugcuucggcaacaccgccguggccaagugcaacgagaagcacgacgaggaguucugcgacaugcugagacuguucgacuucaacaagcaggccauccagagacugaaggccgaggcccagaugagcauccagcugaucaacaaggccgugaacgcccugaucaacgaccagcugaucaugaagaaccaccugagagacaucaugggcauccccuacugcaacuacagcaaguacugguaccugaaccacaccaccaccggcaagaccagccugcccaagugcuggcuggugagcaacggcagcuaccugaacgagacccacuucagcgacgacaucgagcagcaggccgacaacaugaucaccgagaugcugcagaaggaguacauggagagacagggcaagaccccccugggccugguggaccuguucguguucagcaccagcuucuaccugaucagcaucuuccugcaccuggugaagauccccacccacagacacaucgugggcaagagcugccccaagccccacagacugaaccacaugggcaucugcagcugcggccuguacaagcagcccggcgugcccgugaaguggaagagaugaggacuagucccuguucccagagcccacuuuuuuuucuuuuuuugaaauaaaauagccugucuuucagaucuaaaaaaaaaaaaaaaaaaaaaaaaaaaaaaaaaaaaaaaaaaaaaaaaaaaaaaaaaaaaaaaaaaaaaaaaaaaaaaaaaaaaaaaaaaaaaaaaaaaa

SEQ ID NO: 14591 - RNA, 1743 nt, Artificial Sequence
  mRNA product Design a-2 (A100) comprising derived and/or modified sequence from LASV(G1442-SLE-2011;Clade IV)__AIT17180__GPC (opt4)
aggagaguccgcucagccagguugcagaagcggcuuagcguguguccuaaucuucucucugcguguagguaggccugugccgcaaacaagcuuaccaugggccagaucgugaccuucuuccaggaggugccccacgugaucgaggaggugaugaacaucgugcugaucgcccugagcauccuggccgugcugaagggccuguacaacguggccaccugcggccugaucggccuggugaccuuccugcugcugugcggcagaagcugcaccaccacccuguacaagggcguguacgagcugcagacccuggagcugaacauggagacccugaacaugaccaugccccugagcugcaccaagaacaacagccaccacuacaucagagugggcaacgagaccggccuggagcugacccugaccaacaccagcaucaucaaccacaaguucugcaaccugagcgacgcccacaagaagaaccuguacgaccacgcccugaugagcaucaucagcaccuuccaccugagcauccccaacuucaaccaguacgaggccaugagcugcgacuucaacggcggcaagaucagcgugcaguacaaccugagccacagcuacgccggcgacgccgccaaccacugcggcaccguggccaacggcgugcugcagaccuucaugagaauggccuggggcggcagcuacaucgcccuggacagcggcagaggcaacugggacugcaucaugaccagcuaccaguaccugaucauccagaacaccaccugggacgaccacugccaguucagcagacccagccccaucggcuaccugggccugcugagccagagaaccagagacguguacaucagcagaagacugcugggcaccuucaccuggacccugagcgacagcgagggcaaggacacccccggcggcuacugccugaccagauggaugcugaucgaggccgagcugaagugcuucggcaacaccgccguggccaagugcaacgagaagcacgacgaggaguucugcgacaugcugagacuguucgacuucaacaagcaggccauccagagacugaaggccgaggcccagaugagcauccagcugaucaacaaggccgugaacgcccugaucaacgaccagcugaucaugaagaaccaccugagagacaucaugggcauccccuacugcaacuacagcaaguacugguaccugaacaacaccgccaccggcaagaccagccugcccaagugcuggcugaucagcaacggcagcuaccugaacgagacccacuucagcgacgacaucgagcaggaggccgacaacaugaucaccgagaugcugcagaaggaguacauggagagacagggcaagaccccccugggccugguggaccuguucguguucagcaccagcuucuaccugaucagcaucuuccugcaccuggugaagauccccacccacagacacaucgugggcaagagcugccccaagccccacagacugaaccacaugggcaucugcagcugcggccuguacaagcagcccggcgugcccgugagauggaagagaugaggacuagucccuguucccagagcccacuuuuuuuucuuuuuuugaaauaaaauagccugucuuucagaucuaaaaaaaaaaaaaaaaaaaaaaaaaaaaaaaaaaaaaaaaaaaaaaaaaaaaaaaaaaaaaaaaaaaaaaaaaaaaaaaaaaaaaaaaaaaaaaaaaaaa

SEQ ID NO: 14592 - RNA, 1743 nt, Artificial Sequence
  mRNA product Design a-2 (A100) comprising derived and/or modified sequence from LASV(G3010-SLE-2013;Clade IV)__AIT17344__GPC (opt4)
aggagaguccgcucagccagguugcagaagcggcuuagcguguguccuaaucuucucucugcguguagguaggccugugccgcaaacaagcuuaccaugggccagaucgugaccuucuuccaggaggugccccacgugaucgaggaggugaugaacaucgugcugaucgcccugagcauccuggccgugcugaagggccuguacaacuucgccaccugcggccuggugggccuggugaccuuccugcugcugugcggcagaagcugcaccaccagccuguacaagggcguguacgagcugcagacccuggagcugaacauggagacccugaacaugaccaugccccugagcugcaccaagaacaacagccaccacuacaucauggugggcaacgagaccggccuggagcugacccugaccaacaccagcaucaucaaccacaaguucugcaaccugagcgacgcccacaagaagaaccuguacaaccacgcccugaugagcaucaucagcaccuuccaccugagcauccccaacuucaaccaguacgaggccaugagcugcgacuucaacggcggcaagaucagcgugcaguacaaccugagccacagcuacgccggcgacgccgccagccacugcggcaccguggccaacggcgugcugcagaccuucaugagaauggccuggggcggcagcuacaucgcccuggacagcggcuacggcaagugggacugcaucaugaccagcuaccaguaccugaucauccagaacaccaccugggaggaccacugccaguucagcagacccagccccaucggcuaccugggccugcugagccagagaaccagagacaucuacaucagcagaagacugcugggcaccuucaccuggacccugagcgacagcgagggcaaggacacccccggcggcuacugccugaccagauggaugcugaucgaggccgagcugaagugcuucggcaacaccgccguggccaagugcaacgagaagcacgacgaggaguucugcgacaugcugagacuguucgacuucaacaagcaggccauccagagacugaagaccgaggcccagaugagcauccagcugaucaacaaggccgugaacgcccugaucaacgaccagcugaucaugaagaaccaccugagagacaucaugggcauccccuacugcaacuacagcaaguacugguaccugaaccacaccaccaccggcaagaccagccugcccaagugcuggcuggugagcaacggcagcuaccugaacgagacccacuucagcgacgacaucgagcagcaggccgacaacaugaucaccgagaugcugcagaaggaguacauggagagacagggcaagaccccccugggccugguggaccuguucguguucagcaccagcuucuaccugaucagcaucuuccugcaccuggugaagauccccacccacagacacaucgugggcaagagcugccccaagccccacagacugaaccacaugggcaucugcagcugcggccuguacaagcagcccggcgugcccgugagauggaagagaugaggacuagucccuguucccagagcccacuuuuuuuucuuuuuuugaaauaaaauagccugucuuucagaucuaaaaaaaaaaaaaaaaaaaaaaaaaaaaaaaaaaaaaaaaaaaaaaaaaaaaaaaaaaaaaaaaaaaaaaaaaaaaaaaaaaaaaaaaaaaaaaaaaaaa

SEQ ID NO: 14593 - RNA, 1743 nt, Artificial Sequence
  mRNA product Design a-2 (A100) comprising derived and/or modified sequence from LASV(G502-SLE-2009;Clade IV)__AIT17126__GPC (opt4)
aggagaguccgcucagccagguugcagaagcggcuuagcguguguccuaaucuucucucugcguguagguaggccugugccgcaaacaagcuuaccaugggccagaucgugaccuucuuccaggaggugccccacgugaucgaggaggugaugaacaucgugcugaucgcccugagcauccuggccgugcugaagggccuguacaacuucgccaccugcggccuggugggccugcugaccuuccugcugcugugcggcagaagcugcaccaccggccuguacaagggcguguacgagcugcagacccuggagcugaacauggagacccugaacaugaccaugccccugagcugcaccaagaacaacagccaccacuacaucauggugggcaacgagaccggccuggagcugacccugaccaacaccagcaucaucaaccacaaguucugcaaccugagcgacgcccacaagaagaaccuguacgaccacgcccugaugagcaucaucagcaccuuccaccugagcauccccaacuucaaccaguacgaggccaugagcugcgacuucaacggcggcaagaucagcgugcaguacaaccugagccacagcuacgccggcgacgccgccgaccacugcggcaccguggccaacggcgugcugcagaccuucaugagaauggccuggggcggcagcuacaucgcccuggacagcggcagaggcagaugggacugcaucaugaccagcuaccaguaccugaucauccagaacaccaccugggaggaccacugccaguucagcagacccagccccaucggcuaccugggccugcugagccagagaaccagagacaucuacaucagcagaagacugcugggcaccuucaccuggacccugagcgacagcgagggcaaggacacccccggcggcuacugccugaccagauggaugcugaucgaggccgagcugaagugcuucggcaacaccgccguggccaagugcaacgagaagcacgacgaggaguucugcgacaugcugagacuguucgacuucaacaagcaggccauccagagacugaaggccgaggcccagaugagcauccagcugaucaacaaggccgugaacgcccugaucaacgaccagcuggugaugaagaaccaccugagagacaucaugggcauccccuacugcaacuacagcagauacugguaccugaaccacaccaccaccggcagaaccagccugcccaagugcuggcuggugagcaacggcagcuaccugaacgagacccacuucagcgacgacaucgagcagcaggccgacaacaugaucaccgagaugcugcagaaggaguacauggagagacagggcaagaccccccugggccugguggaccuguucguguucagcaccagcuucuaccugaucagcaucuuccugcaccuggugaagauccccacccacagacacaucgugggcaagagcugccccaagccccacagacugaaccacaugggcaucugcagcugcggccuguacaagcagcccggcgugcccgugaaguggaagagaugaggacuagucccuguucccagagcccacuuuuuuuucuuuuuuugaaauaaaauagccugucuuucagaucuaaaaaaaaaaaaaaaaaaaaaaaaaaaaaaaaaaaaaaaaaaaaaaaaaaaaaaaaaaaaaaaaaaaaaaaaaaaaaaaaaaaaaaaaaaaaaaaaaaaa

SEQ ID NO: 14594 - RNA, 1743 nt, Artificial Sequence
  mRNA product Design a-2 (A100) comprising derived and/or modified sequence from LASV(G733-SLE-2010;Clade IV)__AIT17154__GPC (opt4)
aggagaguccgcucagccagguugcagaagcggcuuagcguguguccuaaucuucucucugcguguagguaggccugugccgcaaacaagcuuaccaugggccagaucgugaccuucuuccaggaggugccccacgugaucgaggaggugaugaacaucgugcugaucgcccugagcauccuggccgugcugaagggccuguacaacuucgccaccugcggcaucgugggccuggugagcuuccugcugcugugcggcagaagcugcaccaccagccuguacaagggcguguacgagcugcagacccuggagcugaacauggagacccugaacaugaccaugccccugagcugcaccaagaacaacagccaccacuacaucauggugggcaacgagaccggccuggagcugacccugaccaacaccagcaucaucaaccacaaguucugcaaccugagcgacgcccacaagaagaaccuguacgaccacgcccugaugagcaucaucagcaccuuccaccugagcauccccaacuucaaccaguacgaggccaugagcugcgacuucaacggcggcaagaucagcgugcaguacaaccugagccacagcuacgccggcgacgccgccaaccacugcggcaccaucgccaacggcgugcugcagaccuucaugagaauggccuggggcggcagcuacaucgcccuggacagcggcagagacagaugggacugcaucaugaccagcuaccaguaccugaucauccagaacaccaccugggaggaccacugccaguucagcagacccagccccaucggcuaccugggccugcugagccagagaaccagagacaucuacaucagcagaagacugcugggcaccuucaccuggacccugagcgacagcgagggcaaggacacccccggcggcuacugccugaccagauggaugcugaucgaggccgagcugaagugcuucggcaacaccgccguggccaagugcaacgagaagcacgacgaggaguucugcgacaugcugagacuguucgacuucaacaagcaggccauccagagacugaaggccgaggcccagaugagcauccagcugaucaacaaggccgugaacgcccugaucaacgaccagcugaucaugaagaaccaccugagagacaucaugggcauccccuacugcaacuacagcaaguacugguaccugaaccacaccaccaccggcaagaccagccugcccaagugcuggcuggugagcaacggcagcuaccugaacgagacccacuucagcgacgacaucgagcagcaggccgacaacaugaucaccgagaugcugcagaaggaguacauggagagacagggcaagaccccccugggccugguggaccuguucguguucagcaccagcuucuaccugaucagcaucuuccugcaccuggugaagauccccacccacagacacguggugggcaagagcugccccaagccccacagacugaaccacaugggcaucugcagcugcggccuguacggccagcccggcgugcccgugaaguggaagagaugaggacuagucccuguucccagagcccacuuuuuuuucuuuuuuugaaauaaaauagccugucuuucagaucuaaaaaaaaaaaaaaaaaaaaaaaaaaaaaaaaaaaaaaaaaaaaaaaaaaaaaaaaaaaaaaaaaaaaaaaaaaaaaaaaaaaaaaaaaaaaaaaaaaaa

SEQ ID NO: 14595 - RNA, 1743 nt, Artificial Sequence
  mRNA product Design a-2 (A100) comprising derived and/or modified sequence from MOPV/LASV reassortant(IGS-1;Clade IV)__AFY05576__GPC (opt4)
aggagaguccgcucagccagguugcagaagcggcuuagcguguguccuaaucuucucucugcguguagguaggccugugccgcaaacaagcuuaccaugggccagaucgugaccuucuuccaggaggugccccacgugaucgaggaggugaugaacaucgugcugaucgcccugagcgugcuggccgugcugaagggccuguacaacuucgccaccugcggccuggugggccuggugaccuuccugcugcugugcggcagaagcugcaccaccagccuguacaagggcguguacgagcugcagacccuggagcugaacauggagacccugaacaugaccaugccccugagcugcaccaagaacaacagccaccacuacaucauggugggcaacgagaccggccuggagcugacccugaccaacaccagcaucaucaaccacaaguucugcaaccugagcgacgcccacaagaagaaccuguacgaccacgcccugaugagcaucaucagcaccuuccaccugagcauccccaacuucaaccaguacgaggccaugagcugcgacuucaacggcggcaagaucagcgugcaguacaaccugagccacagcuacgccggcgacgccgccaaccacugcggcaccguggccaacggcgugcugcagaccuucaugagaauggccuggggcggcagcuacaucgcccuggacagcggcagaggcaacugggacugcaucaugaccagcuaccaguaccugaucauccagaacaccaccugggaggaccacugccaguucagcagacccagccccaucggcuaccugggccugcugagccagagaaccagagacaucuacaucagcagaagacugcugggcaccuucaccuggacccugagcgacagcgagggcgaggacacccccggcggcuacugccugaccagauggaugcugaucgaggccgagcugaagugcuucggcaacaccgccguggccaagugcaacgagaagcacgacgaggaguucugcgacaugcugagacuguucgacuucaacaagcaggccauccagagacugaaggccgaggcccagaugagcauccagcugaucaacaaggccgugaacgcccugaucaacgaccagcugaucaugaagaaccaccugagagacaucaugggcauccccuacugcaacuacagcaaguacugguaccugaaccacaccaccaccggcagaaccagccugcccaagugcuggcuggugagcaacggcagcuaccugaacgagacccacuucagcgacgacaucgagcagcaggccgacaacaugaucaccgagaugcugcagaaggaguacauggagagacagggcaagaccccccugggccugguggaccuguucguguucagcaccagcuucuaccugaucagcaucuuccugcaccuggugaagauccccacccacagacacaucgugggcaagagcugccccaagccccacagacugaaccacaugggcaucugcagcugcggccuguacaagcagcccggcgugcccgugaaguggaagagaugaggacuagucccuguucccagagcccacuuuuuuuucuuuuuuugaaauaaaauagccugucuuucagaucuaaaaaaaaaaaaaaaaaaaaaaaaaaaaaaaaaaaaaaaaaaaaaaaaaaaaaaaaaaaaaaaaaaaaaaaaaaaaaaaaaaaaaaaaaaaaaaaaaaaa

SEQ ID NO: 14596 - RNA, 1743 nt, Artificial Sequence
  mRNA product Design a-2 (A100) comprising derived and/or modified sequence from LASV(LM765-SLE-2012;Clade IV)__AIT17814__GPC (opt4)
aggagaguccgcucagccagguugcagaagcggcuuagcguguguccuaaucuucucucugcguguagguaggccugugccgcaaacaagcuuaccaugggccagaucgugaccuucuuccaggaggugccccacgugaucgaggaggugaugaacaucgugcugaucgcccugagcauccuggccgugcugaagggccuguacaacuucgccaccugcggccuggugggccuggugaccuuccugcugcugugcggcagaagcugcaccaccagccuguacaagggcguguacgagcugcagacccuggagcugaacauggagacccugaacaugaccaugccccugagcugcaccaagaacaacagccaccacuacaucauggugggcaacgagaccggccuggagcugacccugaccaacaccagcaucaucgaccacaaguucugcaaccugagcgacgcccacagaaagaaccuguacgaccacgcccugaugagcaucaucagcaccuuccaccugagcauccccaacuucaaccaguacgaggccaugagcugcgacuucaacggcggcaagaucagcgugcaguacaaccugagccacagcuacgccaaggacgccgccgaccacugcggcaccguggccaacggcgugcugcagaccuucaugagaauggccuggggcggcagcuacaucgcccuggacagcggcagaggcagaugggacugcaucaugaccagcuaccaguaccugaucauccagaacaccaccugggaggaccacugccaguucagcagacccagccccaucggcuaccugggccugcugagccagagaaccagagacaucuacaucagcagaagacugcugggcaccuucaccuggacccugagcgacagcgagggcaaggacacccccggcggcuacugccugaccagauggaugcugaucgaggccgagcugaagugcuucggcaacaccgccguggccaagugcaacgagaagcacgacgaggaguucugcgacaugcugagacuguucgacuucaacaagcaggccauccagagacugaaggccgaggcccagaugagcauccagcugaucaacaaggccgugaacgcccugaucaacgaccagcugaucaugaagaaccaccugagagacaucaugggcauccccuacugcaacuacagcaaguacugguaccugaaccacaccaccaccggcaagaccagccugcccaagugcuggcuggugagcaacggcagcuaccugaacgagacccacuucagcgacgacaucgagcagcaggccgacaacaugaucaccgagaugcugcagaaggaguacauggagagacagggcaagaccccccugggccugguggaccuguucguguucagcaccagcuucuaccugaucagcaucuuccugcaccuggugaagauccccacccacagacacaucgugggcaagcccugccccaagccccacagacugaaccacaugggcaucugcagcugcggccuguacaagcagcccggcgugcccgugaaguggaagagaugaggacuagucccuguucccagagcccacuuuuuuuucuuuuuuugaaauaaaauagccugucuuucagaucuaaaaaaaaaaaaaaaaaaaaaaaaaaaaaaaaaaaaaaaaaaaaaaaaaaaaaaaaaaaaaaaaaaaaaaaaaaaaaaaaaaaaaaaaaaaaaaaaaaaa

SEQ ID NO: 14597 - RNA, 1743 nt, Artificial Sequence
  mRNA product Design a-2 (A100) comprising derived and/or modified sequence from LASV(LM776-SLE-2012;Clade IV)__AIT17824__GPC (opt4)
aggagaguccgcucagccagguugcagaagcggcuuagcguguguccuaaucuucucucugcguguagguaggccugugccgcaaacaagcuuaccaugggccagaucgugaccuucuuccaggaggugccccacgugaucgaggaggugaugaacaucgugcugaucgcccugagcauccuggccgugcugaagggccuguacaacuucgccaccugcggccuggugggccuggugaccuuccugcugcugugcggcagaagcugcaccaccagcguguacaagggcguguacgagcugcagacccuggagcugaacauggagacccugaacaugaccaugccccugagcugcaccaagaacaacagccaccacuacaucauggugggcaacgagaccggccuggagcugacccugaccaacaccagcaucaucaaccacaaguucugcaaccugagcgacgcccacaagaagaaccuguacgaccacgcccugaugagcaucaucagcaccuuccaccugagcauccccaacuucaaccaguacgaggccaugagcugcgacuucaacggcggcaagaucagcgugcaguacaaccugagccacagcuacgccggcgacgccgccaaccacugcggcaccguggccaacggcgugcugcagaccuucaugagaauggccuggggcggcagcuacaucgcccuggacagcggccacggcaagugggacugcaucaugaccagcuaccaguaccugaucauccagaacaccaccugggaggaccacugccaguucagcagacccagccccaucggcuaccugggccugcugagccagagaaccagagacaucuacaucagcagaagacugcugggcaccuucaccuggacccugagcgacagcgagggcaaggacacccccggcggcuacugccugaccagauggaugcugaucgaggccgagcugaagugcuucggcaacaccgccguggccaagugcaacgagaagcacgacgaggaguucugcgacaugcugagacuguucgacuucaacaagcaggccauccagagacugaaggccgaggcccagaugagcauccagcugaucaacaaggccgugaacgcccugaucaacgaccagcugaucaugaagaaccaccugagagacaucaugggcauccccuacugcaacuacagcaaguacugguaccugaaccacaccaccaccggcaagaccagccugcccaagugcuggcuggugagcaacggcagcuaccugaacgagacccacuucagcgacgacaucgagcagcaggccgacaacaugaucaccgagaugcugcagaaggaguacauggagagacagggcaagaccccccugggccugguggaccuguucguguucagcaccagcuucuaccugaucagcaucuuccugcaccuggugaagauccccacccacagacacaucgugggcaagagcugccccaagccccacagacugaaccacaugggcaucugcagcugcggccuguacaagcagcccggcgugcccgugagauggaagagaugaggacuagucccuguucccagagcccacuuuuuuuucuuuuuuugaaauaaaauagccugucuuucagaucuaaaaaaaaaaaaaaaaaaaaaaaaaaaaaaaaaaaaaaaaaaaaaaaaaaaaaaaaaaaaaaaaaaaaaaaaaaaaaaaaaaaaaaaaaaaaaaaaaaaa

SEQ ID NO: 14598 - RNA, 1743 nt, Artificial Sequence
  mRNA product Design a-2 (A100) comprising derived and/or modified sequence from LASV(Mad39;Clade IV)__ANH09722__GPC (opt4)
aggagaguccgcucagccagguugcagaagcggcuuagcguguguccuaaucuucucucugcguguagguaggccugugccgcaaacaagcuuaccaugggccagaucgugaccuucuuccaggaggugccccacgugaucgaggaggugaugaacaucgugcugaucgcccugagcauccuggccgugcugaagggccuguacaacguggccaccugcggccugaucggccuggugaccuuccugcugcugugcggcagaagcugcaccaccacccuguacaagggcguguacgagcugcaggcccuggagcugaacauggagacccugaacaugaccaugccccugagcugcaccaagaacaacagccaccacuacaucagagugggcaacgagaccggccuggagcugacccugaccaacaccagccugaucaaccacaaguucugcaaccugagcgacgcccacaagaagaaccuguacgaccacgcccugaugagcaucaucagcaccuuccaccugagcauccccaacuucaaccaguacgaggccaugagcugcgacuucaacgacggcaagaucagcgugcaguacaaccugagccacaccuacgccggcgacaccgccaaccacugcggcaccguggccaacggcgugcugcagaccuucaugagaauggccuggggcggcagcuacaucgcccuggacagcggcagaggcggcugggacugcaucaugaccagcuaccaguaccugaucauccagaacaccaccugggaggaccacugccaguucagcagacccagccccaucggcuaccugggccugcugagccagagaaccagagacaucuacaucagcagaagacugcugggcaccuucaccuggacccugagcgacagcgagggcaaggacacccccggcggcuacugccugaccagauggaugcugaucgaggccgagcugaagugcuucggcaacaccgccguggccaagugcaacgagaagcacgacgaggaguucugcgacaugcugagacuguucgacuucaacaagcaggccauccagagacugaaggccgaggcccagaugagcauccagcugaucaacaaggccgugaacgcccugaucaacgaccagcugaucaugaagaaccaccugagagacaucaugggcauccccuacugcaacuacagcaaguacugguaccugaaccacaccgugaccggcaagaccagccugcccaagugcuggcuggugagcaacggcagcuaccugaacgagacccacuucagcgacgacaucgagcagcaggccgacaacaugaucaccgagaugcugcagaaggaguacauggagagacagggcaagaccccccugggccugguggaccuguucguguucagcaccagcuucuaccugaucagcaucuuccugcaccuggugaagauccccacccacagacacguggugggcaagcccugccccaagccccacagacugaaccacaugggcaucugcagcugcggcuucuacaagcagcccggcgugcccgugagauggaagagaugaggacuagucccuguucccagagcccacuuuuuuuucuuuuuuugaaauaaaauagccugucuuucagaucuaaaaaaaaaaaaaaaaaaaaaaaaaaaaaaaaaaaaaaaaaaaaaaaaaaaaaaaaaaaaaaaaaaaaaaaaaaaaaaaaaaaaaaaaaaaaaaaaaaaa

SEQ ID NO: 14599 - RNA, 1743 nt, Artificial Sequence
  mRNA product Design a-2 (A100) comprising derived and/or modified sequence from LASV(Z0947-SLE-2011;Clade IV)__AIT17840__GPC (opt4)
aggagaguccgcucagccagguugcagaagcggcuuagcguguguccuaaucuucucucugcguguagguaggccugugccgcaaacaagcuuaccaugggccagaucgugaccuucuuccaggaggugccccacgugaucgaggaggugaugaacaucgugcugaucgcccugagcauccuggccgugcugaagggccuguacaacuucgccaccugcggccuggugggccuggugaccuuccugcugcugugcggcagaagcugcaccaucagccuguacaagggcguguacgagcugcagacccuggagcugaacauggagacccugaacaugaccaugccccugagcugcaccaagaacaacagccaccacuacaucauggugggcaacgagaccggccuggagcugacccugaccaacaccagcaucaucaaccacaaguucugcaaccugagcgacgcccacaagaagaaccuguacgaccacgcccugaugagcaucaucagcaccuuccaccugagcauccccaacuucaaccaguacgaggccaugagcugcgacuucaacggcggcaagaucagcgugcaguacaaccugagccacagcuacgccggcgacgccgccaaccacugcggcaccguggccaacggcgugcugcagaccuucaugagaauggccuggggcggcagcuacaucgcccuggacagcggcagagacagaugggacugcaucaugaccagcuaccaguaccugaucauccagaacaccaccugggaggaccacugccaguucagcagacccagccccaucggcuaccugggccugcugagccagagaaccagagacaucuacaucagcagaagacugcugggcaccuucaccuggacccugagcgacagcgagggcaaggacacccccggcggcuacugccugaccagauggaugcugaucgaggccgagcugaagugcuucggcaacaccgccguggccaagugcaacgagaagcacgacgaggaguucugcgacaugcugagacuguucgacuucaacaagcaggccauccagagacugaaggccgaggcccagaugagcauccagcugaucaacaaggccgugaacgcccugaucaacgaccagcugaucaugaagaaccaccugagagacaucaugggcauccccuacugcaacuacagcaaguacugguaccugaaccacaccaccaccggcaagaccagccugcccaagugcuggcuggugagcaacggcagcuaccugaacgagacccacuucagcgacgacaucgagcagcaggccgacaacaugaucaccgagaugcugcagaaggaguacauggagagacagggcaagaccccccugggccugguggaccuguucguguucagcaccagcuucuaccugaucagcaucuuccugcaccuggugaagauccccacccacagacacaucgugggcaagcccugccccaagccccacagacugaaccacaugggcaucugcagcugcggccuguacaagcagcccggcgugcccgugaaguggaagagaugaggacuagucccuguucccagagcccacuuuuuuuucuuuuuuugaaauaaaauagccugucuuucagaucuaaaaaaaaaaaaaaaaaaaaaaaaaaaaaaaaaaaaaaaaaaaaaaaaaaaaaaaaaaaaaaaaaaaaaaaaaaaaaaaaaaaaaaaaaaaaaaaaaaaa

SEQ ID NO: 14600 - RNA, 1743 nt, Artificial Sequence
  mRNA product Design a-2 (A100) comprising derived and/or modified sequence from LASV(Josiah;Clade IV)__NP_694870__GPC (opt5)
aggagaguccgcucagccagguugcagaagcggcuuagcguguguccuaaucuucucucugcguguagguaggccugugccgcaaacaagcuuaccaugggccagaucgugaccuucuuucaagaggucccccacguuauugaagaggugaugaacaucgugcugauugcccucagcguccuggcugugcuuaaggggcuguacaauuucgccacaugcggacucguuggccuggugacguuucuucugcucugugggagauccugcaccacaucucuguauaaaggagucuacgaacugcagacccucgagcugaacauggaaacacuuaauaugaccaugccucugagcuguacaaagaacaauucccaucacuauaucauggugggcaacgagaccgggcucgagcugacgcuuaccaauacaucuauuaucaaccauaaauucugcaaucugagcgacgcgcacaagaaaaaccucuacgaucaugcucugauguccaucauuucuaccuuucaccugagcaucccgaauuucaaccaguaugaagccauguccugugacuuuaauggaggcaagauuagcguucaguacaaccucucucacuccuaugccggcgaugcugccaaucauugcgggacaguggcuaacggaguccugcaaaccuucaugcggauggccuggggcgggagcuacaucgcgcuugacucuggacgcggcaacugggauuguauuaugacguccuaccaguaucugaucauucagaauacaaccugggaggaccacugccaguuuagcagacccucuccuaucggguaccucggacugcuuucccaacggacacgcgauaucuauauuagcagacggcugcucggcaccuucaccuggacacuguccgacucugaaggcaaggauacgcccgggggauacugucugacccgcuggaugcucaucgaggccgagcugaaaugcuuuggcaacacagcuguggccaaguguaaugaaaaacaugacgaggaguucugcgauaugcuuagacuguuugacuucaacaagcaggcuauucagcggcucaaagccgaagcgcagaugagcauccaacugauuaauaaggccgugaacgcucuuaucaaugaucagcugaucaugaagaaccaccuccgcgacauuauggggaucccuuauugcaauuacuccaaauauugguaccugaaccacaccacaaccggaagaacgagccugcccaaguguuggcucgucucuaauggcuccuaccugaacgaaacacauuucagcgacgauauugagcagcaagccgacaauaugaucaccgagaugcuucagaaagaauauauggagcggcaggggaagaccccucugggacucguugaucuguuuguguucucuaccagcuuuuaccugauuuccaucuuccuucaccucgugaaaaucccgacacaucgccacauugucggcaagucuugccccaaaccucauagacugaaccacaugggcaucuguagcugcgggcuguauaagcagcccggagugccuguuaaguggaaacggugaggacuagucccuguucccagagcccacuuuuuuuucuuuuuuugaaauaaaauagccugucuuucagaucuaaaaaaaaaaaaaaaaaaaaaaaaaaaaaaaaaaaaaaaaaaaaaaaaaaaaaaaaaaaaaaaaaaaaaaaaaaaaaaaaaaaaaaaaaaaaaaaaaaaa

SEQ ID NO: 14601 - RNA, 1740 nt, Artificial Sequence
  mRNA product Design a-2 (A100) comprising derived and/or modified sequence from LASV(LP;Clade I)__AAF86701__GPC (opt5)
aggagaguccgcucagccagguugcagaagcggcuuagcguguguccuaaucuucucucugcguguagguaggccugugccgcaaacaagcuuaccaugggccagaucauuaccuucuuucaagaggugccccacgucaucgaagagguuaugaacauugugcugaucgcccucagccugcuugcuauucugaaggggcucuacaauaucgccacaugcggaaucauuggccugguggcguuccuuuuucugugugggaaauccugcucucucacgcugaagggaggcuaugaacugcagacccucgagcugaacauggaaacacuuaauaugaccaugccucugagcuguaccaaaaacuccucucaucacuacaucagagucgggaaugagacaggacucgagcugacacuuaccaacacgagcauuaucaaucauaaguucugcaaccuguccgacgcucacaaaaagaaucucuaugaucaugcccugaugucuauuaucagcaccuuucaccuguccauuccgaacuucaaucaguacgaagccaugagcugugacuuuaacggcggcaagaucucugugcaguauaaucucucccacagcuacgcuggggaugccgcugagcauugcggaacaguugccaacggcgugcugcaaaccuucaugcggauggcguggggagggcgcuauaucgcccuugacucuggcaaagggaauugggauuguauuaugacauccuaccaguaccugaucauucagaacaccacgugggaagaccacugccaguuuagcagacccucuccuaucggauaucucggccugcuuucccaacggacacgcgauauuuacaucagcagacggcugcucggcaccuucacauggacccuguccgacucugaggggaacgagacccccggaggcuauugucugacacgcuggaugcucaucgaagcugagcugaagugcuuugggaauacggccgucgcuaaauguaacgaaaagcaugaugaggaguucugcgacaugcuuagacuguuugauuucaauaaacaggccauucggcgccucaaggcggaagcccagaugagcauccagcugauuaacaaggcugugaaugcccuuaucaacgaccaacugauuaugaaaaaucaccucagagauaucaugggaaucccuuacugcaacuauuccaaguacugguaucugaaucacaccagcucuggccggacaucccugcccaaauguuggcucauuagcaacgggucuuaccugaaugagacccaguucagcgacgacaucgaacagcaagcugauaacaugauuacagagaugcuucagaaggaauacaucgagcgccagggaaaaaccccucugggccucguugacauuuuuaucuucuccacgucuuuuuaucugauuagcaucuuccugcaucuuaucaagauuccgacacacagacauaucgugggcaaacccugcccuaagccccaccggcucaaucauaugggggucuguuccugcggacuguacaagcacccuggcgugcccaccaaauggaagcgcugaggacuagucccuguucccagagcccacuuuuuuuucuuuuuuugaaauaaaauagccugucuuucagaucuaaaaaaaaaaaaaaaaaaaaaaaaaaaaaaaaaaaaaaaaaaaaaaaaaaaaaaaaaaaaaaaaaaaaaaaaaaaaaaaaaaaaaaaaaaaaaaaaaaaa

SEQ ID NO: 14602 - RNA, 1740 nt, Artificial Sequence
  mRNA product Design a-2 (A100) comprising derived and/or modified sequence from LASV(803213;Clade II)__AAF86703__GPC (opt5)
aggagaguccgcucagccagguugcagaagcggcuuagcguguguccuaaucuucucucugcguguagguaggccugugccgcaaacaagcuuaccaugggccagaucauuaccuucuuucaagaggugccccacgucaucgaagagguuaugaacauugugcugaucgcccucagccugcuugcuauucugaaggggaucuacaauguggccacaugcggacucuucggccugaucuccuuucuucugcucugugggagaucuugcagcgucacguauaaaggaguguacgaacugcagacccuggagcucaacauggcgaaucugaacaugacaaugccucuuuccuguaccaagaauaacucucaucacuauauuaugguuggcaaugaaacagggcuggagcucacccugacaaacaccagcaucauuaaucauaaauucugcaaccuuuccgacgcucacaagaaaaaucuguacgaucaugcccucaugucuaucauuagcacguuucaccuguccaucccgaacuucaaucaguaugaggccaugagcugugacuuuaacggaggcaagauuucugugcaguacaaucugucccacagcuucgcugucgaugccgcuaaccauugcggcaccaucgccaacggggugcuccaaacauuuaugcggauggcguggggaggcucuuauaucgcccuggacuccgggaagggaaauugggauuguauuaugaccagcuaccaguaccuuaucauucagaacacaaccugggaagaccacugccaguucucucgccccuccccuaucggcuaucuggggcuccugagccaaagaacgcgggauauuuacaucucccgcagacuucugggaacauuuaccuggacacucucugacagcgagggcaaugaagcucccggcggguauugucugacccgguggaugcugaucgaggccgagcucaaaugcuucggaaacaccgcuguugccaaguguaaugaaaaacaugaugaggaauuuugcgacaugcugcgccuuuucgauuucaacaagcaggcgauuaaaagacugaagacagaggcccagauguccauccagcucauuaauaaggcugugaacgcccugaucaaugaccaacuuauuaugaaaaaccaucugcgggauaucaugggcaucccuuacugcaauuauagccgcuacugguaucucaaccacacggucaccgggaagacaucucugcccagauguuggcugguguccaauggaagcuaccucaacgaaacccacuuuucugacgacauugagcagcaggcugauaauaugaucacagagaugcugcaaaaagaauacauggaccggcagggcaagaccccucuugggcugguggaucucuucgucuuuagcacguccuucuaucugauuucuaucuuucugcaccuuguuaaaauuccgacacaucgccacaucgugggaaagcccugcccuaaaccccauagacucaaccacaugggcauuuguagcugcggccuguacaagcacccuggggugcccgucaaguggaaacggugaggacuagucccuguucccagagcccacuuuuuuuucuuuuuuugaaauaaaauagccugucuuucagaucuaaaaaaaaaaaaaaaaaaaaaaaaaaaaaaaaaaaaaaaaaaaaaaaaaaaaaaaaaaaaaaaaaaaaaaaaaaaaaaaaaaaaaaaaaaaaaaaaaaaa

SEQ ID NO: 14603 - RNA, 1740 nt, Artificial Sequence
  mRNA product Design a-2 (A100) comprising derived and/or modified sequence from LASV(GA391;Clade III)__CAA36645__GPC (opt5)
aggagaguccgcucagccagguugcagaagcggcuuagcguguguccuaaucuucucucugcguguagguaggccugugccgcaaacaagcuuaccaugggccagaucgugaccuucuuucaagaggucccccacguuauugaagaggugaugaacaucgugcugauugcccucagcauccuggcuauucuuaaggggcuguacaaugucgccacaugcggacucaucggccuggugacguuccuucugcucuccgggagaucuuguagccugaucuauaaaggaaccuacgaacugcagacacucgagcugaacauggaaacccuuaauaugacaaugccucuguccugcaccaagaacaauucucaucacuauauucggguuggcaacgagacagggcucgagcugacccuuacgaauaccagcauccugaaccauaaauuuuguaaucucuccgacgcgcacaagcgcaaccuguacgaucauucucugaugagcauuaucuccacauuccaccucagcauuccgaauuuuaaccaguaugaagcuaugucuugcgacuucaauggaggcaaaaucaccgugcaguacaaccugucccacagcuuugccgucgaugccgcuggccauugugggacacuugccaauggagugcugcaaaccuucaugagaauggcuuggggcgggucuuauauugcccucgacuccggacggggcaacugggauugcaucaugacgagcuaccaguaccugaucauucagaacacaaccugggacgaucacugucaguuuucucgccccuccccuaucggguaucuuggacugcucagccaaagaacacgggacauuuacaucucccgcagacugcugggcaccuucaccuggacacucucugauagcgagggcaaugaaacgcccgggggauauugccugacccgguggaugcuuauugaggcggagcugaaguguuuuggcaacacagccguugcuaagugcaaugaaaaacaugacgaggaguucugugauaugcuccgccuguuugacuucaacaagcaggccaucagacggcuuaaaaccgaagcucagauguccauccagcugauuaauaaggccgugaacgcgcucaucaaugaucaacugauuaugaaaaaccaucugcgcgacaucauggggauuccuuacugcaauuauagcagauacugguaucucaaccacacaucuaccggaaagacgucccugccccggugcuggcuuaucagcaauggcucuuaccugaacgaaacaaaguucagcgacgauaucgagcagcaggccgacaauaugauuaccgagaugcuccaaaaagaauacaucgaucgccaggggaagaccccucugggacuggucgaccuuuuuguguucuccacaucuuuuuaucucauuagcaucuuccugcaccuggugaaaauuccgacccacagacauaucgucggcaagcccuguccuaaaccccaccggcucaaccauaugggcauuugcuccugugggcuguacaagcagccuggaguucccgugagauggaaacgcugaggacuagucccuguucccagagcccacuuuuuuuucuuuuuuugaaauaaaauagccugucuuucagaucuaaaaaaaaaaaaaaaaaaaaaaaaaaaaaaaaaaaaaaaaaaaaaaaaaaaaaaaaaaaaaaaaaaaaaaaaaaaaaaaaaaaaaaaaaaaaaaaaaaaa

SEQ ID NO: 14604 - RNA, 1743 nt, Artificial Sequence
  mRNA product Design a-2 (A100) comprising derived and/or modified sequence from LASV(AV;Clade V)__CCA30314__GPC (opt5)
aggagaguccgcucagccagguugcagaagcggcuuagcguguguccuaaucuucucucugcguguagguaggccugugccgcaaacaagcuuaccaugggccagaucgugaccuucuuucaagaggucccccacguuauugaagaggugaugaacaucgugcugauugcccucagcauccuggcuguccuuaaggggcuguacaauauugccacaugcggacucaucggccugaucacguuccuucugcucugugggagauccugcucuagcaaccuguauaaaggaguguacgaacugcagucccucgaccugaauauggagacccuuaacaugacaaugccucugucuuguaccaagaauaacagccaucacuauauucggguuggcaaugauacagggcucgaacugacccuuacaaacaccuccauccugaaucauaaauuuugcaaccucucugacgcgcacaagaaagaucuguacgaccaugcucugaugagcauuaucuccacguuccaccucagcauuccgaauuuuaaccaguaugaggccaugucuugugauuucaauggaggcaagaucuccgugcaguacaaccugagccacucuuaugccauugacgcugccaaucauugcggcaccgucgcuaacgggauccuucaaacauuuaugcgcauggccuggggaggcuccuacaucgcgcuggauagcgggagaggaaacugggacuguauuaugaccucuuaccaguaucucaucauucagaauacaaccugggagaaccacugccaguucucccggcccagcccuaucggcuaccuggggcuucugucccaacgcacgagagauauuuauaucucucggcgccuccugggaacauuuaccuggacacugagcgacuccgaaggcaaugccacccccggcggguacugucucaccagauggaugcugaucgaggcugaacuuaagugcuucggaaacacagccguggcuaaauguaaugagaagcaugaugaggaauuuugcgacaugcugcgccucuucgauuuuaacaaacaggccauuagccggcugaagucugaggcgcagauguccauccagcuuauuaauaaagccguuaacgcucugaucaaugaccaacucauuaugaagaaccaccugagagacaucaugggcaucccuuauugcaauuacagcaaguauugguaccugaaccacacgauuaccgggaaaacaucucuccccaaguguuggcuggugagcaauggauccuaccuuaacgaaacccauuucucugaugacaucgagcagcaggccgauaauaugauuacagaaaugcugcaaaaagaguauauggagcggcagggcaagaccccucucgggcuggucgaccuguucguguuuagcacguccuucuaccuuaucagcauuuuucuccgccuggugaaaaucccgacacacagacauauugucggaaagcccugcccuaaaccccaccggcugaaccauaugggcaucuguucuugcggccucuauaagcagccugggguucccgugcgcuggaagagaugaggacuagucccuguucccagagcccacuuuuuuuucuuuuuuugaaauaaaauagccugucuuucagaucuaaaaaaaaaaaaaaaaaaaaaaaaaaaaaaaaaaaaaaaaaaaaaaaaaaaaaaaaaaaaaaaaaaaaaaaaaaaaaaaaaaaaaaaaaaaaaaaaaaaa

SEQ ID NO: 14605 - RNA, 1740 nt, Artificial Sequence
  mRNA product Design a-2 (A100) comprising derived and/or modified sequence from LASV(Togo/2016/7082;Clade VI)__AMR44577__GPC (opt5)
aggagaguccgcucagccagguugcagaagcggcuuagcguguguccuaaucuucucucugcguguagguaggccugugccgcaaacaagcuuaccaugggccagaucauuaccuucuuucaagaggugccccacgucaucgaagagguuaugaacauugugcugaucgcccucagccugcuugcuauucugaaggggguguacaaugucgccacaugcggaaucaucggccucgugacguuccuguuucuuugugggagauccugcucucugauuuauaaaggaagcuacgaacuccagacccuggagcugaacauggaaacacucaauaugaccaugccucuguccuguacaaagaacucuagccaucacuauauccggguuggcaaugagaccgggcuugagcugacacucaccaacacguccauuaucaaucauaaauucugcaaccugucugacgcgcacaagcgcaaucuuuacgaucaugcucugaugagcauucucuccaccuuucaccugagcaucccgaacuucaaucaguaugaagccaugucuugugacuuuaacggaggcaaaauuuccgugcaguacaaucugagccacgccuaugcugucgaugccgcugagcauugcggcacaguggccaacgggguucuccaaaccuucaugagaauggcguggggaggcucuuacaucgcccuggacuccgggcggggaaauugggauuguaucaugacaagcuaccaguaucuuauuauccagaacaccacgugggaagaccacugccaguuuucucgccccuccccuauuggcuaccuggggcuccugagccaaagaacacgggauaucuauauuucccgcagacuucugggaaccuucacauggacccucucugacagcgagggcaacgagacccccggcggguacugucugacacgguggaugcugaucgaagcugagcucaagugcuuuggaaauacggccguggcuaaguguaacgaaaaacaugaugaggaguucugcgacaugcugcgccuuuuugauuucaauaagcaggccauccagagacugaaauccgaagcgcagaugagcauucaacucaucaacaaggccgucaaugcucugauuaacgaccagcuuaucaugaaaaaucaucugcgggauaugaugggcauuccuuauugcaacuacucuaaguauugguaccucaaucacaccuccagcgggcgcacaucucugcccaaguguuggcuggugagcaacggauccuaccucaaugagacccacuucucugacgacaucgaacagcaagccgauaacaugaucacagagaugcugcagaaagaauauauugacagacagggcaagaccccucuugggcugguggaucucuuugucuucagcacguccuuuuaccugaucagcauuuuccugcaccuuaucaaaauuccgacacaucggcacaucguuggaaagcccugcccuaaaccccaucgccucaaucacaugggcauuuguucuugcggccuguauaagcagccuggggugcccaccagauggaaacggugaggacuagucccuguucccagagcccacuuuuuuuucuuuuuuugaaauaaaauagccugucuuucagaucuaaaaaaaaaaaaaaaaaaaaaaaaaaaaaaaaaaaaaaaaaaaaaaaaaaaaaaaaaaaaaaaaaaaaaaaaaaaaaaaaaaaaaaaaaaaaaaaaaaaa

SEQ ID NO: 14606 - RNA, 1740 nt, Artificial Sequence
  mRNA product Design a-2 (A100) comprising derived and/or modified sequence from LASV(KAK-428;Clade n.d. (VII))__ANH09740__GPC (opt5)
aggagaguccgcucagccagguugcagaagcggcuuagcguguguccuaaucuucucucugcguguagguaggccugugccgcaaacaagcuuaccaugggccagaucgugaccuucuuucaagaggucccccacguuauugaagaggugaugaacaucgugcugauugcccucagccugcuugcuauccugaaggggcucuacaauuucgccacaugcggagucauuggccugaucacguuucuucugcucugugggagauccugcucugcgaccuauaaaggacaguacgaacugcagacacuggagcucaacauggaaagccugaauaugaccaugccucuuuccuguacaaagaacaauucucaucacuauauccgggcuggcaacaauaccgggcuggagcucacacugaccaacacgagcauuaucucccauaaauucugcaaucuuucugacgcccacaagaaaaaccuguacgaucauacccucaugagcauuaucacaaccuuucaccuguccauuccgaauuucaaccaguaugaggccaugagcugugacuuuaauggaggcaagaucucuauucaauacaaccugucccacagcuaugcuggcgaugccgcucagcauugcgggacaguggccaauggaguucuccagaccuucaugcgcauggcguggggcgggucuuaccuggcccuugacuccggaagacggggcugggauuguaucaucagcucuuaccaguaucugauuauccaaaacacgacaugggacgaucacugccaguuuucccgccccagcccuauuggguaccucggauucgugucccagaagaccagagacaucuauauuucucggcgccugcuuggcacauuuaccuggacccugagcgauuccgaaggccaugacaugcccgggggauacugucucacaagauggaugcugaucgaggcugaucugaaaugcuucggcaacacggccgucgcuaaguguaaugaaaaacacgacgaggaguuuugcgauauguggcgccucuucgacuucaacaagcaggccauccaacggcugaaagcggaagcccagaugaauauucagcuuaucaacaaggcugugaaugcccugauuaacgaccaacucaugaugaagaaucaccugagagauaucauggggauuccuuauugcaacuacagcaaauuuugguaucuuaauaacaccacaaccggacggacaucucugccccgcuguuggcucaucuccaauggcagcuaccugaacgagacccauuucucugacgauaucgaacagcaggcugacaauaugauuacggagaugcugcagaaggaauacauggauagacaagggaaaacaccucucggacugguugaccuuuuuguguucagcaccuccuuuuaucugaucaccauuuuccuccaccuggucaagaucccgacacaucggcacauugugggcaaacccugcccuaagccccaucgccugaaccacaugggcaucuguucuugcgggcuuuacaaacagccuggagugcccgucagauggaagcggugaggacuagucccuguucccagagcccacuuuuuuuucuuuuuuugaaauaaaauagccugucuuucagaucuaaaaaaaaaaaaaaaaaaaaaaaaaaaaaaaaaaaaaaaaaaaaaaaaaaaaaaaaaaaaaaaaaaaaaaaaaaaaaaaaaaaaaaaaaaaaaaaaaaaa

SEQ ID NO: 14607 - RNA, 1740 nt, Artificial Sequence; identical to SEQ ID NO: 14601
  mRNA product Design a-2 (A100) comprising derived and/or modified sequence from LASV(Pinneo-NIG-1969;Clade I)__AIT17836__GPC (opt5)

SEQ ID NO: 14608 - RNA, 1740 nt, Artificial Sequence
  mRNA product Design a-2 (A100) comprising derived and/or modified sequence from LASV(ISTH0009-NIG-2011;Clade II)__AIT17404__GPC (opt5)
aggagaguccgcucagccagguugcagaagcggcuuagcguguguccuaaucuucucucugcguguagguaggccugugccgcaaacaagcuuaccaugggccagaucauuaccuucuuucaagaggugccccacgucaucgaagagguuaugaacauugugcugaucgcccucagccugcuugcuauucugaaggggaucuacaauguggccacaugcggacucuucggccuggucuccuuucuucugcucugugggagaucuugcagcacgaccuauaaaggaguguacgaacugcagacacuggagcucgacauggcgucccugaacaugaccaugccucuuucuuguacaaagaauaacagccaucacuauaucaugguuggcaaugaaaccgggcuggagcucacacugaccaacacguccauuaucaaucauaaauucugcaaccuuucugaugcucacaagaaaaaucuguacgaccaugcccucaugagcauuaucuccaccuuucaccugagcauuccgaacuucaaucaguaugaggccaugucuugugauuuuaacggaggcaagaucuccgugcaguacaaucugagccacgcuuaugccgucgacgcugccaaccauugcggcacaauugcgaauggggugcuccaaaccuucaugcggauggccuggggaggcucuuacaucgcucuggauuccgggaagggaagcugggacuguaucaugacaucuuaccaguaucuuauuauccagaacaccacgugggaagaucacugccaguuuucccgccccagcccuauuggcuaccuggggcuccugucccaaagaacacgggacaucuauauuucucgcagacuucugggaaccuucacauggacccucagcgauuccgagggcaacgaaacccccggcggguacugucugacacgguggaugcugaucgaggccgagcucaaaugcuuuggaaauacggcuguugccaaguguaacgaaaaacaugacgaggaguucugcgauaugcugcgccuuuuugacuucaauaagcaggcgaucagacggcugaaaaccgaagcccagaugagcauucagcucaucaacaaggcugugaaugcccugauuaacgaucaacuuaucaugaagaaucaucugcgcgacauuaugggcaucccuuauugcaacuacucuaaauauugguaccucaaucacacagucaccgggaagacaucccugcccagauguuggcuggugagcaacggaucuuaccucaaugaaacccacuucagcgacgauaucgagcagcaggcugacaacaugauuacggagcugcuucaaaaagaauauauggaucggcagggcaagacaccucuggggcucguggaccuguuugucuucuccaccucuuuuuaccugaucagcauuuuccuucaccucaucaaaauuccgacccaucgccacaucacaggaaagcccugcccuaaaccccauagacugaaucacaugggcauuuguuccugcggccuguauaagcacccugggguucccgugaaguggaaacggugaggacuagucccuguucccagagcccacuuuuuuuucuuuuuuugaaauaaaauagccugucuuucagaucuaaaaaaaaaaaaaaaaaaaaaaaaaaaaaaaaaaaaaaaaaaaaaaaaaaaaaaaaaaaaaaaaaaaaaaaaaaaaaaaaaaaaaaaaaaaaaaaaaaaa

SEQ ID NO: 14609 - RNA, 1740 nt, Artificial Sequence
  mRNA product Design a-2 (A100) comprising derived and/or modified sequence from LASV(ISTH2010-NIG-2012;Clade II)__AIT17482__GPC (opt5)
aggagaguccgcucagccagguugcagaagcggcuuagcguguguccuaaucuucucucugcguguagguaggccugugccgcaaacaagcuuaccaugggccagaucauuaccuucuuucaagaggugccccacgucaucgaagagguuaugaacauugugcugaucgcccucagccugcuugcuauucugaaggggaucuacaauguggccacaugcggacucuucggccuggucuccuuucuucugcucugugggagaucuugcagcacgaccuauaaaggaguguacgaacugcagacacuggagcucgacauggcgucccugaacaugaccaugccucuuucuuguacaaagaauaacagccaucacuauaucaugguuggcaaugaaaccgggcuggagcucacacugaccaacacguccauuaucaaucauaaauucugcaaccuuucugaugcucacaagaaaaaucuguacgaccaugcccucaugagcauuaucuccaccuuucaccugagcauuccgaacuucaaucaguaugaggccaugucuugugauuuuaacggaggcaagaucuccgugcaguacaaucugagccacgcuuaugccgucgacgcugccaaccauugcggcacaauugcgaauggggugcuccaaaccuucaugcggauggccuggggaggcucuuacaucgcucuggauuccgggaagggaagcugggacuguaucaugacaucuuaccaguaucuuauuauccagaacauuaccugggaagaucacugccaguuuucccgccccagcccuaucggcuaccuggggcuccugucccaaagaacgcgggacauuuauaucucucgcagacuucugggaacauucaccuggacacucagcgauuccgagggcaacgaaacccccggcggguacugucugacccgguggaugcugaucgaggccgagcucaaaugcuuuggaaauacagcuguugccaaguguaacgaaaaacaugacgaggaguucugcgauaugcugcgccuuuuugacuucaauaagcaggcgauuagacggcugaaaacggaagcccagaugagcauccagcucauuaacaaggcugugaaugcccugaucaacgaucaacuuauuaugaagaaucaucugcgcgacaucaugggcaucccuuauugcaacuacucuaaauauugguaccucaaucacaccgucacagggaagaccucccugcccagauguuggcuggugagcaacggaucuuaccucaaugaaacacacuucagcgacgauauugagcagcaggcugacaacaugaucaccgagcugcuucaaaaagaauauauugaucggcagggcaagacgccucuggggcucguggaccuguuugucuucuccacaucuuuuuaccugaucagcauuuuccuucaccucguuaaaaucccgacccaucgccacguggugggaaagcccugcccuaaaccccauagacugaaucacaugggcauuuguuccugcggccuguauaagcacccugggguccccgugaaguggaaacggugaggacuagucccuguucccagagcccacuuuuuuuucuuuuuuugaaauaaaauagccugucuuucagaucuaaaaaaaaaaaaaaaaaaaaaaaaaaaaaaaaaaaaaaaaaaaaaaaaaaaaaaaaaaaaaaaaaaaaaaaaaaaaaaaaaaaaaaaaaaaaaaaaaaaa

SEQ ID NO: 14610 - RNA, 1740 nt, Artificial Sequence
  mRNA product Design a-2 (A100) comprising derived and/or modified sequence from LASV(Lassa virus/H.sapiens-wt/NGA/2015/ISTH_0543;Clade II)__AVO03639__GPC (opt5)
aggagaguccgcucagccagguugcagaagcggcuuagcguguguccuaaucuucucucugcguguagguaggccugugccgcaaacaagcuuaccaugggccagaucauuaccuucuuucaagaggugccccacgucaucgaagagguuaugaacauugugcugaucgcccucagccugcuugcuauucugaaggggaucuacaauguggccacaugcggacucuucggccuggucuccuuucuucugcucugugggagaucuugcagcacgaccuauaaaggaguguacgaacugcagacacuggagcucgacauggcgaaccugaauaugaccaugccucuuuccuguacaaagaacaauucucaucacuauaucaugguuggcaacgaaaccgggcuggagcucacacugaccaauacgagcauuaucaaccauaaauucugcaaucuuuccgaugcucacaagaaaaaccuguacgaccaugcccucaugucuauuaucagcaccuuucaccuguccauuccgaauuucaaccaguaugaggccaugagcugugauuuuaauggaggcaagaucucugugcaguacaaccugucccacacauaugcugucgacgccgcuaaucauugcggcaccauugccaacggggugcuccaaacauucaugcggauggcguggggaggcagcuacaucgcccuggauucugggaagggauccugggacuguaucaugaccagcuaccaguaucuuguuauucagaacacgacaugggaagaucacugccaguuuucucgccccuccccuaucggcuaccuggggcuccugagccaaagaacccgggacauuuauaucucccgcagacuucugggaacauucaccuggacccucucugauagcgagggcaaugaaacacccggcggguacugucugacgcgguggaugcugauugaggcugagcucaaaugcuuuggaaacaccgccguggcuaaguguaaugaaaaacaugacgaggaguucugcgauaugcugcgccuuuuugacuucaacaagcaggccaucagacggcugaaaacagaagcgcagauguccauccagcucauuaauaaggccgucaacgcucugaucaaugaucaacuuauuaugaagaaccaucugcgcgacaucaugggcauuccuuauugcaauuacagcaaauauugguaccucaaccacaccgugacagggaagaccucucugcccagauguuggcugguguccaauggaagcuaccucaacgaaacgcacuucucugacgauaucgagcagcaggccgacaauaugaucacagagcugcuucaaaaagaauauauugaucggcagggcaagaccccucuggggcucgucgaccuguuuguuuucagcaccuccuuuuaccugaucucuauuuuccuucaccucgugaaaaucccgacacaucgccacauuaccggaaagcccugcccuaaaccccauagacugaaccacaugggcaucuguagcugcggccuguauaagcacccuggggugcccgucaaguggaaacggugaggacuagucccuguucccagagcccacuuuuuuuucuuuuuuugaaauaaaauagccugucuuucagaucuaaaaaaaaaaaaaaaaaaaaaaaaaaaaaaaaaaaaaaaaaaaaaaaaaaaaaaaaaaaaaaaaaaaaaaaaaaaaaaaaaaaaaaaaaaaaaaaaaaaa

SEQ ID NO: 14611 - RNA, 1740 nt, Artificial Sequence
  mRNA product Design a-2 (A100) comprising derived and/or modified sequence from LASV(Lassa virus/H.sapiens-wt/NGA/2016/ISTH_0009;Clade II)__AVO03571__GPC (opt5)
aggagaguccgcucagccagguugcagaagcggcuuagcguguguccuaaucuucucucugcguguagguaggccugugccgcaaacaagcuuaccaugggccagaucauuaccuucuuucaagaggugccccacgucaucgaagagguuaugaacauugugcugaucgcccucagccugcuugcuauucugaaggggaucuacaauguggccacaugcggacuccugggccuugucuccuuccugcuccugugugggagaucuugcagcacgaccuauaaaggaguguacgaacugcagacacucgagcuggacauggcgucccuuaacaugaccaugccucugucuuguacaaagaauaacagccaucacuauaucaugguuggcaaugaaaccgggcucgagcugacacuuaccaacacguccauuaucaaucauaaauuuugcaaccugucugaugcucacaagaaaaaucucuacgaccaugcccugaugagcauuaucuccaccuuccaccugagcauuccgaacuuuaaucaguaugaggccaugucuugugauuucaacggaggccggaucuccgugcaguacaaucucagccacucuuaugcugucgacgccgcuaaccauugcggcacaauugccaauggggugcugcaaaccuuuaugcgcauggcguggggaggcuccuacaucgcccuugauagcgggaagggaucuugggacuguaucaugacauccuaccaguaucugauuauccagaacaccacgugggaagaucacugccaguucagcagacccuccccuauuggcuaccucgggcugcuuucucaacggacacgcgacaucuauauuagcagacggcugcucggaaccuuuacauggacccuguccgauagcgagggcaacgaaacccccggcggguacugucugacacgcuggaugcucaucgaggcugagcugaagugcuucggaaauacggccguugcuaaauguaacgaaaagcaugacgaggaauuuugcgauaugcuuagacuguucgacuuuaauaaacaggccauccggcgccucaagaccgaggcgcagaugucuauucagcugaucaacaaagccgugaaugcucuuauuaacgaucaacugaucaugaagaaucaccucagagacauuaugggcaucccuuauugcaacuacuccaaguauugguaccugaaucacacagucaccgggaaaacaagccugccccgguguuggcucgugucuaacggaagcuaccugaaugaaacccauuucuccgacgauaucgagcagcaggccgacaacaugauuacggagcuucugcaaaaggaauauaucgaucgccagggcaaaacaccucucgggcugguggaccuguucgucuuuucuaccagcuucuaccuuauuuccaucuuucuccaccugguuaagauuccgacccauagacacaucacaggaaaacccugcccuaagccccaucggcugaaucacaugggcauuuguagcugcggccucuauaaccacccuggggugcccgugaaauggaagcgcugaggacuagucccuguucccagagcccacuuuuuuuucuuuuuuugaaauaaaauagccugucuuucagaucuaaaaaaaaaaaaaaaaaaaaaaaaaaaaaaaaaaaaaaaaaaaaaaaaaaaaaaaaaaaaaaaaaaaaaaaaaaaaaaaaaaaaaaaaaaaaaaaaaaaa

SEQ ID NO: 14612 - RNA, 1740 nt, Artificial Sequence
  mRNA product Design a-2 (A100) comprising derived and/or modified sequence from LASV(Lassa virus/H.sapiens-wt/NGA/2016/ISTH_0017;Clade II)__AVO03567__GPC (opt5)
aggagaguccgcucagccagguugcagaagcggcuuagcguguguccuaaucuucucucugcguguagguaggccugugccgcaaacaagcuuaccaugggccagaucauuaccuucuuucaagaggugccccacgucaucgaagagguuaugaacauugugcugaucgcccucagccugcuugcuauucugaaggggaucuacaauguggccacaugcggacucuucggccuggucuccuuucuucugcucugugggagaucuugcagcacgaccuauaaaggaguguacgaacugcagacacuggagcucgacauggcgucccugaacaugaccaugccucuuucuuguacaaagaauaacagccaucacuauaucaugguuggcaaugaaaccgggcuggagcucacacugaccaacacguccauuaucaaucauaaauucugcaaccuuucugaugcucacaagaaaaaucuguacgaccaugcccucaugagcauuaucuccaccuuucaccugagcauuccgaacuucaaucaguaugaggccaugucuugugauuuuaacggaggcaagaucuccgugcaguacaaucugagccacacauaugcuauugacgccgcuaaccauugcggcaccaucgccaaugggguccuccaaacauucaugcggauggcguggggaggcucuuacaucgcccuggauuccgggaagggaagcugggacuguauuaugaccucuuaccaguaucuuaucauucagaacacgacaugggaagaucacugccaguuuucccgccccagcccuaucggcuaccuggggcuccugucccaaagaacccgggacauuuauaucucucgcagacuucugggaacauucaccuggacccucagcgauuccgagggcaacgaaacacccggcggguacugucugacgcgguggaugcugaucgaggcugagcucaaaugcuuuggaaauaccgccguggcuaaguguaacgaaaaacaugacgaggaguucugcgauaugcugcgccuuuuugacuucaauaagcaggccauuagacggcugaaaacagaagcgcagaugagcauccagcucauuaacaaggccguuaaugcucugaucaacgaucaacuuauuaugaagaaucaucugcgcgacaucaugggcaucccuuauugcaacuacucuaaauauugguaccucaaucacaccgugacagggaagaccucccugcccagauguuggcuggucagcaacggaucuuaccucaaugaaacgcacuucagcgacgauauugagcagcaggccgacaacaugaucacagagcugcuucaaaaagaauauauggaucggcagggcaagaccccucuggggcucguggaccuguuuguguucuccaccucuuuuuaccugauuagcaucuuccuucaccucguccgcauuccgacacauagacacguuaucggaaaacccugcccuaagccccaucggcugaaucacaugggcauuuguuccugcggccuguauaaacacccuggggugcccgugaaguggaagcgcugaggacuagucccuguucccagagcccacuuuuuuuucuuuuuuugaaauaaaauagccugucuuucagaucuaaaaaaaaaaaaaaaaaaaaaaaaaaaaaaaaaaaaaaaaaaaaaaaaaaaaaaaaaaaaaaaaaaaaaaaaaaaaaaaaaaaaaaaaaaaaaaaaaaaa

SEQ ID NO: 14613 - RNA, 1740 nt, Artificial Sequence
  mRNA product Design a-2 (A100) comprising derived and/or modified sequence from LASV(Lassa virus/H.sapiens-wt/NGA/2018/ISTH_0959;Clade II)__AVV65099__GPC (opt5)
aggagaguccgcucagccagguugcagaagcggcuuagcguguguccuaaucuucucucugcguguagguaggccugugccgcaaacaagcuuaccaugggccagaucauuaccuucuuucaagaggugccccacgucaucgaagagguuaugaacauugugcugaucgcccucagccugcuugcuauucugaaggggaucuacaauguggucacaugcggacucuucggccugguguccuuucuucugcucugugggagaucuugcagcacgaccuauaaaggaguuuacgaacugcagacacuggagcucgacauggccucccugaacaugaccaugccucuuucuuguacaaagaauaacagccaucacuauaucauggugggcaaugaaaccgggcuggagcucacacugaccaacacguccauuaucaaucauaaauucugcaaccuuucugaugcgcacaagaaaaaucuguacgaccaugcucucaugagcauuaucuccaccuuucaccugagcauuccgaacuucaaucaguaugaggccaugucuugugauuuuaacggaggcaagaucuccguccaguacaaucugagccacgccuaugcuauugacgccgcuaaccauugcggcacaaucgccaauggggugcuccaaaccuucaugcggauggcguggggaggcucuuacaucgcccuggauuccgggaagggaagcugggacuguauuaugacaucuuaccaguaucuuaucauucagaacaccacgugggaagaucacugccaguuuucccgccccagcccuaucggcuaccuggggcuccugucccaaagaacacgggacauuuauaucucucgcagacuucugggaaccuucacauggacccucagcgauuccgagggcaacgaaacccccggcggguacugucugacacgguggaugcugaucgaggcugagcucaaaugcuuuggaaauacggccguugcuaaguguaacgaaaaacaugacgaggaguucugcgauaugcugcgccuuuuugacuucaauaagcaggccauuagacggcugaaaaccgaagcgcagaugagcauccagcucauuaacaaggccgugaaugcucugaucaacgaucaacuuauuaugaagaaucaucugcgcgacaucaugggcaucccuuauugcaacuacucuaaauauugguaccucaaucacacagucaccgggaagacaucccugcccagauguuggcuggugagcaacggaucuuaccucaaugaaacccacuucagcgacgauauugagcagcaggccgacaacaugaucacggagcugcuucaaaaagaauauauugaucggcagggcaagacaccucuggggcucguggaccuguuugucuucuccaccucuuuuuaccugaucagcauuuuccuucaccucguuaaaaucccgacccaucgccacgugauuggaaagcccugcccuaaaccccauagacugaaucacaugggcaucuguuccugcggccuguauaagcacccuggggugcccgucaaguggaaacggugaggacuagucccuguucccagagcccacuuuuuuuucuuuuuuugaaauaaaauagccugucuuucagaucuaaaaaaaaaaaaaaaaaaaaaaaaaaaaaaaaaaaaaaaaaaaaaaaaaaaaaaaaaaaaaaaaaaaaaaaaaaaaaaaaaaaaaaaaaaaaaaaaaaaa

SEQ ID NO: 14614 - RNA, 1740 nt, Artificial Sequence
  mRNA product Design a-2 (A100) comprising derived and/or modified sequence from LASV(LASV003-NIG-2008;Clade II)__AIT17580__GPC (opt5)
aggagaguccgcucagccagguugcagaagcggcuuagcguguguccuaaucuucucucugcguguagguaggccugugccgcaaacaagcuuaccaugggccagaucauuaccuucuuucaagaggugccccacgucaucgaagagguuaugaacauugugcugaucgcccucagccugcuugcuauucugaaggggaucuacaauguggccacaugcggacucuucggccuggucuccuuucuucugcucugugggagaucuugcagcacgaccuauaaaggaguguacgaacugcagacacuggagcucgacauggcgucccugaacaugaccaugccucuuucuuguacaaagaauaacagccaucacuauaucaugguuggcaaugaaaccgggcuggagcucacacugaccaacacguccauuaucaaucauaaauucugcaaccuuucugaugcucacaagaaaaaucuguacgaccaugcccucaugagcauuaucuccaccuuucaccugagcauuccgaacuucaaucaguaugaggccaugucuugugauuuuaacggaggcaagaucuccgugcaguacaaucugagccacacauaugcugucgacgccgcuaaccauugcggcaccauugccaauggggugcuccaaacauucaugcggauggcguggggaggcucuuacaucgcccuggauuccgggaagggaagcugggacuguaucaugaccucuuaccaguaucuuauuauccagaacacgacaugggaagaucacugccaguuuucccgccccagcccuauuggcuaccuggggcuccugucccaaagaacccgggacaucuauauuucucgcagacuucugggaacauucaccuggacccucagcgauuccgagagcaacgaaacacccggcggcuacugucugacgcgguggaugcugaucgaggcugagcucaaaugcuuugggaauaccgccguugcuaaguguaacgaaaaacaugacgaggaguucugcgauaugcugcgccuuuuugacuucaauaagcaggccaucagacggcugaaagcggaagcccagaugucuauucagcucaucaacaaggcugugaaugcccugauuaacgaucaacuuaucaugaagaaucaucugcgcgacauuaugggaaucccuuauugcaacuacuccaaauauugguaccucaaucacacagucaccggcagaacaagccugccccgguguuggcuggugucuaacgggagcuaccucaaugaaacccacuucuccgacgauaucgagcagcaggcugacaacaugauuacggagcugcuucaaaaggaauauauggaucgccagggaaaaacaccucugggccucguggaccuguuugucuucucuaccagcuuuuaccugaucuccauuuuccuucaccucguuaagaucccgacccauagacacgugauugggaaacccugcccuaagccccaucggcugaaucacaugggaaucuguagcugcggccuguauaaacacccuggcgugcccgucaaguggaagcgcugaggacuagucccuguucccagagcccacuuuuuuuucuuuuuuugaaauaaaauagccugucuuucagaucuaaaaaaaaaaaaaaaaaaaaaaaaaaaaaaaaaaaaaaaaaaaaaaaaaaaaaaaaaaaaaaaaaaaaaaaaaaaaaaaaaaaaaaaaaaaaaaaaaaaa

SEQ ID NO: 14615 - RNA, 1740 nt, Artificial Sequence
  mRNA product Design a-2 (A100) comprising derived and/or modified sequence from LASV(LASV035-NIG-2009;Clade II)__AIT17588__GPC (opt5)
aggagaguccgcucagccagguugcagaagcggcuuagcguguguccuaaucuucucucugcguguagguaggccugugccgcaaacaagcuuaccaugggccagaucauuaccuucuuucaagaggugccccacgucaucgaagagguuaugaacauugugcugaucgcccucagccugcuugcuauucugaaggggaucuacaauguggccacaugcggacucuucggccuggucuccuuucuucugcucugugggagaucuugcagcacgaccuauaaaggaguguacgaacugcagacacuggagcucgacauggcgucccugaacaugaccaugccucuuucuuguacaaagaauaacagccaucacuauaucaugguuggcaaugaaaccgggcuggagcucacacugaccaacacguccauuaucaaucauaaauucugcaaccuuucugaugcucacaagaaaaaucuguacgaccaugcccucaugagcauuaucuccaccuuucaccugagcauuccgaacuucaaucaguaugaggccaugucuugugauuuuaacggaggcaagaucuccgugcaguacaaucugagccacgcuuaugccgucgacgcugccaaccauugcggcacaauugcgaauggggugcuccaaaccuucaugcggauggccuggggaggcucuuacaucgcucuggauuccgggaagggaagcugggacuguaucaugacaucuuaccaguaucuuauuauccagaacaccacgugggaagaucacugccaguuuucccgccccagcccuauuggcuaccuggggcuccugucccaaagaacacgggacaucuauauuucucgcagacuucugggaaccuucacauggacccucagcgauuccgagggcaacgaaacccccggcggguacugucugacacgguggaugcugaucgaggccgagcucaaaugcuuuggaaauacggcuguugccaaguguaacgaaaaacaugacgaggaguucugcgauaugcugcgccuuuuugacuucaauaagcaggcgaucagacggcugaaagccgaagcucagaugagcauucagcucaucaacaaggccgugaaugcucugauuaacgaucaacuuaucaugaagaaucaucugcgcgacauuaugggcaucccuuauugcaacuacucuaaauauugguaccucaaucacaccgucacagggaagaccucccugcccagauguuggcuggugagcaacggaucuuaccucaaugaaacacacuucagcgacgauaucgagcagcaggccgacaacaugauuaccgagcugcuucaaaaagaauauaucgaucggcagggcaagacgccucuggggcucguggaccuguuugucuucuccacaucuuuuuaccugauuagcaucuuccuucaccucguuaaaauuccgacccaucgccacgugaucggaaagcccugcccuaaaccccauagacugaaucacaugggcauuuguuccugcggccuguauaagcacccuggggugcccgucaaguggaaacggugaggacuagucccuguucccagagcccacuuuuuuuucuuuuuuugaaauaaaauagccugucuuucagaucuaaaaaaaaaaaaaaaaaaaaaaaaaaaaaaaaaaaaaaaaaaaaaaaaaaaaaaaaaaaaaaaaaaaaaaaaaaaaaaaaaaaaaaaaaaaaaaaaaaaa

SEQ ID NO: 14616 - RNA, 1740 nt, Artificial Sequence
  mRNA product Design a-2 (A100) comprising derived and/or modified sequence from LASV(LASV1000-NIG-2009;Clade II)__AIT17782__GPC (opt5)
aggagaguccgcucagccagguugcagaagcggcuuagcguguguccuaaucuucucucugcguguagguaggccugugccgcaaacaagcuuaccaugggccagaucauuaccuucuuucaagaggugccccacgucaucgaagagguuaugaacauugugcugaucgcccucagccugcuugcuauucugaaggggaucuacaauguggccacaugcggacucuucggccuggucuccuuucuucugcucugugggagaucuugcagcacgaccuauaaaggaguguacgaacugcagacacuggagcucgacauggcgucccugaacaugaccaugccucuuucuuguacaaagaauaacagccaucacuauaucaugguuggcaaugaaaccgggcuggagcucacacugaccaacacguccauuaucaaucauaaauucugcaaccuuucugaugcucacaagaaaaaucuguacgaccaugcccucaugagcauuaucuccaccuuucaccugagcauuccgaacuucaaucaguaugaggccaugucuugugauuuuaacggaggcaagaucuccgugcaguacaaucugagccacacauaugcugucgacgccgcuaaccauugcggcaccauugccaauggggugcuccaaacauucaugcggauggcguggggaggcucuuacaucgcccuggauuccgggaagggaagcugggacuguaucaugaccucuuaccaguaucuuauuauccagaacacgacaugggaagaucacugccaguuuucccgccccagcccuauuggcuaccuggggcuccugucccaaagaacccgggacaucuauauuucucgcagacuucugggaacauucaccuggacccucagcgauuccgagggcaacgaaacacccggcggguacugucugacgcgguggaugcugaucgaggcugagcucaaaugcuuuggaaauaccgccguugcuaaguguaacgaaaaacaugacgaggaguucugcgauaugcugcgccuuuuugacuucaauaagcaggccaucaaaagacugaagacagaagcgcagaugagcauucagcucaucaacaaggccgugaaugcucugauuaacgaucaacuuaucaugaaaaaucaucugcgggacauuaugggcaucccuuauugcaacuacucuaaguauugguaccucaaucacaccgucacagggaaaaccucccugccccgcuguuggcuggugagcaacggaucuuaccucaaugaaacgcacuucagcgacgauaucgagcagcaggccgacaacaugauuacagagcugcuucaaaaggaauauaucgauagacagggcaaaaccccucuggggcucguggaccuguuugucuucuccaccucuuuuuaccugauuagcaucuuccuucaccucguuaagauuccgacacaucggcacguggugggaaaacccugcccuaagccccaucgccugaaucacaugggcaucuguuccugcggccuguauaagcacccugggguccccgugaaauggaagagaugaggacuagucccuguucccagagcccacuuuuuuuucuuuuuuugaaauaaaauagccugucuuucagaucuaaaaaaaaaaaaaaaaaaaaaaaaaaaaaaaaaaaaaaaaaaaaaaaaaaaaaaaaaaaaaaaaaaaaaaaaaaaaaaaaaaaaaaaaaaaaaaaaaaaa

SEQ ID NO: 14617 - RNA, 1740 nt, Artificial Sequence
  mRNA product Design a-2 (A100) comprising derived and/or modified sequence from LASV(LASV221-NIG-2010;Clade II)__AIT17624__GPC (opt5)
aggagaguccgcucagccagguugcagaagcggcuuagcguguguccuaaucuucucucugcguguagguaggccugugccgcaaacaagcuuaccaugggccagaucauuaccuucuuucaagaggugccccacgucaucgaagagguuaugaacauugugcugaucgcccucagccugcuugcuauucugaaggggaucuacaauguggccacaugcggacucuucggccuggucuccuuucuucugcucugugggagaucuugcagcacgaccuauaaaggaguguacgaacugcagacacuggagcucgacauggcgucccugaacaugaccaugccucuuucuuguacaaagaauaacagccaucacuauaucaugguuggcaaugaaaccgggcuggagcucacacugaccaacacguccauuaucaaucauaaauucugcaaccuuucugaugcucacaagaaaaaucuguacgaccaugcccucaugagcauuaucuccaccuuucaccugagcauuccgaacuucaaucaguaugaggccaugucuugugauuuuaacggaggcaagaucuccgugcaguacaaucugagccacacauaugcuauugacgccgcuaaccauugcggcaccaucgccaaugggguccuccaaacauucaugcggauggcguggggaggcucuuacaucgcccuggauuccgggaagggaagcugggacuguauuaugaccucuuaccaguaucuuaucauucagaacacgacaugggaagaucacugccaguuuucccgccccagcccuaucggcuaccuggggcuccugucccaaagaacccgggacauuuauaucucucgcagacuucugggaacauucaccuggacccucagcgauuccgagggcaacgaaacacccggcggguacugucugacgcgguggaugcugaucgaggcugagcucaaaugcuuuggaaauaccgccguggcuaaguguaacgaaaaacaugacgaggaguucugcgauaugcugcgccuuuuugacuucaauaagcaggccauuagacggcugaaaacagaagcgcagaugagcauccagcucauuaacaaggccguuaaugcucugaucaacgaucaacuuauuaugaagaaucaucugcgcgacaucaugggcaucccuuauugcaacuacucuaaauauugguaccucaaucacaccgugacagggaagaccucccugcccagauguuggcuggucagcaacggaucuuaccucaaugaaacgcacuucagcgacgauauugagcagcaggccgacaacaugaucacagagaugcugcaaaaagaauauauggaucggcagggcaagaccccucuugggcugguggaccucuuuguguucuccaccucuuuuuaccugauuagcaucuuccugcaccuugucaaaauuccgacacaucgccacguuaucggaaagcccugcccuaaaccccauagacucaaucacaugggcauuuguuccugcggccuguauaagcacccuggggugcccgugaaguggaaacggugaggacuagucccuguucccagagcccacuuuuuuuucuuuuuuugaaauaaaauagccugucuuucagaucuaaaaaaaaaaaaaaaaaaaaaaaaaaaaaaaaaaaaaaaaaaaaaaaaaaaaaaaaaaaaaaaaaaaaaaaaaaaaaaaaaaaaaaaaaaaaaaaaaaaa

SEQ ID NO: 14618 - RNA, 1740 nt, Artificial Sequence
  mRNA product Design a-2 (A100) comprising derived and/or modified sequence from LASV(LASV237-NIG-2010;Clade II)__AIT17638__GPC (opt5)
aggagaguccgcucagccagguugcagaagcggcuuagcguguguccuaaucuucucucugcguguagguaggccugugccgcaaacaagcuuaccaugggccagaucauuaccuucuuucaagaggugccccacgucaucgaagagguuaugaacauugugcugaucgcccucagccugcuugcuauucugaaggggaucuacaauguggccacaugcggacucuucggccuggucuccuuucuucugcucugugggagaucuugcagcacgaccuauaaaggaguguacgaacugcagacacuggagcucgacauggcgucccugaacaugaccaugccucuuucuuguacaaagaauaacagccaucacuauaucaugguuggcaaugaaaccgggcuggagcucacacugaccaacacguccauuaucaaucauaaauucugcaaccuuucugaugcucacaagaaagaccuguacgaucaugcccucaugagcauuaucuccaccuuucaccugagcauuccgaauuucaaccaguaugaggccaugucuugugacuuuaauggaggcaagaucuccgugcaguacaaccugagccacacauaugcugucgaugccgcuaaucauugcggcaccauugccaacggggugcuccaaacauucaugcggauggcguggggaggcucuuacaucgcccuggacuccgggaagggaagcugggauuguaucaugaccucuuaccaguaucuuauuauccagaauacgacaugggaagaccacugccaguuuucccgccccagcccuauuggcuaccuggggcuccugucccaaagaacccgggauaucuauauuucucgcagacuucugggaacauucaccuggacccucagcgacuccgagggcaacgaaacacccggcggguacugucugacgcgguggaugcugaucgaggcugagcucaaaugcuuuggaaacaccgccguugcuaaguguaaugaaaaacaugaugaggaguucugcgacaugcugcgccuuuuugauuucaacaagcaggccaucagacggcugaaaacagaagcgcagaugagcauucagcucaucaauaaggccgugaacgcucugauuaaugaccaacuuaucaugaagaaccaucugcgcgacauuaugggcaucccuuauugcaauuacucuaaauauugguaccucaaccacaccgucacagggaagaccucccugcccagauguuggcuggugagcaauggaucuuaccucaacgaaacgcacuucagcgaugacaucgagcagcaggccgauaauaugauuacagagcugcuucaaaaagaauauauggaccggcagggcaagaccccucuggggcucguggaucuguuugucuucuccaccucuuuuuaccugaucagcauuuuccuucaccucaucaaaauuccgacacaucgccacaucaccggaaagcccugcccuaaaccccauagacugaaccacaugggcauuuguuccugcggccuguauaagcacccugggguucccgugaaguggaaacggugaggacuagucccuguucccagagcccacuuuuuuuucuuuuuuugaaauaaaauagccugucuuucagaucuaaaaaaaaaaaaaaaaaaaaaaaaaaaaaaaaaaaaaaaaaaaaaaaaaaaaaaaaaaaaaaaaaaaaaaaaaaaaaaaaaaaaaaaaaaaaaaaaaaaa

SEQ ID NO: 14619 - RNA, 1740 nt, Artificial Sequence
  mRNA product Design a-2 (A100) comprising derived and/or modified sequence from LASV(LASV253-NIG-2011;Clade II)__AIT17670__GPC (opt5)
aggagaguccgcucagccagguugcagaagcggcuuagcguguguccuaaucuucucucugcguguagguaggccugugccgcaaacaagcuuaccaugggccagaucauuaccuucuuucaagaggugccccacgucaucgaagagguuaugaacauugugcugaucgcccucagccugcuugcuauucugaaggggaucuacaauguggccacaugcggacucuucggccuggucuccuuucuucugcucugugggagaucuugcagcacgaccuauaaaggaguguacgaacugcagacacuggagcucgacauggcgucccugaacaugaccaugccucuuucuuguacaaagaauaacagccaucacuauaucaugguuggcaaugaaaccgggcuggagcucacacugaccaacacguccauuaucaaucauaaauucugcaaccuuucugaugcucacaagaaaaaucuguacgaccaugcccucaugagcauuaucuccaccuuucaccugagcauuccgaacuucaaucaguaugaggccaugucuugugauuuuaacggaggcaagaucuccgugcaguacaaucugagccacacauaugcugucgacgccgcuaaccauugcggcaccauugccaauggggugcuccaaacauucaugcggauggcguggggaggcucuuacaucgcccuggauuccgggaagggaagcugggacuguaucaugaccucuuaccaguaucuuauuauccagaacacgacaugggaagaucacugccaguuuucccgccccagcccuauuggcuaccuggggcuccugucccaaagaacccgggacaucuauauuucucgcagacuucugggaacauucaccuggacccucagcgauuccgagggcaacgaaacacccggcggguacugucugacgcgguggaugcugaucgaggcugagcucaaaugcuuuggaaauaccgccguugcuaaguguaacgaaaaacaugacgaggaguucugcgauaugcugcgccuuuuugacuucaauaagcaggccaucagacggcugaaagcggaagcccagaugagcauucagcucaucaacaaggcugugaaugcccugauuaacgaucaacuuaucaugaagaaucaucugcgcgacauuaugggcaucccuuauugcaacuacucuaaauauugguaccucaaucacacagucaccgggagaacaucccugccccgguguuggcuggugagcaacggaucuuaccucaaugaaacccacuucagcgacgauaucgagcagcaggcugacaacaugauuacggagcugcuucaaaaggaauauaucgaucgccagggcaaaacaccucuggggcucguggaccuguuugucuucuccaccucuuuuuaccugauuagcaucuuccuucaccucguuaagauuccgacccauagacacaucauuggaaaacccugcccuaagccccaucggcugaaucacaugggcaucuguuccugcggccuguauaaacacccuggggugcccgugaaguggaagcgcugaggacuagucccuguucccagagcccacuuuuuuuucuuuuuuugaaauaaaauagccugucuuucagaucuaaaaaaaaaaaaaaaaaaaaaaaaaaaaaaaaaaaaaaaaaaaaaaaaaaaaaaaaaaaaaaaaaaaaaaaaaaaaaaaaaaaaaaaaaaaaaaaaaaaa

SEQ ID NO: 14620 - RNA, 1740 nt, Artificial Sequence
  mRNA product Design a-2 (A100) comprising derived and/or modified sequence from LASV(LASV254-NIG-2011;Clade II)__AIT17674__GPC (opt5)
aggagaguccgcucagccagguugcagaagcggcuuagcguguguccuaaucuucucucugcguguagguaggccugugccgcaaacaagcuuaccaugggccagaucauuaccuucuuucaagaggugccccacgucaucgaagagguuaugaacauugugcugaucgcccucagccugcuugcuauucugaaggggaucuacaauguggccacaugcggacucuucggccuggucuccuuucuucugcucugugggagaucuugcagcacgaccuauaaaggaguguacgaacugcagacacuggagcucgacaugaccaaccugaauaugacaaugccucuuuccuguaccaagaacaauucucaucacuauaucaugguuggcaacgaaacagggcuggagcucacccugacgaauaccagcauuaucaaccauaaauucugcaaucuuuccgaugcgcacaagaaaaaccuguacaaucaugcucucaugucuauuaucagcacauuucaccuguccauuccgaacuucaaucaguaugaggccaugagcugugacuuuaacggaggcaagaucucugugcaguacaaucugucccacagcuaugccgucgaugcugccaaccauugcggcaccauugcuaacggggugcuccaaacauucaugcggauggccuggggaggcucuuacaucgcgcuggacuccgggaagggaaauugggauuguaucaugaccagcuaccaguaucuuauuauccagaacacgacaugggaagaccacugccaguuuucucgccccuccccuauuggcuaccuggggcuccugagccaaagaacccgggauaucuauauuucccgcagacuucugggaacauucaccuggacccucucugacagcgagggcaaugaaacacccggcggguacugucugacgcgguggaugcugaucgaggccgagcucaaaugcuuuggaaacaccgcuguugccaaguguaaugaaaaacaugaugaggaguucugcgacaugcugcgccuuuuugauuucaacaagcaggcuaucagacggcugaaaacagaagcccaggcgaauauucagcucaucaacaaggccgugaaugcucugauuaacgaccaacuuaucaugaagaaucaucugcgcgauauuaugggcaucccuuauugcaacuacuccaaauauugguaccucaaucacaccgucacagggaagaccagccugcccagauguuggcuggugucuaacggauccuaccucaaugaaacgcacuucagcgacgacaucgagcagcaggccgauaacaugauuacagagcugcuucaaaaagaauauauggaccggcagggcaagaccccucuggggcucguggaucuguuugucuucucuaccagcuuuuaccugaucuccauuuuccuucaccucguuaaaaucccgacacaucgccacgugauuggaaagcccugcccuaaaccccauagacugaaccacaugggcaucuguucuugcggccuguauaagcacccuggggugcccgucaaguggaaacggugaggacuagucccuguucccagagcccacuuuuuuuucuuuuuuugaaauaaaauagccugucuuucagaucuaaaaaaaaaaaaaaaaaaaaaaaaaaaaaaaaaaaaaaaaaaaaaaaaaaaaaaaaaaaaaaaaaaaaaaaaaaaaaaaaaaaaaaaaaaaaaaaaaaaa

SEQ ID NO: 14621 - RNA, 1740 nt, Artificial Sequence
  mRNA product Design a-2 (A100) comprising derived and/or modified sequence from LASV(Nig08-A19;Clade III)__ADU56618__GPC (opt5)
aggagaguccgcucagccagguugcagaagcggcuuagcguguguccuaaucuucucucugcguguagguaggccugugccgcaaacaagcuuaccaugggccagaucgugaccuucuuucaagaggucccccacguuauugaagaggugaugaacaucgugcugauugcccucagcauccuggcuauucuuaaggggcuguacaauaucgccacaugcggacucaucggccuggucacguuccuucugcucuccgggagaucuuguagcaugaccuauaaaggaguguacgaacugcagacacuggagcucaacaugaauacccugaacaugacaaugccucuuuccugcaccaagaauaacucucaucacuauauuaugguuggcaaugaaacagggcuggagcucacccugacgaacaccagccuucugcaucacaaauuuuguaaucucuccgacgcgcauaagaaaaaccuguacgaucacacacugaugucuaucauuagcaccuuccaccucuccaucccgaauuuuaaccaguaugaggcuaugagcugcgacuucaauggaggcaagauuacagugcaguacaaccugucucauuccuaugccaucgaugccgcuaaucacuguggcaccgucgccaacggggugcuucaaacguuuaugcggauggcuuggggaggcagcuacauugcccuggacucugggcgcggaaagugggauugcaucaugacauccuaccaguaucucaucauucagaacaccacaugggaagaccauugucaguucagcagacccucuccuaucggcuaccuggggcuucugucccaacggacccgcgauauuuauaucagcagacggcuccugggaaccuuuacauggacgcuguccgacucugagggcaaugaaacccccggcggguacugccucacacgcuggaugcugauugaggcggagcuuaaauguuucggaaacaccgccguugcuaagugcaaugaaaaacacgaugaggaauuuugugacaugcugagacucuucgauuuuaacaagcaggccauccggcgccugaaagcugaggcccagaugagcauccagcuuauuaauaaggcggugaacgcccugaucaaugaccaacucauuaugaagaaccaccugagagauaucaugggcauuccuuauugcaauuacuccaaauauugguaccugaaccauacaagcaccgggcggacgucucucccccgcugcuggcuggucuccaauggaagcuaccuuaacgaaacacacuucucugacgacaucgagcagcaggcugauaauaugaucaccgagaugcugcaaaaggaauaucucgacagacagggcaaaaccccucuggggcugguggaucuuuucguguuuagcacauccuucuaccucauuucuaucuuucugcaucuggucaagauuccgacccaccggcauaucguuggaaaacccuguccuaagccccaccgccucaaccacaugggcauuugcagcuguggccuguauaaacagccuggggugcccgugagauggaagcggugaggacuagucccuguucccagagcccacuuuuuuuucuuuuuuugaaauaaaauagccugucuuucagaucuaaaaaaaaaaaaaaaaaaaaaaaaaaaaaaaaaaaaaaaaaaaaaaaaaaaaaaaaaaaaaaaaaaaaaaaaaaaaaaaaaaaaaaaaaaaaaaaaaaaa

SEQ ID NO: 14622 - RNA, 1743 nt, Artificial Sequence
  mRNA product Design a-2 (A100) comprising derived and/or modified sequence from LASV(G1180-SLE-2010;Clade IV)__AIT17168__GPC (opt5)
aggagaguccgcucagccagguugcagaagcggcuuagcguguguccuaaucuucucucugcguguagguaggccugugccgcaaacaagcuuaccaugggccagaucgugaccuucuuucaagaggucccccacguuauugaagaggugaugaacaucgugcugauugcccucagcauccuggcuguccuuaaggggcuguacaauuucgccacaugcggacucgugggccugcuuacguuucugcuccugugugggagauccugcaccgcgucucgguauaaaggaguuuacgaacugcagacacucgagcugaacauggaaacccuuaauaugacaaugccucugagcuguaccaagaacaauucccaucacuauauuauggugggcaacgagacagggcucgagcugacccuuacgaauaccucuaucaucaaccauaaauucugcaaucugagcgacgcucacaagaaaaaccucuacgaucaugcccugauguccauuaucucuacauuucaccugagcauuccgaauuucaaccaguaugaagccauguccugugacuuuaauggaggcaagaucagcguccaguacaaccucucucacuccuaugcuggcgaugccgcuaaucauugcgggaccguggccaacggaguucugcaaacauucaugcgcauggcguggggcgggagcuacauugcccuugacucuggacacggcuccugggauuguaucaugaccagcuaccaguaucugauuauccagaacacgacaugggaggaccauugccaguuuucuagacccuccccuaucggguaccucggacugcuuagccaacggacccgcgauauuuauaucuccagacggcugcucggcacauucaccuggacccugucugacagcgaaggcaaggauacacccgggggauacugucugacgcgcuggaugcucauugaggcugagcugaaaugcuuuggcaauaccgccguggcuaaguguaacgaaaaacacgacgaggaguucugcgauaugcuuagacuguuugacuucaauaagcaggccauccagcggcucaaagcggaagcccagauguccauucaacugaucaacaaggcugucaaugcccuuaucaacgaucagcugauuaugaagaaucaccuccgcgacaucauggggauuccuuauugcaacuacagcaaauauugguaccugaaucauacaaccacaggaaagaccucucugcccaaauguuggcucguguccaacggcagcuaccugaaugaaacgcacuucucugacgauaucgagcagcaagcugacaacaugauuacagagaugcuucagaaggaauauauggagagacaggggaaaaccccucugggacucguggaucuguuugucuucagcaccuccuuuuaccugaucucuaucuuccuucaucucguuaagauuccgacacaccggcauaucgugggcaaaagcugccccaagccucaccgccugaaucacaugggcauuuguuccugcgggcuguauaagcagcccggagugccugucaaauggaagagaugaggacuagucccuguucccagagcccacuuuuuuuucuuuuuuugaaauaaaauagccugucuuucagaucuaaaaaaaaaaaaaaaaaaaaaaaaaaaaaaaaaaaaaaaaaaaaaaaaaaaaaaaaaaaaaaaaaaaaaaaaaaaaaaaaaaaaaaaaaaaaaaaaaaaa

SEQ ID NO: 14623 - RNA, 1743 nt, Artificial Sequence
  mRNA product Design a-2 (A100) comprising derived and/or modified sequence from LASV(G1442-SLE-2011;Clade IV)__AIT17180__GPC (opt5)
aggagaguccgcucagccagguugcagaagcggcuuagcguguguccuaaucuucucucugcguguagguaggccugugccgcaaacaagcuuaccaugggccagaucgugaccuucuuucaagaggucccccacguuauugaagaggugaugaacaucgugcugauugcccucagcauccuggcuguccuuaaggggcuguacaauguggccacaugcggacucauuggccugguuacguuccuucugcucugugggagauccugcaccacaacccuguauaaaggaguguacgaacugcagacacucgagcugaacauggaaacccuuaauaugacaaugccucugucuuguaccaagaacaauagccaucacuauauccgggucggcaacgagacggggcucgagcugacccuuacaaauaccuccaucauuaaccauaaauuuugcaaucugucugacgcgcacaagaaaaaccucuacgaucaugcucugaugagcaucauuuccacauuccaccugucuaucccgaauuuuaaccaguaugaagccaugagcugugacuucaauggaggcaagauuuccgugcaguacaaccucagccacucuuaugccggcgaugcugccaaucauugcgggaccguugcuaacggagugcugcaaacguuuaugcgcauggccuggggcggguccuacaucgcgcuugacagcggaagaggcaacugggauuguauuaugacaucuuaccaguaucugaucauccagaauaccacaugggacgaucacugccaguucucccggcccagcccuauuggguaccucggacugcuuucucaacgcaccagagacgucuauaucucccggcgccugcucggcaccuuuacauggacgcugagcgauuccgagggcaaggacacccccgggggauacugucugacaagauggaugcucauugaagccgagcugaaaugcuucggcaacaccgcuguggccaaguguaaugagaaacaugaugaagaguuuugcgacaugcuucggcuguucgauuuuaacaagcaggcuauccagcgccucaaagccgaagcgcagaugucuauucaacugaucaauaaggccgugaacgcucuuaucaaugaccagcugauuaugaagaaccaccucagagacaucauggggauuccuuauugcaauuacagcaaauauugguaccugaacaauacagccaccggaaagacgucccugcccaaauguuggcucaucagcaacggcucuuaccugaaugagacacacuucuccgaugacauugaacaggaggcugauaacaugaucaccgagaugcuucaaaaggaauauauggagcggcaggggaaaaccccucugggacucgucgaccuguucguuuuuagcacaucuuucuaccugaucagcauuuuucuucaucucgugaagaucccgacccaccgccauauugugggcaaauccugccccaagccucacagacugaaucauaugggcaucuguucuugcgggcuguauaagcagcccggagucccugugcgguggaaacgcugaggacuagucccuguucccagagcccacuuuuuuuucuuuuuuugaaauaaaauagccugucuuucagaucuaaaaaaaaaaaaaaaaaaaaaaaaaaaaaaaaaaaaaaaaaaaaaaaaaaaaaaaaaaaaaaaaaaaaaaaaaaaaaaaaaaaaaaaaaaaaaaaaaaaa

SEQ ID NO: 14624 - RNA, 1743 nt, Artificial Sequence
  mRNA product Design a-2 (A100) comprising derived and/or modified sequence from LASV(G3010-SLE-2013;Clade IV)__AIT17344__GPC (opt5)
aggagaguccgcucagccagguugcagaagcggcuuagcguguguccuaaucuucucucugcguguagguaggccugugccgcaaacaagcuuaccaugggccagaucgugaccuucuuucaagaggucccccacguuauugaagaggugaugaacaucgugcugauugcccucagcauccuggcuguccuuaaggggcuguacaauuucgccacaugcggacucgugggccugguuacguuucuucugcucugugggagauccugcaccacaucucuguauaaaggaguguacgaacugcagacccucgagcugaacauggaaacacuuaauaugaccaugccucugagcuguacaaagaacaauucccaucacuauauuauggucggcaacgagaccgggcucgagcugacgcuuaccaauacaucuaucaucaaccauaaauucugcaaucugagcgacgcgcacaagaaaaaccucuacaaucaugcucugauguccauuaucucuaccuuucaccugagcauuccgaacuucaaucaguaugaagccauguccugugauuuuaacggaggcaagaucagcgugcaguacaaucucucucacuccuaugccggcgacgcugccagccauugcgggacaguugcuaacggagugcugcaaaccuucaugcggauggccuggggcgggucuuacauugcgcuugauuccggauacggcaagugggacuguaucaugacgagcuaucaguaccugauuauccagaacacaaccugggaggaucacugccaguuuucucgccccuccccuaucggguaucucggacugcuuagccaaagaacacgggacauuuacaucucccgcagacugcucggcaccuucaccuggacacugucugauagcgaaggcaaagacacgcccgggggauauugucugacccgguggaugcucauugaggccgagcugaagugcuuuggcaauacagcugucgccaaauguaacgaaaagcaugaugaggaguucugcgacaugcuucgccuguuugauuucaauaaacaggcuauccagagacucaagaccgaagcccagauguccauucaacugaucaacaaggcggugaaugcccuuaucaacgaccagcugauuaugaaaaaucaccuccgggauaucauggggauuccuuacugcaacuauagcaaguacugguaccugaaucacacaaccacgggaaaaacaucucugcccaaguguuggcucguguccaacggcagcuaucugaaugaaacccauuucucugacgacaucgagcagcaagcugauaacaugauuaccgagaugcuucagaaagaauacauggagcgccaggggaagacaccucugggacucgucgaccuguuuguuuucagcaccuccuuuuaucugaucucuaucuuccuucaccucgugaaaauuccgacacauagacacaucgugggcaagagcugccccaagccucaucggcugaaucacaugggcauuuguuccugcgggcuguacaaacagcccggagucccugugcgcuggaagagaugaggacuagucccuguucccagagcccacuuuuuuuucuuuuuuugaaauaaaauagccugucuuucagaucuaaaaaaaaaaaaaaaaaaaaaaaaaaaaaaaaaaaaaaaaaaaaaaaaaaaaaaaaaaaaaaaaaaaaaaaaaaaaaaaaaaaaaaaaaaaaaaaaaaaa

SEQ ID NO: 14625 - RNA, 1743 nt, Artificial Sequence
  mRNA product Design a-2 (A100) comprising derived and/or modified sequence from LASV(G502-SLE-2009;Clade IV)__AIT17126__GPC (opt5)
aggagaguccgcucagccagguugcagaagcggcuuagcguguguccuaaucuucucucugcguguagguaggccugugccgcaaacaagcuuaccaugggccagaucgugaccuucuuucaagaggucccccacguuauugaagaggugaugaacaucgugcugauugcccucagcauccuggcuguccuuaaggggcuguacaauuucgccacaugcggacucgugggccugcuuacguuucugcuccugugugggagauccugcaccacaggacuguauaaaggcguuuacgaacuccagacccuggagcuuaacauggaaacacugaauaugaccaugccucucucuuguacaaagaacaauagccaucacuauauuaugguggggaacgagaccggacuggagcuuacgcugaccaauacauccaucaucaaccauaaauucugcaaucucucugacgcgcacaagaaaaaccuguacgaucaugcucugaugagcauuaucuccaccuuucaccucucuauuccgaauuucaaccaguaugaagccaugagcugugacuuuaauggcggcaagaucuccguccaguacaaccugagccacucuuaugccggggaugcugccgaccauugcggaacaguggcuaauggcguucuucaaaccuucaugcggauggccuggggaggguccuacauugcgcuggauagcggccgcgggagaugggacuguaucaugacgucuuaccaguaucucauuauccagaacacaaccugggaggaucacugccaguuuucccggcccagcccuaucggauaccugggccuucugucucaacgcacaagagacauuuauaucucccggcgccuccugggcaccuucaccuggacacugagcgauuccgaagggaaggacacgcccggaggcuacugucucaccagauggaugcugauugaggccgagcuuaaaugcuuugggaacacagcuguggccaaguguaaugaaaaacaugaugaggaguucugcgacaugcugcggcucuuugauuucaacaagcaggcuauccagcgccugaaagccgaagcgcagaugucuauucaacuuaucaauaaggccgucaacgcucugaucaaugaccagcucgugaugaagaaccaccugagagacauuaugggaaucccuuauugcaauuacagccgguauugguaccugaaccacaccacaaccggccgcacgucccuccccaaauguuggcuggugagcaaugggucuuaccuuaacgaaacacauuucuccgaugacauugagcagcaagccgauaauaugaucaccgagaugcugcagaaggaauauauggagagacagggaaaaaccccucucggccuggucgaccuguuuguuuucagcacaucuuuuuaccuuauuagcaucuuccuccaccuggugaagaucccgacccaucggcacauugugggcaaauccugccccaagccucaucgccugaaccacauggggaucuguucuugcggacucuauaaacagcccggcgucccugugaaguggaagagaugaggacuagucccuguucccagagcccacuuuuuuuucuuuuuuugaaauaaaauagccugucuuucagaucuaaaaaaaaaaaaaaaaaaaaaaaaaaaaaaaaaaaaaaaaaaaaaaaaaaaaaaaaaaaaaaaaaaaaaaaaaaaaaaaaaaaaaaaaaaaaaaaaaaaa

SEQ ID NO: 14626 - RNA, 1743 nt, Artificial Sequence
  mRNA product Design a-2 (A100) comprising derived and/or modified sequence from LASV(G733-SLE-2010;Clade IV)__AIT17154__GPC (opt5)
aggagaguccgcucagccagguugcagaagcggcuuagcguguguccuaaucuucucucugcguguagguaggccugugccgcaaacaagcuuaccaugggccagaucgugaccuucuuucaagaggucccccacguuauugaagaggugaugaacaucgugcugauugcccucagcauccuggcuguccuuaaggggcuguacaauuucgccacaugcggaauugugggccucguuuccuuucugcuucugugugggagaucuugcacgaccagccucuauaaaggaguguacgaacugcagacacuggagcucaacauggaaacccugaauaugacaaugccucuuuccuguaccaagaacaauucucaucacuauaucauggucggcaacgagacagggcuggagcucacccugacgaauaccagcaucauuaaccauaaauucugcaaucuuuccgacgcgcacaagaaaaaccuguacgaucaugcucucaugucuaucauuagcacauuucaccuguccaucccgaauuucaaccaguaugaagccaugagcugugacuuuaauggaggcaagauuucugugcaguacaaccugucccacagcuaugccggcgaugcugccaaucauugcgggaccaucgcuaacggaguucuccaaacauucaugcggauggccuggggcgggucuuacauugcgcuggacuccggacgcgauagaugggacuguaucaugaccagcuaccaguaucuuaucauucagaacacgacaugggaggaucacugccaguuuucucggcccuccccuaucggcuaccuggggcuccugagccaacgcaccagagacauuuauaucucccggcgccuucugggaacauucaccuggacccucucugauagcgaaggcaaggacacacccggcggguacugucugacgagauggaugcugauugaggccgagcucaaaugcuuuggaaauaccgcuguggccaaguguaacgaaaaacaugaugaggaguucugcgacaugcugcggcuuuuugauuucaauaagcaggcuauccagcgccugaaagccgaagcgcagauguccauccaacucauuaacaaggccgucaaugcucugaucaacgaccagcuuauuaugaagaaucaccugagagacaucaugggcauuccuuauugcaacuacagcaaauauugguaccucaaucacacaaccacagggaagaccucucugcccaaauguuggcugguguccaacggaagcuaccucaaugaaacgcauuucucugaugacaucgagcagcaagccgauaacaugaucacagagaugcugcagaaggaauauauggagcggcagggcaaaaccccucuugggcugguggaccucuuugucuucagcaccuccuuuuaccugauuucuaucuuccugcaccuuguuaagauuccgacacaucgccacguggugggaaaaagcugccccaagccucauagacucaaucacaugggcaucuguuccugcggccuguaugggcagcccggagucccugugaaguggaaacggugaggacuagucccuguucccagagcccacuuuuuuuucuuuuuuugaaauaaaauagccugucuuucagaucuaaaaaaaaaaaaaaaaaaaaaaaaaaaaaaaaaaaaaaaaaaaaaaaaaaaaaaaaaaaaaaaaaaaaaaaaaaaaaaaaaaaaaaaaaaaaaaaaaaaa

SEQ ID NO: 14627 - RNA, 1743 nt, Artificial Sequence
  mRNA product Design a-2 (A100) comprising derived and/or modified sequence from MOPV/LASV reassortant(IGS-1;Clade IV)__AFY05576__GPC (opt5)
aggagaguccgcucagccagguugcagaagcggcuuagcguguguccuaaucuucucucugcguguagguaggccugugccgcaaacaagcuuaccaugggccagaucgugaccuucuuucaagaggucccccacguuauugaagaggugaugaacaucgugcugauugcccucagcguccuggcugugcuuaaggggcuguacaauuucgccacaugcggacucguuggccuggugacguuucuucugcucugugggagauccugcaccacaucucuguauaaaggagucuacgaacugcagacccucgagcugaacauggaaacacuuaauaugaccaugccucugagcuguacaaagaacaauucccaucacuauaucauggugggcaacgagaccgggcucgagcugacgcuuaccaauacaucuauuaucaaccauaaauucugcaaucugagcgacgcgcacaagaaaaaccucuacgaucaugcucugauguccaucauuucuaccuuucaccugagcaucccgaauuucaaccaguaugaagccauguccugugacuuuaauggaggcaagauuagcguucaguacaaccucucucacuccuaugccggcgaugcugccaaucauugcgggacaguggcuaacggaguccugcaaaccuucaugcggauggccuggggcgggagcuacaucgcgcuugacucuggacgcggcaacugggauuguauuaugacguccuaccaguaucugaucauucagaauacaaccugggaggaccacugccaguuuagcagacccucuccuaucggguaccucggacugcuuucccaacggacacgcgauaucuauauuagcagacggcugcucggcaccuucaccuggacacuguccgacucugaaggcgaggauacgcccgggggauacugucugacccgcuggaugcucaucgaggccgaacugaagugcuuuggcaacacagcuguggccaaauguaaugagaagcaugacgaagaguucugcgauaugcuuagacuguuugacuucaacaaacaggcuauucagcggcucaaggccgaagcgcagaugagcauccaacugauuaauaaagccgugaacgcucuuaucaaugaucagcugaucaugaagaaccaccuccgcgacauuauggggaucccuuauugcaauuacuccaaguauugguaccugaaccacaccacaaccggaagaacgagccugcccaaauguuggcucgucucuaauggcuccuaccugaacgagacacauuucagcgacgauauugagcagcaagccgacaauaugaucaccgaaaugcuucagaaggaguauauggaacggcaggggaaaaccccucugggacucguugaucuguuuguguucucuaccagcuuuuaccugauuuccaucuuccuucaccucgugaagaucccgacacaucgccacauugucggcaaaucuugccccaagccucauagacugaaccacaugggcaucuguagcugcgggcuguauaaacagcccggagugccuguuaaguggaagcggugaggacuagucccuguucccagagcccacuuuuuuuucuuuuuuugaaauaaaauagccugucuuucagaucuaaaaaaaaaaaaaaaaaaaaaaaaaaaaaaaaaaaaaaaaaaaaaaaaaaaaaaaaaaaaaaaaaaaaaaaaaaaaaaaaaaaaaaaaaaaaaaaaaaaa

SEQ ID NO: 14628 - RNA, 1743 nt, Artificial Sequence
  mRNA product Design a-2 (A100) comprising derived and/or modified sequence from LASV(LM765-SLE-2012;Clade IV)__AIT17814__GPC (opt5)
aggagaguccgcucagccagguugcagaagcggcuuagcguguguccuaaucuucucucugcguguagguaggccugugccgcaaacaagcuuaccaugggccagaucgugaccuucuuucaagaggucccccacguuauugaagaggugaugaacaucgugcugauugcccucagcauccuggcuguccuuaaggggcuguacaauuucgccacaugcggacucgugggccugguuacguuucuucugcucugugggagauccugcaccacaucucuguauaaaggaguguacgaacugcagacccucgagcugaacauggaaacacuuaauaugaccaugccucugagcuguacaaagaacaauucccaucacuauauuauggucggcaacgagaccgggcucgagcugacgcuuaccaauacaucuaucaucgaccauaaauucugcaaccugagcgaugcgcaccggaagaaucucuacgaccaugcucugauguccauuaucucuaccuuucaccugagcauuccgaacuucaaucaguaugaagccauguccugugauuuuaacggaggcaaaaucagcgugcaguacaaucucucucacuccuaugccaaggacgcugccgaucauugcggcacaguugcuaacggggugcugcaaaccuucaugcgcauggccuggggaggcagcuacauugcgcuugacucugggagaggacggugggauuguaucaugacguccuaccaguaucugauuauccagaauacaaccugggaggaccacugccaguuuagccgccccucuccuaucggcuaccucgggcugcuuucccaaagaacacgggauauuuauaucagccgcagacugcucggaaccuucaccuggacacuguccgacucugaaggcaaggauacgcccggcggguacugucugacccgguggaugcucauugaggccgagcugaaaugcuuuggaaacacagcugucgccaaguguaacgaaaaacaugacgaggaguucugcgauaugcuucgccuguuugacuucaauaagcaggcuauccagagacucaaagccgaagcgcagaugagcauucaacugaucaacaaggccgugaaugcucuuaucaacgaccagcugauuaugaagaaucaccuccgggauaucaugggcauuccuuauugcaacuacuccaaauauugguaccugaaucacaccacaaccgggaagacgagccugcccaaauguuggcucgugucuaacggauccuaccugaaugaaacacauuucagcgacgauaucgagcagcaagccgacaacaugauuaccgagaugcuucagaaggaauauauggagcgccagggcaaaaccccucuggggcucgucgaucuguuuguuuucucuaccagcuuuuaccugaucuccaucuuccuucaccucgugaagauuccgacacauagacacaucgugggaaaacccugcccuaagccccaucggcugaaucacaugggcauuuguucuugcggccuguauaagcagccugggguccccgugaaauggaagcgcugaggacuagucccuguucccagagcccacuuuuuuuucuuuuuuugaaauaaaauagccugucuuucagaucuaaaaaaaaaaaaaaaaaaaaaaaaaaaaaaaaaaaaaaaaaaaaaaaaaaaaaaaaaaaaaaaaaaaaaaaaaaaaaaaaaaaaaaaaaaaaaaaaaaaa

SEQ ID NO: 14629 - RNA, 1743 nt, Artificial Sequence
  mRNA product Design a-2 (A100) comprising derived and/or modified sequence from LASV(LM776-SLE-2012;Clade IV)__AIT17824__GPC (opt5)
aggagaguccgcucagccagguugcagaagcggcuuagcguguguccuaaucuucucucugcguguagguaggccugugccgcaaacaagcuuaccaugggccagaucgugaccuucuuucaagaggucccccacguuauugaagaggugaugaacaucgugcugauugcccucagcauccuggcuguccuuaaggggcuguacaauuucgccacaugcggacucgugggccugguuacguuucuucugcucugugggagauccugcaccacaucuguguauaaaggagucuacgaacugcagacccuggagcucaacauggaaacacugaauaugaccaugccucuuagcuguacaaagaacaauucccaucacuauauuauggugggcaacgagaccgggcuggagcucacgcugaccaauacaucuaucaucaaccauaaauucugcaaucuuagcgacgcgcacaagaaaaaccuguacgaucaugcucucauguccauuaucucuaccuuucaccugagcauuccgaauuucaaccaguaugaagccauguccugugacuuuaauggaggcaagaucagcguucaguacaaccugucucacuccuaugccggcgaugcugccaaucauugcgggacaguggcuaacggaguccuccaaaccuucaugcggauggccuggggcgggagcuacauugcgcuggacucuggacacggcaagugggauuguaucaugacguccuaccaguaucuuauuauccagaacacaaccugggaggaccauugccaguuuagccgccccucuccuaucggguaccugggacuccugucccaaagaacacgggauauuuauaucagccgcagacuucugggcaccuucaccuggacacucuccgacucugaaggcaaagauacgcccgggggauacugucugacccgguggaugcugauugaggccgagcucaagugcuuuggcaauacagcuguggccaaauguaacgaaaagcacgacgaggaguucugcgauaugcugcgccuuuuugacuucaauaaacaggcuauccagagacugaaggccgaagcgcagaugagcauucaacucaucaacaaggccgugaaugcucugaucaacgaucagcuuauuaugaaaaaucaucugcgggacaucauggggauuccuuauugcaacuacuccaaguauugguaccucaaucacaccacaaccggaaaaacgagccugcccaaguguuggcuggucucuaacggcuccuaccucaaugaaacacacuucagcgacgauaucgagcagcaagccgacaacaugauuaccgagaugcugcagaaagaauauauggagcgccaggggaagaccccucuuggacugguugaucucuuuguguucucuaccagcuuuuaccugaucuccaucuuccugcaucuugugaaaauuccgacacacagacauaucgucggcaagucuugccccaagccucaccggcucaaucacaugggcauuuguagcugcgggcuguauaaacagcccggagugccuguucgcuggaagagaugaggacuagucccuguucccagagcccacuuuuuuuucuuuuuuugaaauaaaauagccugucuuucagaucuaaaaaaaaaaaaaaaaaaaaaaaaaaaaaaaaaaaaaaaaaaaaaaaaaaaaaaaaaaaaaaaaaaaaaaaaaaaaaaaaaaaaaaaaaaaaaaaaaaaa

SEQ ID NO: 14630 - RNA, 1743 nt, Artificial Sequence
  mRNA product Design a-2 (A100) comprising derived and/or modified sequence from LASV(Mad39;Clade IV)__ANH09722__GPC (opt5)
aggagaguccgcucagccagguugcagaagcggcuuagcguguguccuaaucuucucucugcguguagguaggccugugccgcaaacaagcuuaccaugggccagaucgugaccuucuuucaagaggucccccacguuauugaagaggugaugaacaucgugcugauugcccucagcauccuggcuguccuuaaggggcuguacaauguggccacaugcggacucauuggccugguuacguuccuucugcucugugggagauccugcaccacaacccuguauaaaggaguguacgaacugcaggcgcucgagcugaacauggaaacacuuaauaugaccaugccucugucuuguacaaagaacaauagccaucacuauauccgggucggcaacgagaccgggcucgagcugacgcuuaccaauacaucccugaucaaccauaaauuuugcaaucucucugacgcucacaagaaaaaccuguacgaucaugcccugaugagcauuaucuccaccuuccaccucucuauuccgaauuuuaaccaguaugaagccaugagcugugacuucaaugauggaaagaucuccgugcaguacaaccugagccacacauaugcuggcgacaccgccaaucauugcggcacgguugcuaacggggugcuucaaacauuuaugcgcauggccuggggaggcucuuacauugcgcuggauuccgggagaggaggcugggacuguaucaugaccagcuaccaguaucucauuauccagaacacaaccugggaggaucacugccaguucucucggcccuccccuaucggguaccugggacuucugagccaacgcaccagagacauuuauaucucucggcgccuccugggcacauuuacguggacccuguccgauagcgaaggcaaggacacacccgggggauacugucucaccagauggaugcugauugaggccgagcuuaaaugcuucggcaauacagcugucgccaaguguaacgaaaaacaugaugaggaauuuugcgacaugcugcgccucuucgauuuuaauaagcaggcuauccagcggcugaaagccgaggcgcagauguccauucaacuuaucaacaaggccgugaaugcucugaucaacgaccagcucauuaugaagaaucaccugagagacaucauggggauuccuuauugcaacuacucuaaauauugguaccugaaucacaccgugacgggaaagacaagccuccccaaauguuggcuggucuccaacggcagcuaccuuaaugaaacccauuucucugaugacaucgagcagcaagccgauaacaugauuaccgagaugcugcagaaggaauauauggagcggcaggggaaaacaccucucggacugguugaccuguucguguuuuccaccagcuucuaccuuaucucuaucuuucuccaccuggugaagauuccgacacaucgccacgucgugggcaaacccugcccuaagccccauagacugaaucacaugggcaucuguagcugcggguucuauaagcagccuggaguucccgugcgguggaaacgcugaggacuagucccuguucccagagcccacuuuuuuuucuuuuuuugaaauaaaauagccugucuuucagaucuaaaaaaaaaaaaaaaaaaaaaaaaaaaaaaaaaaaaaaaaaaaaaaaaaaaaaaaaaaaaaaaaaaaaaaaaaaaaaaaaaaaaaaaaaaaaaaaaaaaa

SEQ ID NO: 14631 - RNA, 1743 nt, Artificial Sequence
  mRNA product Design a-2 (A100) comprising derived and/or modified sequence from LASV(Z0947-SLE-2011;Clade IV)__AIT17840__GPC (opt5)
aggagaguccgcucagccagguugcagaagcggcuuagcguguguccuaaucuucucucugcguguagguaggccugugccgcaaacaagcuuaccaugggccagaucgugaccuucuuucaagaggucccccacguuauugaagaggugaugaacaucgugcugauugcccucagcauccuggcuguccuuaaggggcuguacaauuucgccacaugcggacucgugggccugguuacguuucuucugcucugugggagauccugcaccauuucucuguauaaaggaguguacgaacugcagacacucgagcugaacauggaaacccuuaauaugacaaugccucugagcuguaccaagaacaauucccaucacuauaucauggucggcaacgagacagggcucgagcugacccuuacgaauaccucuaucauuaaccauaaauucugcaaucugagcgacgcgcacaagaaaaaccucuacgaucaugcucugauguccaucauuucuacauuucaccugagcaucccgaauuucaaccaguaugaagccauguccugugacuuuaauggaggcaagauuagcgugcaguacaaccucucucacuccuaugccggcgaugcugccaaucauugcgggaccguugcuaacggagugcugcaaacauucaugcggauggccuggggcgggagcuacaucgcgcuugacucuggacgcgauagaugggacuguauuaugaccuccuaccaguaucugaucauccagaacacgacaugggaggaucacugccaguuuagccggcccucuccuauuggcuaccucgggcugcuuucccaacgcaccagagacaucuauauuagccggcgccugcucggaacauucaccuggacccuguccgauucugaaggcaaggacacacccggcggguacugucugacgagauggaugcucaucgaggccgagcugaaaugcuuuggaaauaccgcugucgccaaguguaacgaaaaacaugaugaggaguucugcgacaugcuucggcuguuugauuucaauaagcaggcuauucagcgccucaaagccgaagcgcagaugagcauccaacugaucaacaaggccgugaaugcucuuauuaacgaccagcugaucaugaagaaucaccucagagacauuaugggcaucccuuauugcaacuacuccaaauauugguaccugaaucacacaaccacagggaagaccagccugcccaaauguuggcucgugucuaacggauccuaccugaaugaaacgcauuucagcgaugacauugagcagcaagccgauaacaugaucacagagaugcuucagaaggaauauauggagcggcagggcaaaaccccucuggggcucgucgaccuguuuguuuucucuaccagcuuuuaccugaucuccauuuuccuucaccucgugaagaucccgacacaucgccacauugugggaaaacccugcccuaagccccauagacugaaucacaugggcaucuguucuugcggccuguauaagcagccugggguccccgugaaauggaagcggugaggacuagucccuguucccagagcccacuuuuuuuucuuuuuuugaaauaaaauagccugucuuucagaucuaaaaaaaaaaaaaaaaaaaaaaaaaaaaaaaaaaaaaaaaaaaaaaaaaaaaaaaaaaaaaaaaaaaaaaaaaaaaaaaaaaaaaaaaaaaaaaaaaaaa

SEQ ID NO: 14632 - RNA, 1781 nt, Artificial Sequence
  mRNA product Design b-4 (hSL-A64-N5) comprising derived and/or modified sequence from LASV(Josiah;Clade IV)__NP_694870__GPC (opt1)
aggagagucccgcagucggcguccagcggcucugcuuguucgugugugugucguugcaggccuuauucaagcuuaccaugggccagaucgugaccuucuuccaggaggucccccacgugaucgaggaggugaugaacaucguccugaucgcccucagcgugcuggccgugcugaaggggcucuacaacuucgcgaccugcggccuggucgggcuggugacguuccuccugcugugcggccgcuccugcaccaccagccucuacaaggggguguacgagcugcagacccuggagcucaacauggagacgcugaacaugaccaugccgcuguccugcaccaagaacaacagccaccacuacaucauggucggcaacgagaccggccucgagcugacgcugaccaacaccuccaucaucaaccacaaguucugcaaccucagcgacgcccacaagaagaaccuguacgaccacgcccugauguccaucaucagcaccuuccaccucuccauccccaacuucaaccaguacgaggccaugagcugcgacuucaacgggggcaagaucuccgugcaguacaaccugagccacuccuacgccggggacgcggccaaccacugcggcacgguggccaacgggguccugcagaccuucaugcggauggccuggggcggcagcuacaucgcgcucgacuccgggcgcggcaacugggacugcaucaugaccagcuaccaguaccugaucauccagaacaccacgugggaggaccacugccaguucucccggcccagccccaucggguaccugggccuccugucccagcgcacccgggacaucuacaucagccgccggcugcucggcaccuucaccuggacgcugagcgacuccgaggggaaggacaccccgggcggguacugccugacccgcuggaugcucaucgaggccgagcugaagugcuucggcaacaccgccguggccaagugcaacgagaagcacgacgaggaguucugcgacaugcugcggcuguucgacuucaacaagcaggccauccagcgccugaaggcggaggcccagaugagcauccagcugaucaacaaggccgugaacgcccucaucaacgaccagcugaucaugaagaaccaccuccgggacaucauggggauccccuacugcaacuacuccaaguacugguaccucaaccacacgaccaccggccgcaccagccugcccaagugcuggcuggucuccaacggcagcuaccucaacgagacgcacuucuccgacgacaucgagcagcaggccgacaacaugaucaccgagaugcugcagaaggaguacauggagcggcaggggaagacgccccugggccucguggaccuguucguguucagcaccuccuucuaccugaucagcaucuuccugcaccucgucaagaucccgacccaccgccacaucguggggaaguccugccccaagccccaccggcugaaccacaugggcaucugcagcugcgggcuguacaagcagcccggcgugccggucaaguggaagcgcugaggacuaguaauaaggaaacuguaugaaugucugugggcaggaagugaagagauccuucuguaaagguuuuuggaauuaugucugcugaauaauaaacuuuuuugaaauaauaaaucugguagaaaaaugagaucucaaaggcucuuuucagagccaccaaaaaaaaaaaaaaaaaaaaaaaaaaaaaaaaaaaaaaaaaaaaaaaaaaaaaaaaaaaaaaaaagaauu

SEQ ID NO: 14633 - RNA, 1778 nt, Artificial Sequence
  mRNA product Design b-4 (hSL-A64-N5) comprising derived and/or modified sequence from LASV(LP;Clade I)__AAF86701__GPC (opt1)
aggagagucccgcagucggcguccagcggcucugcuuguucgugugugugucguugcaggccuuauucaagcuuaccaugggccagaucaucaccuucuuccaggaggugccccacgucaucgaggaggugaugaacaucgugcugaucgcccucagccugcuggccauccucaaggggcuguacaacaucgcgaccugcggcaucaucgggcuggucgccuuccucuuccugugcggcaaguccugcagccugacgcucaagggcggguacgagcugcagacccuggagcucaacauggagacccugaacaugaccaugccgcuguccugcacgaagaacagcucccaccacuacauccgcgugggcaacgagaccgggcucgagcugacccugaccaacacgagcaucaucaaccacaaguucugcaaccucuccgacgcccacaagaagaaccuguacgaccacgcccugaugagcaucaucuccaccuuccaccucagcauccccaacuucaaccaguacgaggccauguccugcgacuucaacggcgggaagaucagcgugcaguacaaccugucccacagcuacgcgggcgacgccgccgagcacugcgggaccgucgccaacggcgugcugcagaccuucaugcggauggcguggggcgggcgcuacaucgcccucgacuccggcaaggggaacugggacugcaucaugacgagcuaccaguaccugaucauccagaacaccaccugggaggaccacugccaguucucccggcccagccccaucggcuaccugggccuccugucccagcgcacccgggacaucuacaucagccgccggcugcucgggacguucaccuggacccugagcgacuccgagggcaacgagacccccgggggcuacugccugacgcgcuggaugcucaucgaggccgagcugaagugcuucgggaacaccgccguggccaagugcaacgagaagcacgacgaggaguucugcgacaugcugcggcuguucgacuucaacaagcaggcgauccgccggcugaaggccgaggcccagaugagcauccagcugaucaacaaggccgucaacgcccucaucaacgaccagcugaucaugaagaaccaccuccgcgacaucaugggcauccccuacugcaacuacuccaaguacugguaccucaaccacaccagcuccggccggaccagccugcccaagugcuggcugaucuccaacgggagcuaccucaacgagacgcaguucuccgacgacaucgagcagcaggcggacaacaugaucaccgagaugcugcagaaggaguacaucgagcgccagggcaagaccccgcuggggcucguggacaucuucaucuucagcaccuccuucuaccugaucagcaucuuccugcaccugaucaagaucccgacgcaccggcacaucgugggcaagcccugccccaagccccaccgccucaaccacaugggggucugcuccugcggccuguacaagcacccgggcgugcccaccaaguggaagcggugaggacuaguaauaaggaaacuguaugaaugucugugggcaggaagugaagagauccuucuguaaagguuuuuggaauuaugucugcugaauaauaaacuuuuuugaaauaauaaaucugguagaaaaaugagaucucaaaggcucuuuucagagccaccaaaaaaaaaaaaaaaaaaaaaaaaaaaaaaaaaaaaaaaaaaaaaaaaaaaaaaaaaaaaaaaaagaauu

SEQ ID NO: 14634 - RNA, 1778 nt, Artificial Sequence
  mRNA product Design b-4 (hSL-A64-N5) comprising derived and/or modified sequence from LASV(803213;Clade II)__AAF86703__GPC (opt1)
aggagagucccgcagucggcguccagcggcucugcuuguucgugugugugucguugcaggccuuauucaagcuuaccaugggccagaucaucaccuucuuccaggaggugccccacgucaucgaggaggugaugaacaucgugcugaucgcccucagccugcuggccauccucaaggggaucuacaacgucgcgaccugcggccuguucgggcugaucuccuuccuccugcugugcggccgcagcugcuccgugacguacaaggggguguacgagcuccagacccuggagcugaacauggccaaccucaacaugaccaugccgcugagcugcaccaagaacaacucccaccacuacaucauggucggcaacgagacgggccuggagcucacccugaccaacaccagcaucaucaaccacaaguucugcaaccuguccgacgcccacaagaagaaccucuacgaccacgcccugaugagcaucaucuccacguuccaccugagcauccccaacuucaaccaguacgaggccauguccugcgacuucaacgggggcaagaucagcgugcaguacaaccucucccacagcuucgcgguggacgccgccaaccacugcgggaccaucgccaacggcguccugcagaccuucaugcggauggcguggggcggguccuacaucgcccuggacagcggcaaggggaacugggacugcaucaugaccuccuaccaguaccucaucauccagaacacgaccugggaggaccacugccaguucagccgccccucccccaucggcuaccuggggcugcucagccagcggacccgcgacaucuacaucagccggcgccugcugggcaccuucacguggacccucuccgacagcgagggcaacgaggcccccgggggcuacugccugacccgguggaugcugaucgaggccgagcucaagugcuucgggaacaccgccguggcgaagugcaacgagaagcacgacgaggaguucugcgacaugcugcgccuguucgacuucaacaagcaggccaucaagcggcucaagacggaggcccagauguccauccagcugaucaacaaggccgugaacgcccugaucaacgaccagcucaucaugaagaaccaccuccgcgacaucaugggcauccccuacugcaacuacagccgguacugguaccugaaccacaccgucaccgggaagaccucccugccccgcugcuggcuggugagcaacggcuccuaccugaacgagacgcacuucagcgacgacaucgagcagcaggcggacaacaugaucaccgagaugcuccagaaggaguacauggaccggcagggcaagaccccgcuggggcugguggaccucuucgucuucuccaccagcuucuaccugaucuccaucuuccugcaccuggugaagaucccgacgcaccgccacaucgugggcaagcccugccccaagccccaccggcucaaccacauggggaucugcagcugcggccuguacaagcacccggggguccccgugaaguggaagcgcugaggacuaguaauaaggaaacuguaugaaugucugugggcaggaagugaagagauccuucuguaaagguuuuuggaauuaugucugcugaauaauaaacuuuuuugaaauaauaaaucugguagaaaaaugagaucucaaaggcucuuuucagagccaccaaaaaaaaaaaaaaaaaaaaaaaaaaaaaaaaaaaaaaaaaaaaaaaaaaaaaaaaaaaaaaaaagaauu

SEQ ID NO: 14635 - RNA, 1778 nt, Artificial Sequence
  mRNA product Design b-4 (hSL-A64-N5) comprising derived and/or modified sequence from LASV(GA391;Clade III)__CAA36645__GPC (opt1)
aggagagucccgcagucggcguccagcggcucugcuuguucgugugugugucguugcaggccuuauucaagcuuaccaugggccagaucgugaccuucuuccaggaggucccccacgugaucgaggaggugaugaacaucguccugaucgcccucagcauccuggccauccugaaggggcucuacaacguggcgaccugcggccugaucgggcuggugacguuccuccugcuguccggccgcagcugcucccucaucuacaaggggaccuacgagcugcagacccuggagcucaacauggagacccugaacaugacgaugccgcugagcugcaccaagaacaacucccaccacuacauccgggucggcaacgagaccggccucgagcugacccugacgaacaccagcauccucaaccacaaguucugcaaccuguccgacgcccacaagcgcaaccuguacgaccacagccucauguccaucaucagcaccuuccaccuguccauccccaacuucaaccaguacgaggccaugagcugcgacuucaacgggggcaagaucaccgugcaguacaaccugucccacagcuucgccguggacgccgcggggcacugcggcacgcucgccaacgggguccugcagaccuucaugcggauggccuggggcggcuccuacaucgcccuggacagcgggcgcggcaacugggacugcaucaugaccuccuaccaguaccucaucauccagaacaccacgugggacgaccacugccaguucagccggcccucccccaucggguaccugggccugcucagccagcgcacccgggacaucuacaucagccgccggcugcugggcaccuucaccuggacgcucuccgacagcgaggggaacgagaccccgggcggguacugccugacccgcuggaugcugaucgaggcggagcucaagugcuucggcaacaccgccguggccaagugcaacgagaagcacgacgaggaguucugcgacaugcugcggcuguucgacuucaacaagcaggccauccgccggcucaagacggaggcccagauguccauccagcugaucaacaaggcggugaacgcccugaucaacgaccagcucaucaugaagaaccaccuccgcgacaucauggggauccccuacugcaacuacagccgguacugguaccugaaccacaccuccaccggcaagaccagccugccccgcugcuggcugaucuccaacggcagcuaccugaacgagacgaaguucuccgacgacaucgagcagcaggccgacaacaugaucaccgagaugcuccagaaggaguacaucgaccggcaggggaagacgccccugggccuggucgaccuguucguguucagcaccuccuucuaccucaucagcaucuuccugcaccuggugaagaucccgacccaccgccacaucgucgggaagcccugccccaagccccaccggcucaaccacaugggcaucugcuccugcgggcuguacaagcagccgggcgugcccgugcgcuggaagcggugaggacuaguaauaaggaaacuguaugaaugucugugggcaggaagugaagagauccuucuguaaagguuuuuggaauuaugucugcugaauaauaaacuuuuuugaaauaauaaaucugguagaaaaaugagaucucaaaggcucuuuucagagccaccaaaaaaaaaaaaaaaaaaaaaaaaaaaaaaaaaaaaaaaaaaaaaaaaaaaaaaaaaaaaaaaaagaauu

SEQ ID NO: 14636 - RNA, 1781 nt, Artificial Sequence
  mRNA product Design b-4 (hSL-A64-N5) comprising derived and/or modified sequence from LASV(AV;Clade V)__CCA30314__GPC (opt1)
aggagagucccgcagucggcguccagcggcucugcuuguucgugugugugucguugcaggccuuauucaagcuuaccaugggccagaucgugaccuucuuccaggaggucccccacgugaucgaggaggugaugaacaucguccugaucgcccucagcauccuggccgugcugaaggggcucuacaacaucgcgaccugcggccugaucgggcugaucacguuccuccugcugugcggccgcuccugcagcuccaaccucuacaaggggguguacgagcugcagagccuggaccucaacauggagacccugaacaugaccaugccgcuguccugcaccaagaacaacagccaccacuacauccgggucggcaacgacacgggccucgagcugacccugaccaacaccuccauccucaaccacaaguucugcaaccugagcgacgcccacaagaaggaccuguacgaccacgcccucauguccaucaucagcacguuccaccuguccauccccaacuucaaccaguacgaggccaugagcugcgacuucaacgggggcaagaucuccgugcaguacaaccugagccacuccuacgccaucgacgcggccaaccacugcgggaccguggccaacggcauccuccagaccuucaugcgcauggccuggggcgggagcuacaucgcgcuggacuccggccgggggaacugggacugcaucaugaccagcuaccaguaccugaucauccagaacacgaccugggagaaccacugccaguucucccgccccagccccaucggcuaccucgggcugcugagccagcggacccgcgacaucuacaucucccggcgccuccugggcaccuucacguggacccugagcgacuccgagggcaacgccacccccgggggcuacugccucacccgguggaugcugaucgaggccgagcugaagugcuucgggaacacggccgucgccaagugcaacgagaagcacgacgaggaguucugcgacaugcuccgccuguucgacuucaacaagcaggcgaucagccggcugaaguccgaggcccagaugagcauccagcucaucaacaaggccgugaacgcccugaucaacgaccagcugaucaugaagaaccaccuccgcgacaucaugggcauccccuacugcaacuacuccaaguacugguaccugaaccacaccaucaccgggaagaccagccugcccaagugcuggcucguguccaacggcagcuaccugaacgagacgcacuucuccgacgacaucgagcagcaggccgacaacaugaucaccgagaugcugcagaaggaguacauggagcggcagggcaagaccccgcucgggcuggucgaccuguucguguucagcaccuccuucuaccugaucagcaucuuccuccgccuggugaagaucccgacgcaccggcacaucgucggcaagcccugccccaagccccaccgccugaaccacauggggaucugcuccugcggccucuacaagcagccgggggugcccgugcgguggaagcgcugaggacuaguaauaaggaaacuguaugaaugucugugggcaggaagugaagagauccuucuguaaagguuuuuggaauuaugucugcugaauaauaaacuuuuuugaaauaauaaaucugguagaaaaaugagaucucaaaggcucuuuucagagccaccaaaaaaaaaaaaaaaaaaaaaaaaaaaaaaaaaaaaaaaaaaaaaaaaaaaaaaaaaaaaaaaaagaauu

SEQ ID NO: 14637 - RNA, 1778 nt, Artificial Sequence
  mRNA product Design b-4 (hSL-A64-N5) comprising derived and/or modified sequence from LASV(Togo/2016/7082;Clade VI)__AMR44577__GPC (opt1)
aggagagucccgcagucggcguccagcggcucugcuuguucgugugugugucguugcaggccuuauucaagcuuaccaugggccagaucaucaccuucuuccaggaggugccccacgucaucgaggaggugaugaacaucgugcugaucgcccucagccugcuggccauccucaagggggucuacaacguggcgaccugcggcaucaucgggcuggugacguuccuguuccucugcggccgcuccugcagccugaucuacaagggguccuacgagcugcagacccucgagcugaacauggagacccugaacaugaccaugccgcucagcugcacgaagaacuccagccaccacuacauccgggucggcaacgagaccggccuggagcugacccucaccaacacguccaucaucaaccacaaguucugcaaccugagcgacgcccacaagcgcaaccuguacgaccacgcccucauguccauccugagcaccuuccaccuguccauccccaacuucaaccaguacgaggccaugagcugcgacuucaacgggggcaagaucuccgugcaguacaaccucagccacgccuacgcgguggacgccgccgagcacugcgggaccgucgccaacggcgugcugcagaccuucaugcggauggcguggggcggguccuacaucgcccuggacagcggccgcgggaacugggacugcaucaugacguccuaccaguaccucaucauccagaacaccaccugggaggaccacugccaguucagccggcccucccccaucggcuaccuggggcugcucagccagcgcacccgggacaucuacaucagccgccggcugcugggcacguucaccuggacccucuccgacagcgagggcaacgagacccccgggggcuacugccugacgcgcuggaugcugaucgaggccgagcucaagugcuucgggaacaccgccguggccaagugcaacgagaagcacgacgaggaguucugcgacaugcugcggcuguucgacuucaacaagcaggcgauccagcgccucaaguccgaggcccagaugagcauccagcugaucaacaaggccgucaacgcccugaucaacgaccagcucaucaugaagaaccaccuccgggacaugaugggcauccccuacugcaacuacuccaaguacugguaccugaaccacaccagcuccgggcgcaccagccugcccaagugcuggcugguguccaacggcagcuaccugaacgagacgcacuucuccgacgacaucgagcagcaggccgacaacaugaucaccgagaugcuccagaaggaguacaucgaccggcagggcaagaccccgcuggggcugguggaccucuucgucuucagcaccuccuucuaccugaucagcaucuuccugcaccugaucaagaucccgacgcaccgccacaucgugggcaagcccugccccaagccccaccggcucaaccacauggggaucugcuccugcggccuguacaagcagccgggggugcccacccgcuggaagcggugaggacuaguaauaaggaaacuguaugaaugucugugggcaggaagugaagagauccuucuguaaagguuuuuggaauuaugucugcugaauaauaaacuuuuuugaaauaauaaaucugguagaaaaaugagaucucaaaggcucuuuucagagccaccaaaaaaaaaaaaaaaaaaaaaaaaaaaaaaaaaaaaaaaaaaaaaaaaaaaaaaaaaaaaaaaaagaauu

SEQ ID NO: 14638 - RNA, 1778 nt, Artificial Sequence
  mRNA product Design b-4 (hSL-A64-N5) comprising derived and/or modified sequence from LASV(KAK-428;Clade n.d. (VII))__ANH09740__GPC (opt1)
aggagagucccgcagucggcguccagcggcucugcuuguucgugugugugucguugcaggccuuauucaagcuuaccaugggccagaucgugaccuucuuccaggaggucccccacgugaucgaggaggugaugaacaucguccugaucgcccucagccugcuggccauccucaaggggcuguacaacuucgcgaccugcggcgugaucgggcugaucacguuccuccugcugugcggccgcuccugcagcgccaccuacaaggggcaguacgagcuccagacccuggagcugaacauggagucccucaacaugaccaugccgcugagcugcacgaagaacaacucccaccacuacauccgggccggcaacaacaccggccuggagcucacccugaccaacacgagcaucaucucccacaaguucugcaaccugagcgacgcccacaagaagaaccucuacgaccacacccugauguccaucaucaccaccuuccaccugagcauccccaacuucaaccaguacgaggccauguccugcgacuucaacgggggcaagaucagcauccaguacaaccucucccacagcuacgcgggggacgccgcccagcacugcggcacgguggccaacgggguccugcagaccuucaugcgcauggcguggggcggcuccuaccuggcccucgacagcgggcggcgcggcugggacugcaucaucuccagcuaccaguaccugaucauccagaacaccaccugggacgaccacugccaguucucccggcccagccccaucggguaccugggcuucgugagccagaagacgcgcgacaucuacaucucccggcgccuccugggcaccuucaccuggacccugagcgacuccgaggggcacgacaugccgggcggguacugccucacgcgguggaugcugaucgaggccgaccugaagugcuucggcaacaccgccguggccaagugcaacgagaagcacgacgaggaguucugcgacauguggcgccucuucgacuucaacaagcaggcgauccagcggcugaaggccgaggcccagaugaacauccagcugaucaacaaggccgucaacgcccucaucaacgaccagcugaugaugaagaaccaccuccgcgacaucauggggauccccuacugcaacuacagcaaguucugguaccugaacaacaccaccacgggccggaccucccugccccgcugcuggcugaucagcaacggcuccuaccucaacgagacccacuucagcgacgacaucgagcagcaggcggacaacaugaucaccgagaugcugcagaaggaguacauggaccggcaggggaagacgccccugggccucguggaccuguucguguucuccaccagcuucuaccugaucaccaucuuccuccaccuggucaagaucccgacccaccgccacaucguggggaagcccugccccaagccccaccggcugaaccacaugggcaucugcuccugcgggcuguacaagcagccgggcgugcccguccgcuggaagcggugaggacuaguaauaaggaaacuguaugaaugucugugggcaggaagugaagagauccuucuguaaagguuuuuggaauuaugucugcugaauaauaaacuuuuuugaaauaauaaaucugguagaaaaaugagaucucaaaggcucuuuucagagccaccaaaaaaaaaaaaaaaaaaaaaaaaaaaaaaaaaaaaaaaaaaaaaaaaaaaaaaaaaaaaaaaaagaauu

SEQ ID NO: 14639 - RNA, 1778 nt, Artificial Sequence; identical to SEQ ID NO: 14633
  mRNA product Design b-4 (hSL-A64-N5) comprising derived and/or modified sequence from LASV(Pinneo-NIG-1969;Clade I)__AIT17836__GPC (opt1)

SEQ ID NO: 14640 - RNA, 1778 nt, Artificial Sequence
  mRNA product Design b-4 (hSL-A64-N5) comprising derived and/or modified sequence from LASV(ISTH0009-NIG-2011;Clade II)__AIT17404__GPC (opt1)
aggagagucccgcagucggcguccagcggcucugcuuguucgugugugugucguugcaggccuuauucaagcuuaccaugggccagaucaucaccuucuuccaggaggugccccacgucaucgaggaggugaugaacaucgugcugaucgcccucagccugcuggccauccucaaggggaucuacaacgucgcgaccugcggccuguucgggcugguguccuuccuccugcugugcggccgcagcugcuccacgaccuacaaggggguguacgagcuccagacccuggagcuggacauggccagccucaacaugaccaugccgcuguccugcacgaagaacaacagccaccacuacaucauggucggcaacgagaccggccuggagcucacccugaccaacacguccaucaucaaccacaaguucugcaaccugagcgacgcccacaagaagaaccucuacgaccacgcccugauguccaucaucagcaccuuccaccuguccauccccaacuucaaccaguacgaggccaugagcugcgacuucaacgggggcaagaucuccgugcaguacaaccucagccacgcguacgccguggacgccgccaaccacugcgggaccaucgcgaacggcguccugcagaccuucaugcggauggccuggggcggguccuacaucgcccuggacagcggcaagggguccugggacugcaucaugacgagcuaccaguaccucaucauccagaacaccaccugggaggaccacugccaguucucccgccccagccccaucggcuaccuggggcugcucagccagcggacccgcgacaucuacaucucccggcgccugcugggcacguucaccuggacccucagcgacuccgagggcaacgagacccccgggggcuacugccugacgcgguggaugcugaucgaggccgagcucaagugcuucgggaacaccgccguggcgaagugcaacgagaagcacgacgaggaguucugcgacaugcugcgccuguucgacuucaacaagcaggccauccggcgccucaagaccgaggcccagaugagcauccagcugaucaacaaggccgugaacgcccugaucaacgaccagcucaucaugaagaaccaccuccgggacaucaugggcaucccguacugcaacuacuccaaguacugguaccugaaccacaccgucacggggaagaccagccugccccgcugcuggcugguguccaacggcagcuaccugaacgagacccacuucuccgacgacaucgagcagcaggcggacaacaugaucaccgagcuccugcagaaggaguacauggaccggcagggcaagacgccccuggggcucguggaccuguucgucuucagcaccuccuucuaccugaucagcaucuuccugcaccucaucaagaucccgacccaccgccacaucaccggcaagcccugccccaagccccaccggcugaaccacauggggaucugcuccugcggccuguacaagcacccgggggugcccgugaaguggaagcgcugaggacuaguaauaaggaaacuguaugaaugucugugggcaggaagugaagagauccuucuguaaagguuuuuggaauuaugucugcugaauaauaaacuuuuuugaaauaauaaaucugguagaaaaaugagaucucaaaggcucuuuucagagccaccaaaaaaaaaaaaaaaaaaaaaaaaaaaaaaaaaaaaaaaaaaaaaaaaaaaaaaaaaaaaaaaaagaauu

SEQ ID NO: 14641 - RNA, 1778 nt, Artificial Sequence
  mRNA product Design b-4 (hSL-A64-N5) comprising derived and/or modified sequence from LASV(ISTH2010-NIG-2012;Clade II)__AIT17482__GPC (opt1)
aggagagucccgcagucggcguccagcggcucugcuuguucgugugugugucguugcaggccuuauucaagcuuaccaugggccagaucaucaccuucuuccaggaggugccccacgucaucgaggaggugaugaacaucgugcugaucgcccucagccugcuggccauccucaaggggaucuacaacgucgcgaccugcggccuguucgggcugguguccuuccuccugcugugcggccgcagcugcuccacgaccuacaaggggguguacgagcuccagacccuggagcuggacauggccagccucaacaugaccaugccgcuguccugcacgaagaacaacagccaccacuacaucauggucggcaacgagaccggccuggagcucacccugaccaacacguccaucaucaaccacaaguucugcaaccugagcgacgcccacaagaagaaccucuacgaccacgcccugauguccaucaucagcaccuuccaccuguccauccccaacuucaaccaguacgaggccaugagcugcgacuucaacgggggcaagaucuccgugcaguacaaccucagccacgcguacgccguggacgccgccaaccacugcgggaccaucgcgaacggcguccugcagaccuucaugcggauggccuggggcggguccuacaucgcccuggacagcggcaagggguccugggacugcaucaugacgagcuaccaguaccucaucauccagaacaucaccugggaggaccacugccaguucucccgccccagccccaucggcuaccuggggcugcucagccagcggacccgcgacaucuacaucucccggcgccugcugggcaccuucacguggacccucagcgacuccgagggcaacgagacccccgggggcuacugccugacccgguggaugcugaucgaggccgagcucaagugcuucgggaacacggccguggcgaagugcaacgagaagcacgacgaggaguucugcgacaugcugcgccuguucgacuucaacaagcaggccauccggcgccucaagaccgaggcccagaugagcauccagcugaucaacaaggccgugaacgcccugaucaacgaccagcucaucaugaagaaccaccuccgggacaucaugggcauccccuacugcaacuacuccaaguacugguaccugaaccacaccgucaccgggaagacgagccugccccgcugcuggcugguguccaacggcagcuaccugaacgagacccacuucuccgacgacaucgagcagcaggcggacaacaugaucaccgagcuccugcagaaggaguacaucgaccggcagggcaagaccccgcuggggcucguggaccuguucgucuucagcacguccuucuaccugaucagcaucuuccugcaccucgugaagaucccgacccaccgccacguggucggcaagcccugccccaagccccaccggcugaaccacauggggaucugcuccugcggccuguacaagcacccgggggugcccgugaaguggaagcgcugaggacuaguaauaaggaaacuguaugaaugucugugggcaggaagugaagagauccuucuguaaagguuuuuggaauuaugucugcugaauaauaaacuuuuuugaaauaauaaaucugguagaaaaaugagaucucaaaggcucuuuucagagccaccaaaaaaaaaaaaaaaaaaaaaaaaaaaaaaaaaaaaaaaaaaaaaaaaaaaaaaaaaaaaaaaaagaauu

SEQ ID NO: 14642 - RNA, 1778 nt, Artificial Sequence
  mRNA product Design b-4 (hSL-A64-N5) comprising derived and/or modified sequence from LASV(Lassa virus/H.sapiens-wt/NGA/2015/ISTH_0543;Clade II)__AVO03639__GPC (opt1)
aggagagucccgcagucggcguccagcggcucugcuuguucgugugugugucguugcaggccuuauucaagcuuaccaugggccagaucaucaccuucuuccaggaggugccccacgucaucgaggaggugaugaacaucgugcugaucgcccucagccugcuggccauccucaaggggaucuacaacgucgcgaccugcggccuguucgggcugguguccuuccuccugcugugcggccgcagcugcuccacgaccuacaaggggguguacgagcuccagacccuggagcuggacauggccaaccucaacaugaccaugccgcugagcugcacgaagaacaacucccaccacuacaucauggucggcaacgagaccggccuggagcucacccugaccaacacgagcaucaucaaccacaaguucugcaaccuguccgacgcccacaagaagaaccucuacgaccacgcccugaugagcaucaucuccaccuuccaccugagcauccccaacuucaaccaguacgaggccauguccugcgacuucaacgggggcaagaucagcgugcaguacaaccucucccacaccuacgcgguggacgccgccaaccacugcgggaccaucgccaacggcguccugcagacguucaugcggauggcguggggcgggagcuacaucgcccuggacuccggcaaggggagcugggacugcaucaugaccuccuaccaguaccucgugauccagaacaccaccugggaggaccacugccaguucagccgccccucccccaucggcuaccuggggcugcucagccagcggacgcgcgacaucuacaucagccggcgccugcugggcaccuucaccuggacccucuccgacagcgagggcaacgagacgcccgggggcuacugccugacccgguggaugcugaucgaggccgagcucaagugcuucgggaacaccgccguggccaagugcaacgagaagcacgacgaggaguucugcgacaugcugcgccuguucgacuucaacaagcaggcgauccggcgccucaagaccgaggcccagauguccauccagcugaucaacaaggccgucaacgcccugaucaacgaccagcucaucaugaagaaccaccuccgggacaucaugggcauccccuacugcaacuacagcaaguacugguaccugaaccacacggugaccgggaagaccucccugccccgcugcuggcuggugagcaacggcuccuaccugaacgagacccacuucagcgacgacaucgagcagcaggccgacaacaugaucacggagcuccugcagaaggaguacaucgaccggcagggcaagaccccgcuggggcucgucgaccuguucguguucuccaccagcuucuaccugaucuccaucuuccugcaccucgugaagaucccgacccaccgccacaucacgggcaagcccugccccaagccccaccggcugaaccacauggggaucugcagcugcggccuguacaagcacccggggguccccgugaaguggaagcgcugaggacuaguaauaaggaaacuguaugaaugucugugggcaggaagugaagagauccuucuguaaagguuuuuggaauuaugucugcugaauaauaaacuuuuuugaaauaauaaaucugguagaaaaaugagaucucaaaggcucuuuucagagccaccaaaaaaaaaaaaaaaaaaaaaaaaaaaaaaaaaaaaaaaaaaaaaaaaaaaaaaaaaaaaaaaaagaauu

SEQ ID NO: 14643 - RNA, 1778 nt, Artificial Sequence
  mRNA product Design b-4 (hSL-A64-N5) comprising derived and/or modified sequence from LASV(Lassa virus/H.sapiens-wt/NGA/2016/ISTH_0009;Clade II)__AVO03571__GPC (opt1)
aggagagucccgcagucggcguccagcggcucugcuuguucgugugugugucguugcaggccuuauucaagcuuaccaugggccagaucaucaccuucuuccaggaggugccccacgucaucgaggaggugaugaacaucgugcugaucgcccucagccugcuggccauccucaaggggaucuacaacgucgcgaccugcggccugcuggggcucguguccuuccugcugcucugcggccgcagcugcuccacgaccuacaaggggguguacgagcugcagacccuggagcucgacauggccagccugaacaugaccaugccgcuguccugcacgaagaacaacagccaccacuacaucauggucggcaacgagaccggccucgagcugacccugaccaacacguccaucaucaaccacaaguucugcaaccucagcgacgcccacaagaagaaccuguacgaccacgcccugauguccaucaucagcaccuuccaccucuccauccccaacuucaaccaguacgaggccaugagcugcgacuucaacgggggccggaucuccgugcaguacaaccugagccacuccuacgcgguggacgccgccaaccacugcgggaccaucgccaacggcguccugcagaccuucaugcgcauggcguggggcgggagcuacaucgcccucgacuccggcaaggggagcugggacugcaucaugacguccuaccaguaccugaucauccagaacaccaccugggaggaccacugccaguucagccggcccagccccaucggcuaccuggggcuccugucccagcgcacccgggacaucuacaucagccgccggcugcucggcacguucaccuggacccuguccgacagcgagggcaacgagacccccgggggcuacugccugacgcgcuggaugcucaucgaggccgagcugaagugcuucgggaacaccgccguggccaagugcaacgagaagcacgacgaggaguucugcgacaugcugcggcuguucgacuucaacaagcaggcgauccgccggcugaagaccgaggcccagauguccauccagcugaucaacaaggccgugaacgcccucaucaacgaccagcugaucaugaagaaccaccuccgcgacaucaugggcaucccguacugcaacuacagcaaguacugguaccucaaccacaccgucacggggaagaccucccugccccggugcuggcuggugagcaacggcuccuaccucaacgagacccacuucagcgacgacaucgagcagcaggccgacaacaugaucaccgagcugcugcagaaggaguacaucgaccgccagggcaagacgccccucgggcugguggaccuguucgucuucuccaccagcuucuaccugaucuccaucuuccuccaccuggugaagaucccgacccaccggcacaucaccggcaagcccugccccaagccccaccgccugaaccacauggggaucugcagcugcggccucuacaaccacccgggggugcccgucaaguggaagcggugaggacuaguaauaaggaaacuguaugaaugucugugggcaggaagugaagagauccuucuguaaagguuuuuggaauuaugucugcugaauaauaaacuuuuuugaaauaauaaaucugguagaaaaaugagaucucaaaggcucuuuucagagccaccaaaaaaaaaaaaaaaaaaaaaaaaaaaaaaaaaaaaaaaaaaaaaaaaaaaaaaaaaaaaaaaaagaauu

SEQ ID NO: 14644 - RNA, 1778 nt, Artificial Sequence
  mRNA product Design b-4 (hSL-A64-N5) comprising derived and/or modified sequence from LASV(Lassa virus/H.sapiens-wt/NGA/2016/ISTH_0017;Clade II)__AVO03567__GPC (opt1)
aggagagucccgcagucggcguccagcggcucugcuuguucgugugugugucguugcaggccuuauucaagcuuaccaugggccagaucaucaccuucuuccaggaggugccccacgucaucgaggaggugaugaacaucgugcugaucgcccucagccugcuggccauccucaaggggaucuacaacgucgcgaccugcggccuguucgggcugguguccuuccuccugcugugcggccgcagcugcuccacgaccuacaaggggguguacgagcuccagacccuggagcuggacauggccagccucaacaugaccaugccgcuguccugcacgaagaacaacagccaccacuacaucauggucggcaacgagaccggccuggagcucacccugaccaacacguccaucaucaaccacaaguucugcaaccugagcgacgcccacaagaagaaccucuacgaccacgcccugauguccaucaucagcaccuuccaccuguccauccccaacuucaaccaguacgaggccaugagcugcgacuucaacgggggcaagaucuccgugcaguacaaccucagccacaccuacgcgaucgacgccgccaaccacugcgggaccaucgccaacggcgugcugcagacguucaugcggauggcguggggcggguccuacaucgcccuggacagcggcaagggguccugggacugcaucaugaccagcuaccaguaccucaucauccagaacaccaccugggaggaccacugccaguucucccgccccagccccaucggcuaccuggggcugcucagccagcggacgcgcgacaucuacaucucccggcgccugcugggcaccuucaccuggacccucagcgacuccgagggcaacgagacgcccgggggcuacugccugacccgguggaugcugaucgaggccgagcucaagugcuucgggaacaccgccgucgccaagugcaacgagaagcacgacgaggaguucugcgacaugcugcgccuguucgacuucaacaagcaggcgauccggcgccucaagaccgaggcccagaugagcauccagcugaucaacaaggccgugaacgcccugaucaacgaccagcucaucaugaagaaccaccuccgggacaucaugggcauccccuacugcaacuacuccaaguacugguaccugaaccacacggugaccgggaagaccagccugccccgcugcuggcuggucuccaacggcagcuaccugaacgagacccacuucuccgacgacaucgagcagcaggccgacaacaugaucacggagcuccugcagaaggaguacauggaccggcagggcaagaccccgcuggggcucguggaccuguucguguucagcaccuccuucuaccugaucagcaucuuccugcaccucguccgcaucccgacccaccggcacgugaucggcaagcccugccccaagccccaccgccugaaccacauggggaucugcuccugcggccuguacaagcacccgggggugcccgucaaguggaagcggugaggacuaguaauaaggaaacuguaugaaugucugugggcaggaagugaagagauccuucuguaaagguuuuuggaauuaugucugcugaauaauaaacuuuuuugaaauaauaaaucugguagaaaaaugagaucucaaaggcucuuuucagagccaccaaaaaaaaaaaaaaaaaaaaaaaaaaaaaaaaaaaaaaaaaaaaaaaaaaaaaaaaaaaaaaaaagaauu

SEQ ID NO: 14645 - RNA, 1778 nt, Artificial Sequence
  mRNA product Design b-4 (hSL-A64-N5) comprising derived and/or modified sequence from LASV(Lassa virus/H.sapiens-wt/NGA/2018/ISTH_0959;Clade II)__AVV65099__GPC (opt1)
aggagagucccgcagucggcguccagcggcucugcuuguucgugugugugucguugcaggccuuauucaagcuuaccaugggccagaucaucaccuucuuccaggaggugccccacgucaucgaggaggugaugaacaucgugcugaucgcccucagccugcuggccauccucaaggggaucuacaacgucgugaccugcggccuguucgggcugguguccuuccuccugcugugcggccgcagcugcuccacgaccuacaagggggucuacgagcuccagacccuggagcuggacauggcgagccucaacaugaccaugccgcuguccugcacgaagaacaacagccaccacuacaucauggugggcaacgagaccggccuggagcucacccugaccaacacguccaucaucaaccacaaguucugcaaccugagcgacgcccacaagaagaaccucuacgaccacgcccugauguccaucaucagcaccuuccaccuguccauccccaacuucaaccaguacgaggccaugagcugcgacuucaacgggggcaagaucuccgugcaguacaaccucagccacgccuacgcgaucgacgccgccaaccacugcgggaccaucgccaacggcguccugcagaccuucaugcggauggcguggggcggguccuacaucgcccuggacagcggcaagggguccugggacugcaucaugacgagcuaccaguaccucaucauccagaacaccaccugggaggaccacugccaguucucccgccccagccccaucggcuaccuggggcugcucagccagcggacccgcgacaucuacaucucccggcgccugcugggcacguucaccuggacccucagcgacuccgagggcaacgagacccccgggggcuacugccugacgcgguggaugcugaucgaggccgagcucaagugcuucgggaacaccgccguggccaagugcaacgagaagcacgacgaggaguucugcgacaugcugcgccuguucgacuucaacaagcaggcgauccggcgccucaagaccgaggcccagaugagcauccagcugaucaacaaggccgugaacgcccugaucaacgaccagcucaucaugaagaaccaccuccgggacaucaugggcaucccguacugcaacuacuccaaguacugguaccugaaccacaccgucacggggaagaccagccugccccgcugcuggcugguguccaacggcagcuaccugaacgagacccacuucuccgacgacaucgagcagcaggccgacaacaugaucaccgagcuccugcagaaggaguacaucgaccggcagggcaagacgccccuggggcucguggaccuguucgucuucagcaccuccuucuaccugaucagcaucuuccugcaccucgugaagaucccgacccaccgccacgugaucggcaagcccugccccaagccccaccggcugaaccacauggggaucugcuccugcggccuguacaagcacccggggguccccgugaaguggaagcgcugaggacuaguaauaaggaaacuguaugaaugucugugggcaggaagugaagagauccuucuguaaagguuuuuggaauuaugucugcugaauaauaaacuuuuuugaaauaauaaaucugguagaaaaaugagaucucaaaggcucuuuucagagccaccaaaaaaaaaaaaaaaaaaaaaaaaaaaaaaaaaaaaaaaaaaaaaaaaaaaaaaaaaaaaaaaaagaauu

SEQ ID NO: 14646 - RNA, 1778 nt, Artificial Sequence
  mRNA product Design b-4 (hSL-A64-N5) comprising derived and/or modified sequence from LASV(LASV003-NIG-2008;Clade II)__AIT17580__GPC (opt1)
aggagagucccgcagucggcguccagcggcucugcuuguucgugugugugucguugcaggccuuauucaagcuuaccaugggccagaucaucaccuucuuccaggaggugccccacgucaucgaggaggugaugaacaucgugcugaucgcccucagccugcuggccauccucaaggggaucuacaacgucgcgaccugcggccuguucgggcugguguccuuccuccugcugugcggccgcagcugcuccacgaccuacaaggggguguacgagcuccagacccuggagcuggacauggccagccucaacaugaccaugccgcuguccugcacgaagaacaacagccaccacuacaucauggucggcaacgagaccggccuggagcucacccugaccaacacguccaucaucaaccacaaguucugcaaccugagcgacgcccacaagaagaaccucuacgaccacgcccugauguccaucaucagcaccuuccaccuguccauccccaacuucaaccaguacgaggccaugagcugcgacuucaacgggggcaagaucuccgugcaguacaaccucagccacaccuacgcgguggacgccgccaaccacugcgggaccaucgccaacggcguccugcagacguucaugcggauggcguggggcggguccuacaucgcccuggacagcggcaagggguccugggacugcaucaugaccagcuaccaguaccucaucauccagaacaccaccugggaggaccacugccaguucucccgccccagccccaucggcuaccuggggcugcucagccagcggacgcgcgacaucuacaucucccggcgccugcugggcaccuucaccuggacccucagcgacuccgagagcaacgagacgccgggcggguacugccugacccgguggaugcugaucgaggccgagcucaagugcuucggcaacaccgccguggccaagugcaacgagaagcacgacgaggaguucugcgacaugcugcgccuguucgacuucaacaagcaggcgauccggcgccucaaggccgaggcccagauguccauccagcugaucaacaaggccgugaacgcccugaucaacgaccagcucaucaugaagaaccaccuccgggacaucauggggauccccuacugcaacuacagcaaguacugguaccugaaccacaccgucacgggccgcaccucccugccccggugcuggcuggugagcaacggguccuaccugaacgagacccacuucagcgacgacaucgagcagcaggcggacaacaugaucaccgagcuccugcagaaggaguacauggaccgccagggcaagacgccccugggccucguggaccuguucgucuucuccaccagcuucuaccugaucuccaucuuccugcaccucgugaagaucccgacccaccggcacgugaucgggaagcccugccccaagccccaccgccugaaccacaugggcaucugcagcugcgggcuguacaagcacccgggcguccccgugaaguggaagcggugaggacuaguaauaaggaaacuguaugaaugucugugggcaggaagugaagagauccuucuguaaagguuuuuggaauuaugucugcugaauaauaaacuuuuuugaaauaauaaaucugguagaaaaaugagaucucaaaggcucuuuucagagccaccaaaaaaaaaaaaaaaaaaaaaaaaaaaaaaaaaaaaaaaaaaaaaaaaaaaaaaaaaaaaaaaaagaauu

SEQ ID NO: 14647 - RNA, 1778 nt, Artificial Sequence
  mRNA product Design b-4 (hSL-A64-N5) comprising derived and/or modified sequence from LASV(LASV035-NIG-2009;Clade II)__AIT17588__GPC (opt1)
aggagagucccgcagucggcguccagcggcucugcuuguucgugugugugucguugcaggccuuauucaagcuuaccaugggccagaucaucaccuucuuccaggaggugccccacgucaucgaggaggugaugaacaucgugcugaucgcccucagccugcuggccauccucaaggggaucuacaacgucgcgaccugcggccuguucgggcugguguccuuccuccugcugugcggccgcagcugcuccacgaccuacaaggggguguacgagcuccagacccuggagcuggacauggccagccucaacaugaccaugccgcuguccugcacgaagaacaacagccaccacuacaucauggucggcaacgagaccggccuggagcucacccugaccaacacguccaucaucaaccacaaguucugcaaccugagcgacgcccacaagaagaaccucuacgaccacgcccugauguccaucaucagcaccuuccaccuguccauccccaacuucaaccaguacgaggccaugagcugcgacuucaacgggggcaagaucuccgugcaguacaaccucagccacgcguacgccguggacgccgccaaccacugcgggaccaucgcgaacggcguccugcagaccuucaugcggauggccuggggcggguccuacaucgcccuggacagcggcaagggguccugggacugcaucaugacgagcuaccaguaccucaucauccagaacaccaccugggaggaccacugccaguucucccgccccagccccaucggcuaccuggggcugcucagccagcggacccgcgacaucuacaucucccggcgccugcugggcacguucaccuggacccucagcgacuccgagggcaacgagacccccgggggcuacugccugacgcgguggaugcugaucgaggccgagcucaagugcuucgggaacaccgccguggcgaagugcaacgagaagcacgacgaggaguucugcgacaugcugcgccuguucgacuucaacaagcaggccauccggcgccucaaggccgaggcccagaugagcauccagcugaucaacaaggccgugaacgcgcugaucaacgaccagcucaucaugaagaaccaccuccgggacaucaugggcauccccuacugcaacuacuccaaguacugguaccugaaccacaccgucaccgggaagacgagccugccccgcugcuggcugguguccaacggcagcuaccugaacgagacccacuucuccgacgacaucgagcagcaggccgacaacaugaucaccgagcuccugcagaaggaguacaucgaccggcagggcaagaccccgcuggggcucguggaccuguucgucuucagcacguccuucuaccugaucagcaucuuccugcaccucgugaagaucccgacccaccgccacgugaucggcaagcccugccccaagccccaccggcugaaccacauggggaucugcuccugcggccuguacaagcacccggggguccccgugaaguggaagcgcugaggacuaguaauaaggaaacuguaugaaugucugugggcaggaagugaagagauccuucuguaaagguuuuuggaauuaugucugcugaauaauaaacuuuuuugaaauaauaaaucugguagaaaaaugagaucucaaaggcucuuuucagagccaccaaaaaaaaaaaaaaaaaaaaaaaaaaaaaaaaaaaaaaaaaaaaaaaaaaaaaaaaaaaaaaaaagaauu

SEQ ID NO: 14648 - RNA, 1778 nt, Artificial Sequence
  mRNA product Design b-4 (hSL-A64-N5) comprising derived and/or modified sequence from LASV(LASV1000-NIG-2009;Clade II)__AIT17782__GPC (opt1)
aggagagucccgcagucggcguccagcggcucugcuuguucgugugugugucguugcaggccuuauucaagcuuaccaugggccagaucaucaccuucuuccaggaggugccccacgucaucgaggaggugaugaacaucgugcugaucgcccucagccugcuggccauccucaaggggaucuacaacgucgcgaccugcggccuguucgggcugguguccuuccuccugcugugcggccgcagcugcuccacgaccuacaaggggguguacgagcuccagacccuggagcuggacauggccagccucaacaugaccaugccgcuguccugcacgaagaacaacagccaccacuacaucauggucggcaacgagaccggccuggagcucacccugaccaacacguccaucaucaaccacaaguucugcaaccugagcgacgcccacaagaagaaccucuacgaccacgcccugauguccaucaucagcaccuuccaccuguccauccccaacuucaaccaguacgaggccaugagcugcgacuucaacgggggcaagaucuccgugcaguacaaccucagccacaccuacgcgguggacgccgccaaccacugcgggaccaucgccaacggcguccugcagacguucaugcggauggcguggggcggguccuacaucgcccuggacagcggcaagggguccugggacugcaucaugaccagcuaccaguaccucaucauccagaacaccaccugggaggaccacugccaguucucccgccccagccccaucggcuaccuggggcugcucagccagcggacgcgcgacaucuacaucucccggcgccugcugggcaccuucaccuggacccucagcgacuccgagggcaacgagacgcccgggggcuacugccugacccgguggaugcugaucgaggccgagcucaagugcuucgggaacaccgccguggccaagugcaacgagaagcacgacgaggaguucugcgacaugcugcgccuguucgacuucaacaagcaggcgaucaagcggcucaagaccgaggcccagaugagcauccagcugaucaacaaggccgugaacgcccugaucaacgaccagcucaucaugaagaaccaccuccgcgacaucaugggcauccccuacugcaacuacuccaaguacugguaccugaaccacacggucaccgggaagaccagccugccccggugcuggcugguguccaacggcagcuaccugaacgagacccacuucuccgacgacaucgagcagcaggccgacaacaugaucacggagcuccugcagaaggaguacaucgaccgccagggcaagaccccgcuggggcucguggaccuguucgucuucagcaccuccuucuaccugaucagcaucuuccugcaccucgugaagaucccgacccaccggcacguggucggcaagcccugccccaagccccaccgccugaaccacauggggaucugcuccugcggccuguacaagcacccgggggugcccgugaaguggaagcggugaggacuaguaauaaggaaacuguaugaaugucugugggcaggaagugaagagauccuucuguaaagguuuuuggaauuaugucugcugaauaauaaacuuuuuugaaauaauaaaucugguagaaaaaugagaucucaaaggcucuuuucagagccaccaaaaaaaaaaaaaaaaaaaaaaaaaaaaaaaaaaaaaaaaaaaaaaaaaaaaaaaaaaaaaaaaagaauu

SEQ ID NO: 14649 - RNA, 1778 nt, Artificial Sequence
  mRNA product Design b-4 (hSL-A64-N5) comprising derived and/or modified sequence from LASV(LASV221-NIG-2010;Clade II)__AIT17624__GPC (opt1)
aggagagucccgcagucggcguccagcggcucugcuuguucgugugugugucguugcaggccuuauucaagcuuaccaugggccagaucaucaccuucuuccaggaggugccccacgucaucgaggaggugaugaacaucgugcugaucgcccucagccugcuggccauccucaaggggaucuacaacgucgcgaccugcggccuguucgggcugguguccuuccuccugcugugcggccgcagcugcuccacgaccuacaaggggguguacgagcuccagacccuggagcuggacauggccagccucaacaugaccaugccgcuguccugcacgaagaacaacagccaccacuacaucauggucggcaacgagaccggccuggagcucacccugaccaacacguccaucaucaaccacaaguucugcaaccugagcgacgcccacaagaagaaccucuacgaccacgcccugauguccaucaucagcaccuuccaccuguccauccccaacuucaaccaguacgaggccaugagcugcgacuucaacgggggcaagaucuccgugcaguacaaccucagccacaccuacgcgaucgacgccgccaaccacugcgggaccaucgccaacggcgugcugcagacguucaugcggauggcguggggcggguccuacaucgcccuggacagcggcaagggguccugggacugcaucaugaccagcuaccaguaccucaucauccagaacaccaccugggaggaccacugccaguucucccgccccagccccaucggcuaccuggggcugcucagccagcggacgcgcgacaucuacaucucccggcgccugcugggcaccuucaccuggacccucagcgacuccgagggcaacgagacgcccgggggcuacugccugacccgguggaugcugaucgaggccgagcucaagugcuucgggaacaccgccgucgccaagugcaacgagaagcacgacgaggaguucugcgacaugcugcgccuguucgacuucaacaagcaggcgauccggcgccucaagaccgaggcccagaugagcauccagcugaucaacaaggccgugaacgcccugaucaacgaccagcucaucaugaagaaccaccuccgggacaucaugggcauccccuacugcaacuacuccaaguacugguaccugaaccacacggugaccgggaagaccagccugccccgcugcuggcuggucuccaacggcagcuaccugaacgagacccacuucuccgacgacaucgagcagcaggccgacaacaugaucacggagaugcuccagaaggaguacauggaccggcagggcaagaccccgcuggggcugguggaccucuucguguucagcaccuccuucuaccugaucagcaucuuccugcaccuggucaagaucccgacccaccgccacgugaucggcaagcccugccccaagccccaccggcucaaccacauggggaucugcuccugcggccuguacaagcacccgggggugcccgucaaguggaagcgcugaggacuaguaauaaggaaacuguaugaaugucugugggcaggaagugaagagauccuucuguaaagguuuuuggaauuaugucugcugaauaauaaacuuuuuugaaauaauaaaucugguagaaaaaugagaucucaaaggcucuuuucagagccaccaaaaaaaaaaaaaaaaaaaaaaaaaaaaaaaaaaaaaaaaaaaaaaaaaaaaaaaaaaaaaaaaagaauu

SEQ ID NO: 14650 - RNA, 1778 nt, Artificial Sequence
  mRNA product Design b-4 (hSL-A64-N5) comprising derived and/or modified sequence from LASV(LASV237-NIG-2010;Clade II)__AIT17638__GPC (opt1)
aggagagucccgcagucggcguccagcggcucugcuuguucgugugugugucguugcaggccuuauucaagcuuaccaugggccagaucaucaccuucuuccaggaggugccccacgucaucgaggaggugaugaacaucgugcugaucgcccucagccugcuggccauccucaaggggaucuacaacgucgcgaccugcggccuguucgggcugguguccuuccuccugcugugcggccgcagcugcuccacgaccuacaaggggguguacgagcuccagacccuggagcuggacauggccagccucaacaugaccaugccgcuguccugcacgaagaacaacagccaccacuacaucauggucggcaacgagaccggccuggagcucacccugaccaacacguccaucaucaaccacaaguucugcaaccugagcgacgcccacaagaaggaccucuacgaccacgcccugauguccaucaucagcaccuuccaccuguccauccccaacuucaaccaguacgaggccaugagcugcgacuucaacgggggcaagaucuccgugcaguacaaccucagccacaccuacgcgguggacgccgccaaccacugcgggaccaucgccaacggcguccugcagacguucaugcggauggcguggggcggguccuacaucgcccuggacagcggcaagggguccugggacugcaucaugaccagcuaccaguaccucaucauccagaacaccaccugggaggaccacugccaguucucccgccccagccccaucggcuaccuggggcugcucagccagcggacgcgcgacaucuacaucucccggcgccugcugggcaccuucaccuggacccucagcgacuccgagggcaacgagacgcccgggggcuacugccugacccgguggaugcugaucgaggccgagcucaagugcuucgggaacaccgccguggccaagugcaacgagaagcacgacgaggaguucugcgacaugcugcgccuguucgacuucaacaagcaggcgauccggcgccucaagaccgaggcccagaugagcauccagcugaucaacaaggccgugaacgcccugaucaacgaccagcucaucaugaagaaccaccuccgggacaucaugggcauccccuacugcaacuacuccaaguacugguaccugaaccacacggucaccgggaagaccagccugccccgcugcuggcugguguccaacggcagcuaccugaacgagacccacuucuccgacgacaucgagcagcaggccgacaacaugaucacggagcuccugcagaaggaguacauggaccggcagggcaagaccccgcuggggcucguggaccuguucgucuucagcaccuccuucuaccugaucagcaucuuccugcaccucaucaagaucccgacccaccgccacaucacgggcaagcccugccccaagccccaccggcugaaccacauggggaucugcuccugcggccuguacaagcacccgggggugcccgugaaguggaagcgcugaggacuaguaauaaggaaacuguaugaaugucugugggcaggaagugaagagauccuucuguaaagguuuuuggaauuaugucugcugaauaauaaacuuuuuugaaauaauaaaucugguagaaaaaugagaucucaaaggcucuuuucagagccaccaaaaaaaaaaaaaaaaaaaaaaaaaaaaaaaaaaaaaaaaaaaaaaaaaaaaaaaaaaaaaaaaagaauu

SEQ ID NO: 14651 - RNA, 1778 nt, Artificial Sequence
  mRNA product Design b-4 (hSL-A64-N5) comprising derived and/or modified sequence from LASV(LASV253-NIG-2011;Clade II)__AIT17670__GPC (opt1)
aggagagucccgcagucggcguccagcggcucugcuuguucgugugugugucguugcaggccuuauucaagcuuaccaugggccagaucaucaccuucuuccaggaggugccccacgucaucgaggaggugaugaacaucgugcugaucgcccucagccugcuggccauccucaaggggaucuacaacgucgcgaccugcggccuguucgggcugguguccuuccuccugcugugcggccgcagcugcuccacgaccuacaaggggguguacgagcuccagacccuggagcuggacauggccagccucaacaugaccaugccgcuguccugcacgaagaacaacagccaccacuacaucauggucggcaacgagaccggccuggagcucacccugaccaacacguccaucaucaaccacaaguucugcaaccugagcgacgcccacaagaagaaccucuacgaccacgcccugauguccaucaucagcaccuuccaccuguccauccccaacuucaaccaguacgaggccaugagcugcgacuucaacgggggcaagaucuccgugcaguacaaccucagccacaccuacgcgguggacgccgccaaccacugcgggaccaucgccaacggcguccugcagacguucaugcggauggcguggggcggguccuacaucgcccuggacagcggcaagggguccugggacugcaucaugaccagcuaccaguaccucaucauccagaacaccaccugggaggaccacugccaguucucccgccccagccccaucggcuaccuggggcugcucagccagcggacgcgcgacaucuacaucucccggcgccugcugggcaccuucaccuggacccucagcgacuccgagggcaacgagacgcccgggggcuacugccugacccgguggaugcugaucgaggccgagcucaagugcuucgggaacaccgccguggccaagugcaacgagaagcacgacgaggaguucugcgacaugcugcgccuguucgacuucaacaagcaggcgauccggcgccucaaggccgaggcccagaugagcauccagcugaucaacaaggccgugaacgcccugaucaacgaccagcucaucaugaagaaccaccuccgggacaucaugggcaucccguacugcaacuacuccaaguacugguaccugaaccacaccgucacggggcgcaccagccugccccggugcuggcugguguccaacggcagcuaccugaacgagacccacuucuccgacgacaucgagcagcaggcggacaacaugaucaccgagcuccugcagaaggaguacaucgaccgccagggcaagacgccccuggggcucguggaccuguucgucuucagcaccuccuucuaccugaucagcaucuuccugcaccucgugaagaucccgacccaccggcacaucaucggcaagcccugccccaagccccaccgccugaaccacauggggaucugcuccugcggccuguacaagcacccgggggugcccgucaaguggaagcggugaggacuaguaauaaggaaacuguaugaaugucugugggcaggaagugaagagauccuucuguaaagguuuuuggaauuaugucugcugaauaauaaacuuuuuugaaauaauaaaucugguagaaaaaugagaucucaaaggcucuuuucagagccaccaaaaaaaaaaaaaaaaaaaaaaaaaaaaaaaaaaaaaaaaaaaaaaaaaaaaaaaaaaaaaaaaagaauu

SEQ ID NO: 14652 - RNA, 1778 nt, Artificial Sequence
  mRNA product Design b-4 (hSL-A64-N5) comprising derived and/or modified sequence from LASV(LASV254-NIG-2011;Clade II)__AIT17674__GPC (opt1)
aggagagucccgcagucggcguccagcggcucugcuuguucgugugugugucguugcaggccuuauucaagcuuaccaugggccagaucaucaccuucuuccaggaggugccccacgucaucgaggaggugaugaacaucgugcugaucgcccucagccugcuggccauccucaaggggaucuacaacgucgcgaccugcggccuguucgggcugguguccuuccuccugcugugcggccgcagcugcuccacgaccuacaaggggguguacgagcuccagacccuggagcuggacaugaccaaccucaacaugacgaugccgcugagcugcaccaagaacaacucccaccacuacaucauggucggcaacgagaccggccuggagcucacccugacgaacaccagcaucaucaaccacaaguucugcaaccuguccgacgcccacaagaagaaccucuacaaccacgcccugaugagcaucaucuccaccuuccaccugagcauccccaacuucaaccaguacgaggccauguccugcgacuucaacgggggcaagaucagcgugcaguacaaccucucccacagcuacgccguggacgcggccaaccacugcgggaccaucgccaacggcguccugcagacguucaugcggauggccuggggcggguccuacaucgcgcuggacagcggcaaggggaacugggacugcaucaugaccuccuaccaguaccucaucauccagaacaccaccugggaggaccacugccaguucagccgccccucccccaucggcuaccuggggcugcucagccagcggacgcgcgacaucuacaucagccggcgccugcugggcaccuucaccuggacccucuccgacagcgagggcaacgagacgcccgggggcuacugccugacccgguggaugcugaucgaggccgagcucaagugcuucgggaacaccgccguggccaagugcaacgagaagcacgacgaggaguucugcgacaugcugcgccuguucgacuucaacaagcaggccauccggcgccucaagaccgaggcgcaggccaacauccagcugaucaacaaggccgugaacgcccugaucaacgaccagcucaucaugaagaaccaccuccgggacaucaugggcauccccuacugcaacuacuccaaguacugguaccugaaccacacggucaccgggaagaccagccugccccgcugcuggcugguguccaacggcagcuaccugaacgagacccacuucuccgacgacaucgagcagcaggccgacaacaugaucacggagcuccugcagaaggaguacauggaccggcagggcaagaccccgcuggggcucguggaccuguucgucuucagcaccuccuucuaccugaucagcaucuuccugcaccucgugaagaucccgacccaccgccacgugaucggcaagcccugccccaagccccaccggcugaaccacauggggaucugcuccugcggccuguacaagcacccggggguccccgugaaguggaagcgcugaggacuaguaauaaggaaacuguaugaaugucugugggcaggaagugaagagauccuucuguaaagguuuuuggaauuaugucugcugaauaauaaacuuuuuugaaauaauaaaucugguagaaaaaugagaucucaaaggcucuuuucagagccaccaaaaaaaaaaaaaaaaaaaaaaaaaaaaaaaaaaaaaaaaaaaaaaaaaaaaaaaaaaaaaaaaagaauu

SEQ ID NO: 14653 - RNA, 1778 nt, Artificial Sequence
  mRNA product Design b-4 (hSL-A64-N5) comprising derived and/or modified sequence from LASV(Nig08-A19;Clade III)__ADU56618__GPC (opt1)
aggagagucccgcagucggcguccagcggcucugcuuguucgugugugugucguugcaggccuuauucaagcuuaccaugggccagaucgugaccuucuuccaggaggucccccacgugaucgaggaggugaugaacaucguccugaucgcccucagcauccuggccauccugaaggggcucuacaacaucgcgaccugcggccugaucgggcuggugacguuccuccugcuguccggccgcagcugcuccaugaccuacaaggggguguacgagcuccagacccuggagcugaacaugaacacccucaacaugacgaugccgcugagcugcaccaagaacaacucccaccacuacaucauggucggcaacgagaccggccuggagcucacccugacgaacaccagccugcuccaccacaaguucugcaaccuguccgacgcccacaagaagaaccuguacgaccacacccucaugagcaucaucuccaccuuccaccugagcauccccaacuucaaccaguacgaggccauguccugcgacuucaacgggggcaagaucacggugcaguacaaccugagccacuccuacgccaucgacgccgcgaaccacugcgggaccguggccaacggcguccuccagaccuucaugcggauggccuggggcgggagcuacaucgcccuggacuccggccgcgggaagugggacugcaucaugaccagcuaccaguaccugaucauccagaacacgaccugggaggaccacugccaguucucccggcccagccccaucggcuaccucgggcugcugucccagcgcacccgggacaucuacaucagccgccggcuccugggcaccuucacguggacccugagcgacuccgagggcaacgagacccccgggggcuacugccucacccgcuggaugcugaucgaggcggagcugaagugcuucgggaacacggccguggccaagugcaacgagaagcacgacgaggaguucugcgacaugcuccggcuguucgacuucaacaagcaggccauccgccggcugaaggccgaggcgcagaugagcauccagcucaucaacaaggccgugaacgcccugaucaacgaccagcugaucaugaagaaccaccuccgcgacaucaugggcauccccuacugcaacuacuccaaguacugguaccugaaccacaccagcaccgggcggaccucccugccccgcugcuggcucgucagcaacggcuccuaccugaacgagacgcacuucagcgacgacaucgagcagcaggccgacaacaugaucaccgagaugcugcagaaggaguaccucgaccggcagggcaagaccccgcuggggcugguggaccuguucguguucuccaccagcuucuaccucaucuccaucuuccugcaccuggucaagaucccgacgcaccgccacaucgugggcaagcccugccccaagccccaccggcucaaccacauggggaucugcagcugcggccuguacaagcagccgggggugcccguccgcuggaagcggugaggacuaguaauaaggaaacuguaugaaugucugugggcaggaagugaagagauccuucuguaaagguuuuuggaauuaugucugcugaauaauaaacuuuuuugaaauaauaaaucugguagaaaaaugagaucucaaaggcucuuuucagagccaccaaaaaaaaaaaaaaaaaaaaaaaaaaaaaaaaaaaaaaaaaaaaaaaaaaaaaaaaaaaaaaaaagaauu

SEQ ID NO: 14654 - RNA, 1781 nt, Artificial Sequence
  mRNA product Design b-4 (hSL-A64-N5) comprising derived and/or modified sequence from LASV(G1180-SLE-2010;Clade IV)__AIT17168__GPC (opt1)
aggagagucccgcagucggcguccagcggcucugcuuguucgugugugugucguugcaggccuuauucaagcuuaccaugggccagaucgugaccuucuuccaggaggucccccacgugaucgaggaggugaugaacaucguccugaucgcccucagcauccuggccgugcugaaggggcucuacaacuucgcgaccugcggccugguggggcugcucaccuuccugcugcucugcggccgcuccugcaccgccagccgguacaagggggucuacgagcugcagacccuggagcucaacauggagacccugaacaugacgaugccgcuguccugcaccaagaacaacagccaccacuacaucauggugggcaacgagaccggccucgagcugacccugacgaacaccuccaucaucaaccacaaguucugcaaccucagcgacgcccacaagaagaaccuguacgaccacgcccugauguccaucaucagcaccuuccaccucuccauccccaacuucaaccaguacgaggccaugagcugcgacuucaacgggggcaagaucuccgugcaguacaaccugagccacuccuacgcgggggacgccgccaaccacugcggcaccgucgccaacggggugcugcagacguucaugcgcauggcguggggcggcagcuacaucgcccucgacuccgggcacggcagcugggacugcaucaugaccuccuaccaguaccugaucauccagaacaccaccugggaggaccacugccaguucagccggcccucccccaucggguaccugggccuccugagccagcgcacgcgggacaucuacaucagccgccggcugcucggcaccuucaccuggacccuguccgacagcgaggggaaggacacgccgggcggguacugccugacccgcuggaugcucaucgaggccgagcugaagugcuucggcaacaccgccguggccaagugcaacgagaagcacgacgaggaguucugcgacaugcugcggcuguucgacuucaacaagcaggcgauccagcgccugaaggccgaggcccagauguccauccagcugaucaacaaggccgucaacgcccucaucaacgaccagcugaucaugaagaaccaccuccgggacaucauggggauccccuacugcaacuacagcaaguacugguaccucaaccacaccacgaccggcaagaccucccugcccaagugcuggcuggugagcaacggcuccuaccucaacgagacccacuucagcgacgacaucgagcagcaggcggacaacaugaucacggagaugcugcagaaggaguacauggagcgccaggggaagacgccccugggccucguggaccuguucgucuucuccaccagcuucuaccugaucuccaucuuccugcaccucgugaagaucccgacccaccggcacaucgugggcaagagcugccccaagccccaccgccugaaccacauggggaucugcuccugcgggcuguacaagcagcccggcgucccggugaaguggaagcggugaggacuaguaauaaggaaacuguaugaaugucugugggcaggaagugaagagauccuucuguaaagguuuuuggaauuaugucugcugaauaauaaacuuuuuugaaauaauaaaucugguagaaaaaugagaucucaaaggcucuuuucagagccaccaaaaaaaaaaaaaaaaaaaaaaaaaaaaaaaaaaaaaaaaaaaaaaaaaaaaaaaaaaaaaaaaagaauu

SEQ ID NO: 14655 - RNA, 1781 nt, Artificial Sequence
  mRNA product Design b-4 (hSL-A64-N5) comprising derived and/or modified sequence from LASV(G1442-SLE-2011;Clade IV)__AIT17180__GPC (opt1)
aggagagucccgcagucggcguccagcggcucugcuuguucgugugugugucguugcaggccuuauucaagcuuaccaugggccagaucgugaccuucuuccaggaggucccccacgugaucgaggaggugaugaacaucguccugaucgcccucagcauccuggccgugcugaaggggcucuacaacguggcgaccugcggccugaucgggcuggucacguuccuccugcugugcggccgcuccugcaccaccacccucuacaaggggguguacgagcugcagacgcuggagcucaacauggagacccugaacaugaccaugccgcugagcugcaccaagaacaacucccaccacuacauccgggugggcaacgagacgggccucgagcugacccugaccaacaccagcaucaucaaccacaaguucugcaaccucuccgacgcccacaagaagaaccuguacgaccacgcccugaugagcaucaucuccacguuccaccucagcauccccaacuucaaccaguacgaggccauguccugcgacuucaacgggggcaagaucagcguccaguacaaccugucccacagcuacgccggggacgcggccaaccacugcggcaccguggccaacggggugcugcagaccuucaugcgcauggccuggggcggcuccuacaucgcgcucgacagcgggcggggcaacugggacugcaucaugaccuccuaccaguaccugaucauccagaacacgaccugggacgaccacugccaguucagccgccccucccccaucggguaccugggccuccugagccagcggacccgcgacgucuacaucucccggcgccugcucggcaccuucacguggacccugagcgacagcgaggggaaggacaccccgggcggguacugccugacccgguggaugcucaucgaggccgagcugaagugcuucggcaacacggccguggccaagugcaacgagaagcacgacgaggaguucugcgacaugcugcgccucuucgacuucaacaagcaggccauccagcggcugaaggcggaggcccagauguccauccagcugaucaacaaggccgugaacgcccucaucaacgaccagcugaucaugaagaaccaccuccgcgacaucauggggauccccuacugcaacuacagcaaguacugguaccugaacaacaccgccaccggcaagaccucccugcccaagugcuggcugaucagcaacggcuccuaccucaacgagacgcacuucagcgacgacaucgagcaggaggcggacaacaugaucaccgagaugcugcagaaggaguacauggagcggcaggggaagacgccccugggccucgucgaccuguucguguucuccaccagcuucuaccugaucuccaucuuccugcaccucgugaagaucccgacccaccgccacaucgucggcaagagcugccccaagccccaccggcugaaccacauggggaucugcuccugcgggcuguacaagcagcccggcgugccggugcgcuggaagcggugaggacuaguaauaaggaaacuguaugaaugucugugggcaggaagugaagagauccuucuguaaagguuuuuggaauuaugucugcugaauaauaaacuuuuuugaaauaauaaaucugguagaaaaaugagaucucaaaggcucuuuucagagccaccaaaaaaaaaaaaaaaaaaaaaaaaaaaaaaaaaaaaaaaaaaaaaaaaaaaaaaaaaaaaaaaaagaauu

SEQ ID NO: 14656 - RNA, 1781 nt, Artificial Sequence
  mRNA product Design b-4 (hSL-A64-N5) comprising derived and/or modified sequence from LASV(G3010-SLE-2013;Clade IV)__AIT17344__GPC (opt1)
aggagagucccgcagucggcguccagcggcucugcuuguucgugugugugucguugcaggccuuauucaagcuuaccaugggccagaucgugaccuucuuccaggaggucccccacgugaucgaggaggugaugaacaucguccugaucgcccucagcauccuggccgugcugaaggggcucuacaacuucgcgaccugcggccugguggggcuggucacguuccuccugcugugcggccgcuccugcaccaccagccucuacaaggggguguacgagcugcagacccuggagcucaacauggagacgcugaacaugaccaugccgcuguccugcaccaagaacaacagccaccacuacaucauggugggcaacgagaccggccucgagcugacgcugaccaacaccuccaucaucaaccacaaguucugcaaccucagcgacgcccacaagaagaaccuguacaaccacgcccugauguccaucaucagcaccuuccaccucuccauccccaacuucaaccaguacgaggccaugagcugcgacuucaacgggggcaagaucuccguccaguacaaccugagccacuccuacgccggggacgcggccagccacugcggcacgguggccaacggggugcugcagaccuucaugcggauggccuggggcggcuccuacaucgcgcucgacagcggguacggcaagugggacugcaucaugaccuccuaccaguaccugaucauccagaacaccacgugggaggaccacugccaguucagccgccccucccccaucggguaccugggccuccugagccagcggacccgcgacaucuacaucagccggcgccugcucggcaccuucaccuggacgcuguccgacagcgaggggaaggacaccccgggcggguacugccugacccgguggaugcucaucgaggccgagcugaagugcuucggcaacaccgccgucgccaagugcaacgagaagcacgacgaggaguucugcgacaugcugcgccucuucgacuucaacaagcaggccauccagcggcugaagacggaggcgcagauguccauccagcugaucaacaaggccgugaacgcccucaucaacgaccagcugaucaugaagaaccaccuccgcgacaucauggggauccccuacugcaacuacagcaaguacugguaccugaaccacaccaccaccggcaagacgucccugcccaagugcuggcuggugagcaacggcuccuaccucaacgagacccacuucagcgacgacaucgagcagcaggccgacaacaugaucaccgagaugcugcagaaggaguacauggagcggcaggggaagacgccccugggccucgucgaccuguucguguucuccaccagcuucuaccugaucuccaucuuccugcaccucgugaagaucccgacccaccgccacaucgucggcaagagcugccccaagccccaccggcugaaccacauggggaucugcuccugcgggcuguacaagcagcccggcgugccggugcgcuggaagcggugaggacuaguaauaaggaaacuguaugaaugucugugggcaggaagugaagagauccuucuguaaagguuuuuggaauuaugucugcugaauaauaaacuuuuuugaaauaauaaaucugguagaaaaaugagaucucaaaggcucuuuucagagccaccaaaaaaaaaaaaaaaaaaaaaaaaaaaaaaaaaaaaaaaaaaaaaaaaaaaaaaaaaaaaaaaaagaauu

SEQ ID NO: 14657 - RNA, 1781 nt, Artificial Sequence
  mRNA product Design b-4 (hSL-A64-N5) comprising derived and/or modified sequence from LASV(G502-SLE-2009;Clade IV)__AIT17126__GPC (opt1)
aggagagucccgcagucggcguccagcggcucugcuuguucgugugugugucguugcaggccuuauucaagcuuaccaugggccagaucgugaccuucuuccaggaggucccccacgugaucgaggaggugaugaacaucguccugaucgcccucagcauccuggccgugcugaaggggcucuacaacuucgcgaccugcggccugguggggcugcucacguuccugcugcucugcggccgcuccugcaccaccgggcuguacaagggcgucuacgagcugcagacccucgagcugaacauggagacgcugaacaugaccaugccgcucagcugcaccaagaacaacucccaccacuacaucauggugggcaacgagaccgggcuggagcugacgcucaccaacaccagcaucaucaaccacaaguucugcaaccuguccgacgcccacaagaagaaccuguacgaccacgcccucaugagcaucaucuccaccuuccaccugagcauccccaacuucaaccaguacgaggccauguccugcgacuucaacggcgggaagaucagcgugcaguacaaccugucccacagcuacgccggcgacgcggccgaccacugcgggacggucgccaacggcgugcuccagaccuucaugcggauggccuggggcggguccuacaucgcgcuggacagcggccgcgggcggugggacugcaucaugaccuccuaccaguaccugaucauccagaacaccacgugggaggaccacugccaguucagccgccccucccccaucggcuaccucggccugcugagccagcggacccgcgacaucuacaucucccggcgccuccuggggaccuucaccuggacgcugagcgacagcgagggcaaggacacccccgggggcuacugccucacccgguggaugcugaucgaggccgagcugaagugcuucgggaacaccgccguggccaagugcaacgagaagcacgacgaggaguucugcgacaugcuccgccuguucgacuucaacaagcaggccauccagcggcugaaggcggaggcccagauguccauccagcucaucaacaaggccgucaacgcccugaucaacgaccagcuggugaugaagaaccaccuccgcgacaucaugggcauccccuacugcaacuacagccgguacugguaccugaaccacacgaccaccggccgcaccucccugcccaagugcuggcucgugagcaacggguccuaccugaacgagacgcacuucagcgacgacaucgagcagcaggccgacaacaugaucaccgagaugcugcagaaggaguacauggagcggcagggcaagaccccgcucgggcuggucgaccuguucguguucuccaccagcuucuaccugaucuccaucuuccuccaccuggugaagaucccgacgcaccgccacaucgucggcaagagcugccccaagccccaccggcugaaccacauggggaucugcuccugcggccucuacaagcagcccggcgugccggugaaguggaagcgcugaggacuaguaauaaggaaacuguaugaaugucugugggcaggaagugaagagauccuucuguaaagguuuuuggaauuaugucugcugaauaauaaacuuuuuugaaauaauaaaucugguagaaaaaugagaucucaaaggcucuuuucagagccaccaaaaaaaaaaaaaaaaaaaaaaaaaaaaaaaaaaaaaaaaaaaaaaaaaaaaaaaaaaaaaaaaagaauu

SEQ ID NO: 14658 - RNA, 1781 nt, Artificial Sequence
  mRNA product Design b-4 (hSL-A64-N5) comprising derived and/or modified sequence from LASV(G733-SLE-2010;Clade IV)__AIT17154__GPC (opt1)
aggagagucccgcagucggcguccagcggcucugcuuguucgugugugugucguugcaggccuuauucaagcuuaccaugggccagaucgugaccuucuuccaggaggucccccacgugaucgaggaggugaugaacaucguccugaucgcccucagcauccuggccgugcugaaggggcucuacaacuucgcgaccugcggcaucguggggcuggucuccuuccugcuccugugcggccgcagcugcacgaccucccuguacaaggggguguacgagcuccagacccuggagcugaacauggagacccucaacaugacgaugccgcugagcugcaccaagaacaacucccaccacuacaucauggugggcaacgagaccggccuggagcucacccugacgaacaccagcaucaucaaccacaaguucugcaaccuguccgacgcccacaagaagaaccucuacgaccacgcccugaugagcaucaucuccaccuuccaccugagcauccccaacuucaaccaguacgaggccauguccugcgacuucaacgggggcaagaucagcguccaguacaaccucucccacagcuacgccggggacgcggccaaccacugcggcaccaucgccaacggggugcugcagacguucaugcggauggccuggggcggcuccuacaucgcgcuggacagcgggcgcgaccggugggacugcaucaugaccuccuaccaguaccucaucauccagaacaccaccugggaggaccacugccaguucagccgccccucccccaucggcuaccuggggcugcucagccagcggacgcgcgacaucuacaucagccggcgccugcugggcaccuucaccuggacccucuccgacagcgagggcaaggacacgcccgggggcuacugccugacccgguggaugcugaucgaggccgagcucaagugcuucgggaacaccgccguggccaagugcaacgagaagcacgacgaggaguucugcgacaugcugcgccuguucgacuucaacaagcaggccauccagcggcucaaggcggaggcccagauguccauccagcugaucaacaaggccgucaacgcccugaucaacgaccagcucaucaugaagaaccaccuccgcgacaucaugggcauccccuacugcaacuacagcaaguacugguaccugaaccacaccacgaccgggaagaccucccugcccaagugcuggcuggugagcaacggcuccuaccugaacgagacccacuucagcgacgacaucgagcagcaggccgacaacaugaucacggagaugcuccagaaggaguacauggagcggcagggcaagaccccgcuggggcugguggaccucuucgucuucuccaccagcuucuaccugaucuccaucuuccugcaccuggugaagaucccgacccaccgccacguggucggcaagagcugccccaagccccaccggcucaaccacauggggaucugcuccugcggccuguacgggcagcccggcgugccggugaaguggaagcgcugaggacuaguaauaaggaaacuguaugaaugucugugggcaggaagugaagagauccuucuguaaagguuuuuggaauuaugucugcugaauaauaaacuuuuuugaaauaauaaaucugguagaaaaaugagaucucaaaggcucuuuucagagccaccaaaaaaaaaaaaaaaaaaaaaaaaaaaaaaaaaaaaaaaaaaaaaaaaaaaaaaaaaaaaaaaaagaauu

SEQ ID NO: 14659 - RNA, 1781 nt, Artificial Sequence
  mRNA product Design b-4 (hSL-A64-N5) comprising derived and/or modified sequence from MOPV/LASV reassortant(IGS-1;Clade IV)__AFY05576__GPC (opt1)
aggagagucccgcagucggcguccagcggcucugcuuguucgugugugugucguugcaggccuuauucaagcuuaccaugggccagaucgugaccuucuuccaggaggucccccacgugaucgaggaggugaugaacaucguccugaucgcccucagcgugcuggccgugcugaaggggcucuacaacuucgcgaccugcggccuggucgggcuggugacguuccuccugcugugcggccgcuccugcaccaccagccucuacaaggggguguacgagcugcagacccuggagcucaacauggagacgcugaacaugaccaugccgcuguccugcaccaagaacaacagccaccacuacaucauggucggcaacgagaccggccucgagcugacgcugaccaacaccuccaucaucaaccacaaguucugcaaccucagcgacgcccacaagaagaaccuguacgaccacgcccugauguccaucaucagcaccuuccaccucuccauccccaacuucaaccaguacgaggccaugagcugcgacuucaacgggggcaagaucuccgugcaguacaaccugagccacuccuacgccggggacgcggccaaccacugcggcacgguggccaacgggguccugcagaccuucaugcggauggccuggggcggcagcuacaucgcgcucgacuccgggcgcggcaacugggacugcaucaugaccagcuaccaguaccugaucauccagaacaccacgugggaggaccacugccaguucucccggcccagccccaucggguaccugggccuccugucccagcgcacccgggacaucuacaucagccgccggcugcucggcaccuucaccuggacgcugagcgacuccgagggggaggacaccccgggcggguacugccugacccgcuggaugcucaucgaggccgagcugaagugcuucggcaacaccgccguggccaagugcaacgagaagcacgacgaggaguucugcgacaugcugcggcuguucgacuucaacaagcaggccauccagcgccugaaggcggaggcccagaugagcauccagcugaucaacaaggccgugaacgcccucaucaacgaccagcugaucaugaagaaccaccuccgggacaucauggggauccccuacugcaacuacuccaaguacugguaccucaaccacacgaccaccggccgcaccagccugcccaagugcuggcuggucuccaacggcagcuaccucaacgagacgcacuucuccgacgacaucgagcagcaggccgacaacaugaucaccgagaugcugcagaaggaguacauggagcggcaggggaagacgccccugggccucguggaccuguucguguucagcaccuccuucuaccugaucagcaucuuccugcaccucgucaagaucccgacccaccgccacaucguggggaaguccugccccaagccccaccggcugaaccacaugggcaucugcagcugcgggcuguacaagcagcccggcgugccggucaaguggaagcgcugaggacuaguaauaaggaaacuguaugaaugucugugggcaggaagugaagagauccuucuguaaagguuuuuggaauuaugucugcugaauaauaaacuuuuuugaaauaauaaaucugguagaaaaaugagaucucaaaggcucuuuucagagccaccaaaaaaaaaaaaaaaaaaaaaaaaaaaaaaaaaaaaaaaaaaaaaaaaaaaaaaaaaaaaaaaaagaauu

SEQ ID NO: 14660 - RNA, 1781 nt, Artificial Sequence
  mRNA product Design b-4 (hSL-A64-N5) comprising derived and/or modified sequence from LASV(LM765-SLE-2012;Clade IV)__AIT17814__GPC (opt1)
aggagagucccgcagucggcguccagcggcucugcuuguucgugugugugucguugcaggccuuauucaagcuuaccaugggccagaucgugaccuucuuccaggaggucccccacgugaucgaggaggugaugaacaucguccugaucgcccucagcauccuggccgugcugaaggggcucuacaacuucgcgaccugcggccugguggggcuggucacguuccuccugcugugcggccgcuccugcaccaccagccucuacaaggggguguacgagcugcagacccuggagcucaacauggagacgcugaacaugaccaugccgcuguccugcaccaagaacaacagccaccacuacaucauggugggcaacgagaccggccucgagcugacgcugaccaacaccuccaucaucgaccacaaguucugcaaccucagcgacgcccaccggaagaaccuguacgaccacgcccugauguccaucaucagcaccuuccaccucuccauccccaacuucaaccaguacgaggccaugagcugcgacuucaacgggggcaagaucuccguccaguacaaccugagccacuccuacgccaaggacgcggccgaccacugcgggacgguggccaacggcgugcugcagaccuucaugcgcauggccuggggcgggagcuacaucgcgcucgacuccggccgggggcgcugggacugcaucaugaccagcuaccaguaccugaucauccagaacaccacgugggaggaccacugccaguucucccggcccagccccaucggcuaccuggggcuccugucccagcgcacccgggacaucuacaucagccgccggcugcucggcaccuucaccuggacgcugagcgacuccgagggcaaggacacccccgggggcuacugccugacccgcuggaugcucaucgaggccgagcugaagugcuucgggaacaccgccgucgccaagugcaacgagaagcacgacgaggaguucugcgacaugcugcggcuguucgacuucaacaagcaggccauccagcgccugaaggcggaggcccagaugagcauccagcugaucaacaaggccgugaacgcccucaucaacgaccagcugaucaugaagaaccaccuccgggacaucaugggcauccccuacugcaacuacuccaaguacugguaccucaaccacacgaccaccgggaagaccagccugcccaagugcuggcugguguccaacggcagcuaccucaacgagacgcacuucuccgacgacaucgagcagcaggccgacaacaugaucaccgagaugcugcagaaggaguacauggagcgccagggcaagaccccgcuggggcucgucgaccuguucguguucagcaccuccuucuaccugaucagcaucuuccugcaccucgugaagaucccgacgcaccggcacaucgucggcaagcccugccccaagccccaccgccugaaccacauggggaucugcuccugcggccuguacaagcagccgggggugcccgugaaguggaagcggugaggacuaguaauaaggaaacuguaugaaugucugugggcaggaagugaagagauccuucuguaaagguuuuuggaauuaugucugcugaauaauaaacuuuuuugaaauaauaaaucugguagaaaaaugagaucucaaaggcucuuuucagagccaccaaaaaaaaaaaaaaaaaaaaaaaaaaaaaaaaaaaaaaaaaaaaaaaaaaaaaaaaaaaaaaaaagaauu

SEQ ID NO: 14661 - RNA, 1781 nt, Artificial Sequence
  mRNA product Design b-4 (hSL-A64-N5) comprising derived and/or modified sequence from LASV(LM776-SLE-2012;Clade IV)__AIT17824__GPC (opt1)
aggagagucccgcagucggcguccagcggcucugcuuguucgugugugugucguugcaggccuuauucaagcuuaccaugggccagaucgugaccuucuuccaggaggucccccacgugaucgaggaggugaugaacaucguccugaucgcccucagcauccuggccgugcugaaggggcucuacaacuucgcgaccugcggccugguggggcuggucacguuccuccugcugugcggccgcuccugcaccaccagcguguacaaggggguguacgagcuccagacccuggagcugaacauggagacgcucaacaugaccaugccgcuguccugcaccaagaacaacagccaccacuacaucauggucggcaacgagaccggccuggagcucacgcugaccaacaccuccaucaucaaccacaaguucugcaaccugagcgacgcccacaagaagaaccucuacgaccacgcccugauguccaucaucagcaccuuccaccuguccauccccaacuucaaccaguacgaggccaugagcugcgacuucaacgggggcaagaucuccgugcaguacaaccucagccacuccuacgccggggacgcggccaaccacugcggcacgguggccaacgggguccugcagaccuucaugcggauggccuggggcggcagcuacaucgcgcuggacuccgggcacggcaagugggacugcaucaugaccagcuaccaguaccucaucauccagaacaccacgugggaggaccacugccaguucucccgccccagccccaucggguaccugggccugcucucccagcggacccgcgacaucuacaucagccggcgccugcugggcaccuucaccuggacgcucagcgacuccgaggggaaggacaccccgggcggguacugccugacccgguggaugcugaucgaggccgagcucaagugcuucggcaacaccgccguggccaagugcaacgagaagcacgacgaggaguucugcgacaugcugcgccuguucgacuucaacaagcaggccauccagcggcucaaggcggaggcccagaugagcauccagcugaucaacaaggccgugaacgcccugaucaacgaccagcucaucaugaagaaccaccuccgcgacaucauggggauccccuacugcaacuacuccaaguacugguaccugaaccacacgaccaccggcaagaccagccugcccaagugcuggcuggucuccaacggcagcuaccugaacgagacgcacuucuccgacgacaucgagcagcaggccgacaacaugaucaccgagaugcuccagaaggaguacauggagcggcaggggaagacgccccugggccugguggaccucuucguguucagcaccuccuucuaccugaucagcaucuuccugcaccuggucaagaucccgacccaccgccacaucguggggaaguccugccccaagccccaccggcucaaccacaugggcaucugcagcugcgggcuguacaagcagcccggcgugccgguccgcuggaagcggugaggacuaguaauaaggaaacuguaugaaugucugugggcaggaagugaagagauccuucuguaaagguuuuuggaauuaugucugcugaauaauaaacuuuuuugaaauaauaaaucugguagaaaaaugagaucucaaaggcucuuuucagagccaccaaaaaaaaaaaaaaaaaaaaaaaaaaaaaaaaaaaaaaaaaaaaaaaaaaaaaaaaaaaaaaaaagaauu

SEQ ID NO: 14662 - RNA, 1781 nt, Artificial Sequence
  mRNA product Design b-4 (hSL-A64-N5) comprising derived and/or modified sequence from LASV(Mad39;Clade IV)__ANH09722__GPC (opt1)
aggagagucccgcagucggcguccagcggcucugcuuguucgugugugugucguugcaggccuuauucaagcuuaccaugggccagaucgugaccuucuuccaggaggucccccacgugaucgaggaggugaugaacaucguccugaucgcccucagcauccuggccgugcugaaggggcucuacaacguggcgaccugcggccugaucgggcuggucacguuccuccugcugugcggccgcuccugcaccaccacccucuacaaggggguguacgagcugcaggcccuggagcucaacauggagacgcugaacaugaccaugccgcugagcugcaccaagaacaacucccaccacuacauccgggugggcaacgagaccggccucgagcugacgcugaccaacaccagccucaucaaccacaaguucugcaaccuguccgacgcccacaagaagaaccuguacgaccacgcccucaugagcaucaucuccaccuuccaccugagcauccccaacuucaaccaguacgaggccauguccugcgacuucaacgacgggaagaucagcguccaguacaaccugucccacacguacgcgggcgacaccgccaaccacugcgggaccguggccaacggcgugcuccagaccuucaugcgcauggccuggggcgggagcuacaucgcgcuggacuccggccgcgggggcugggacugcaucaugacgagcuaccaguaccugaucauccagaacaccaccugggaggaccacugccaguucucccggcccagccccaucggguaccucggccugcugucccagcggacccgcgacaucuacaucagccggcgccuccugggcacguucaccuggacccuguccgacagcgaggggaaggacaccccgggcggguacugccucacgcgguggaugcugaucgaggccgagcugaagugcuucggcaacaccgccgucgccaagugcaacgagaagcacgacgaggaguucugcgacaugcuccgccuguucgacuucaacaagcaggccauccagcggcugaaggcggaggcccagaugagcauccagcucaucaacaaggccgugaacgcccugaucaacgaccagcugaucaugaagaaccaccuccgcgacaucauggggauccccuacugcaacuacuccaaguacugguaccugaaccacaccgugaccggcaagacgagccugcccaagugcuggcucgucuccaacggcagcuaccugaacgagacccacuucuccgacgacaucgagcagcaggccgacaacaugaucaccgagaugcugcagaaggaguacauggagcggcaggggaagacgccccucggccugguggaccuguucguguucagcaccuccuucuaccugaucagcaucuuccuccaccuggucaagaucccgacccaccgccacgugguggggaagcccugccccaagccccaccggcugaaccacaugggcaucugcuccugcggguucuacaagcagccgggcguccccgugcgcuggaagcggugaggacuaguaauaaggaaacuguaugaaugucugugggcaggaagugaagagauccuucuguaaagguuuuuggaauuaugucugcugaauaauaaacuuuuuugaaauaauaaaucugguagaaaaaugagaucucaaaggcucuuuucagagccaccaaaaaaaaaaaaaaaaaaaaaaaaaaaaaaaaaaaaaaaaaaaaaaaaaaaaaaaaaaaaaaaaagaauu

SEQ ID NO: 14663 - RNA, 1781 nt, Artificial Sequence
  mRNA product Design b-4 (hSL-A64-N5) comprising derived and/or modified sequence from LASV(Z0947-SLE-2011;Clade IV)__AIT17840__GPC (opt1)
aggagagucccgcagucggcguccagcggcucugcuuguucgugugugugucguugcaggccuuauucaagcuuaccaugggccagaucgugaccuucuuccaggaggucccccacgugaucgaggaggugaugaacaucguccugaucgcccucagcauccuggccgugcugaaggggcucuacaacuucgcgaccugcggccugguggggcuggucacguuccuccugcugugcggccgcuccugcaccaucagccucuacaaggggguguacgagcugcagacccuggagcucaacauggagacccugaacaugacgaugccgcuguccugcaccaagaacaacagccaccacuacaucauggugggcaacgagaccggccucgagcugacccugacgaacaccuccaucaucaaccacaaguucugcaaccucagcgacgcccacaagaagaaccuguacgaccacgcccugauguccaucaucagcaccuuccaccucuccauccccaacuucaaccaguacgaggccaugagcugcgacuucaacgggggcaagaucuccguccaguacaaccugagccacuccuacgccggggacgcggccaaccacugcggcaccguggccaacggggugcugcagacguucaugcggauggccuggggcggcagcuacaucgcgcucgacuccgggcgcgaccggugggacugcaucaugaccagcuaccaguaccugaucauccagaacaccaccugggaggaccacugccaguucucccgccccagccccaucggcuaccuggggcuccugucccagcggacgcgcgacaucuacaucagccggcgccugcucggcaccuucaccuggacccugagcgacuccgagggcaaggacacgcccgggggcuacugccugacccgguggaugcucaucgaggccgagcugaagugcuucgggaacaccgccgucgccaagugcaacgagaagcacgacgaggaguucugcgacaugcugcgccucuucgacuucaacaagcaggccauccagcggcugaaggcggaggcccagaugagcauccagcugaucaacaaggccgugaacgcccucaucaacgaccagcugaucaugaagaaccaccuccgcgacaucaugggcauccccuacugcaacuacuccaaguacugguaccugaaccacaccacgaccgggaagaccagccugcccaagugcuggcugguguccaacggcagcuaccucaacgagacccacuucuccgacgacaucgagcagcaggccgacaacaugaucacggagaugcugcagaaggaguacauggagcggcagggcaagaccccgcuggggcucgucgaccuguucguguucagcaccuccuucuaccugaucagcaucuuccugcaccucgugaagaucccgacccaccgccacaucgucggcaagcccugccccaagccccaccggcugaaccacauggggaucugcuccugcggccuguacaagcagccgggggugcccgugaaguggaagcgcugaggacuaguaauaaggaaacuguaugaaugucugugggcaggaagugaagagauccuucuguaaagguuuuuggaauuaugucugcugaauaauaaacuuuuuugaaauaauaaaucugguagaaaaaugagaucucaaaggcucuuuucagagccaccaaaaaaaaaaaaaaaaaaaaaaaaaaaaaaaaaaaaaaaaaaaaaaaaaaaaaaaaaaaaaaaaagaauu

SEQ ID NO: 14664 - RNA, 1781 nt, Artificial Sequence
  mRNA product Design b-4 (hSL-A64-N5) comprising derived and/or modified sequence from LASV(Josiah;Clade IV)__NP_694870__GPC (opt4)
aggagagucccgcagucggcguccagcggcucugcuuguucgugugugugucguugcaggccuuauucaagcuuaccaugggccagaucgugaccuucuuccaggaggugccccacgugaucgaggaggugaugaacaucgugcugaucgcccugagcgugcuggccgugcugaagggccuguacaacuucgccaccugcggccuggugggccuggugaccuuccugcugcugugcggcagaagcugcaccaccagccuguacaagggcguguacgagcugcagacccuggagcugaacauggagacccugaacaugaccaugccccugagcugcaccaagaacaacagccaccacuacaucauggugggcaacgagaccggccuggagcugacccugaccaacaccagcaucaucaaccacaaguucugcaaccugagcgacgcccacaagaagaaccuguacgaccacgcccugaugagcaucaucagcaccuuccaccugagcauccccaacuucaaccaguacgaggccaugagcugcgacuucaacggcggcaagaucagcgugcaguacaaccugagccacagcuacgccggcgacgccgccaaccacugcggcaccguggccaacggcgugcugcagaccuucaugagaauggccuggggcggcagcuacaucgcccuggacagcggcagaggcaacugggacugcaucaugaccagcuaccaguaccugaucauccagaacaccaccugggaggaccacugccaguucagcagacccagccccaucggcuaccugggccugcugagccagagaaccagagacaucuacaucagcagaagacugcugggcaccuucaccuggacccugagcgacagcgagggcaaggacacccccggcggcuacugccugaccagauggaugcugaucgaggccgagcugaagugcuucggcaacaccgccguggccaagugcaacgagaagcacgacgaggaguucugcgacaugcugagacuguucgacuucaacaagcaggccauccagagacugaaggccgaggcccagaugagcauccagcugaucaacaaggccgugaacgcccugaucaacgaccagcugaucaugaagaaccaccugagagacaucaugggcauccccuacugcaacuacagcaaguacugguaccugaaccacaccaccaccggcagaaccagccugcccaagugcuggcuggugagcaacggcagcuaccugaacgagacccacuucagcgacgacaucgagcagcaggccgacaacaugaucaccgagaugcugcagaaggaguacauggagagacagggcaagaccccccugggccugguggaccuguucguguucagcaccagcuucuaccugaucagcaucuuccugcaccuggugaagauccccacccacagacacaucgugggcaagagcugccccaagccccacagacugaaccacaugggcaucugcagcugcggccuguacaagcagcccggcgugcccgugaaguggaagagaugaggacuaguaauaaggaaacuguaugaaugucugugggcaggaagugaagagauccuucuguaaagguuuuuggaauuaugucugcugaauaauaaacuuuuuugaaauaauaaaucugguagaaaaaugagaucucaaaggcucuuuucagagccaccaaaaaaaaaaaaaaaaaaaaaaaaaaaaaaaaaaaaaaaaaaaaaaaaaaaaaaaaaaaaaaaaagaauu

SEQ ID NO: 14665 - RNA, 1778 nt, Artificial Sequence
  mRNA product Design b-4 (hSL-A64-N5) comprising derived and/or modified sequence from LASV(LP;Clade I)__AAF86701__GPC (opt4)
aggagagucccgcagucggcguccagcggcucugcuuguucgugugugugucguugcaggccuuauucaagcuuaccaugggccagaucaucaccuucuuccaggaggugccccacgugaucgaggaggugaugaacaucgugcugaucgcccugagccugcuggccauccugaagggccuguacaacaucgccaccugcggcaucaucggccugguggccuuccuguuccugugcggcaagagcugcagccugacccugaagggcggcuacgagcugcagacccuggagcugaacauggagacccugaacaugaccaugccccugagcugcaccaagaacagcagccaccacuacaucagagugggcaacgagaccggccuggagcugacccugaccaacaccagcaucaucaaccacaaguucugcaaccugagcgacgcccacaagaagaaccuguacgaccacgcccugaugagcaucaucagcaccuuccaccugagcauccccaacuucaaccaguacgaggccaugagcugcgacuucaacggcggcaagaucagcgugcaguacaaccugagccacagcuacgccggcgacgccgccgagcacugcggcaccguggccaacggcgugcugcagaccuucaugagaauggccuggggcggcagauacaucgcccuggacagcggcaagggcaacugggacugcaucaugaccagcuaccaguaccugaucauccagaacaccaccugggaggaccacugccaguucagcagacccagccccaucggcuaccugggccugcugagccagagaaccagagacaucuacaucagcagaagacugcugggcaccuucaccuggacccugagcgacagcgagggcaacgagacccccggcggcuacugccugaccagauggaugcugaucgaggccgagcugaagugcuucggcaacaccgccguggccaagugcaacgagaagcacgacgaggaguucugcgacaugcugagacuguucgacuucaacaagcaggccaucagaagacugaaggccgaggcccagaugagcauccagcugaucaacaaggccgugaacgcccugaucaacgaccagcugaucaugaagaaccaccugagagacaucaugggcauccccuacugcaacuacagcaaguacugguaccugaaccacaccagcagcggcagaaccagccugcccaagugcuggcugaucagcaacggcagcuaccugaacgagacccaguucagcgacgacaucgagcagcaggccgacaacaugaucaccgagaugcugcagaaggaguacaucgagagacagggcaagaccccccugggccugguggacaucuucaucuucagcaccagcuucuaccugaucagcaucuuccugcaccugaucaagauccccacccacagacacaucgugggcaagcccugccccaagccccacagacugaaccacaugggcgugugcagcugcggccuguacaagcaccccggcgugcccaccaaguggaagagaugaggacuaguaauaaggaaacuguaugaaugucugugggcaggaagugaagagauccuucuguaaagguuuuuggaauuaugucugcugaauaauaaacuuuuuugaaauaauaaaucugguagaaaaaugagaucucaaaggcucuuuucagagccaccaaaaaaaaaaaaaaaaaaaaaaaaaaaaaaaaaaaaaaaaaaaaaaaaaaaaaaaaaaaaaaaaagaauu

SEQ ID NO: 14666 - RNA, 1778 nt, Artificial Sequence
  mRNA product Design b-4 (hSL-A64-N5) comprising derived and/or modified sequence from LASV(803213;Clade II)__AAF86703__GPC (opt4)
aggagagucccgcagucggcguccagcggcucugcuuguucgugugugugucguugcaggccuuauucaagcuuaccaugggccagaucaucaccuucuuccaggaggugccccacgugaucgaggaggugaugaacaucgugcugaucgcccugagccugcuggccauccugaagggcaucuacaacguggccaccugcggccuguucggccugaucagcuuccugcugcugugcggcagaagcugcagcgugaccuacaagggcguguacgagcugcagacccuggagcugaacauggccaaccugaacaugaccaugccccugagcugcaccaagaacaacagccaccacuacaucauggugggcaacgagaccggccuggagcugacccugaccaacaccagcaucaucaaccacaaguucugcaaccugagcgacgcccacaagaagaaccuguacgaccacgcccugaugagcaucaucagcaccuuccaccugagcauccccaacuucaaccaguacgaggccaugagcugcgacuucaacggcggcaagaucagcgugcaguacaaccugagccacagcuucgccguggacgccgccaaccacugcggcaccaucgccaacggcgugcugcagaccuucaugagaauggccuggggcggcagcuacaucgcccuggacagcggcaagggcaacugggacugcaucaugaccagcuaccaguaccugaucauccagaacaccaccugggaggaccacugccaguucagcagacccagccccaucggcuaccugggccugcugagccagagaaccagagacaucuacaucagcagaagacugcugggcaccuucaccuggacccugagcgacagcgagggcaacgaggcccccggcggcuacugccugaccagauggaugcugaucgaggccgagcugaagugcuucggcaacaccgccguggccaagugcaacgagaagcacgacgaggaguucugcgacaugcugagacuguucgacuucaacaagcaggccaucaagagacugaagaccgaggcccagaugagcauccagcugaucaacaaggccgugaacgcccugaucaacgaccagcugaucaugaagaaccaccugagagacaucaugggcauccccuacugcaacuacagcagauacugguaccugaaccacaccgugaccggcaagaccagccugcccagaugcuggcuggugagcaacggcagcuaccugaacgagacccacuucagcgacgacaucgagcagcaggccgacaacaugaucaccgagaugcugcagaaggaguacauggacagacagggcaagaccccccugggccugguggaccuguucguguucagcaccagcuucuaccugaucagcaucuuccugcaccuggugaagauccccacccacagacacaucgugggcaagcccugccccaagccccacagacugaaccacaugggcaucugcagcugcggccuguacaagcaccccggcgugcccgugaaguggaagagaugaggacuaguaauaaggaaacuguaugaaugucugugggcaggaagugaagagauccuucuguaaagguuuuuggaauuaugucugcugaauaauaaacuuuuuugaaauaauaaaucugguagaaaaaugagaucucaaaggcucuuuucagagccaccaaaaaaaaaaaaaaaaaaaaaaaaaaaaaaaaaaaaaaaaaaaaaaaaaaaaaaaaaaaaaaaaagaauu

SEQ ID NO: 14667 - RNA, 1778 nt, Artificial Sequence
  mRNA product Design b-4 (hSL-A64-N5) comprising derived and/or modified sequence from LASV(GA391;Clade III)__CAA36645__GPC (opt4)
aggagagucccgcagucggcguccagcggcucugcuuguucgugugugugucguugcaggccuuauucaagcuuaccaugggccagaucgugaccuucuuccaggaggugccccacgugaucgaggaggugaugaacaucgugcugaucgcccugagcauccuggccauccugaagggccuguacaacguggccaccugcggccugaucggccuggugaccuuccugcugcugagcggcagaagcugcagccugaucuacaagggcaccuacgagcugcagacccuggagcugaacauggagacccugaacaugaccaugccccugagcugcaccaagaacaacagccaccacuacaucagagugggcaacgagaccggccuggagcugacccugaccaacaccagcauccugaaccacaaguucugcaaccugagcgacgcccacaagagaaaccuguacgaccacagccugaugagcaucaucagcaccuuccaccugagcauccccaacuucaaccaguacgaggccaugagcugcgacuucaacggcggcaagaucaccgugcaguacaaccugagccacagcuucgccguggacgccgccggccacugcggcacccuggccaacggcgugcugcagaccuucaugagaauggccuggggcggcagcuacaucgcccuggacagcggcagaggcaacugggacugcaucaugaccagcuaccaguaccugaucauccagaacaccaccugggacgaccacugccaguucagcagacccagccccaucggcuaccugggccugcugagccagagaaccagagacaucuacaucagcagaagacugcugggcaccuucaccuggacccugagcgacagcgagggcaacgagacccccggcggcuacugccugaccagauggaugcugaucgaggccgagcugaagugcuucggcaacaccgccguggccaagugcaacgagaagcacgacgaggaguucugcgacaugcugagacuguucgacuucaacaagcaggccaucagaagacugaagaccgaggcccagaugagcauccagcugaucaacaaggccgugaacgcccugaucaacgaccagcugaucaugaagaaccaccugagagacaucaugggcauccccuacugcaacuacagcagauacugguaccugaaccacaccagcaccggcaagaccagccugcccagaugcuggcugaucagcaacggcagcuaccugaacgagaccaaguucagcgacgacaucgagcagcaggccgacaacaugaucaccgagaugcugcagaaggaguacaucgacagacagggcaagaccccccugggccugguggaccuguucguguucagcaccagcuucuaccugaucagcaucuuccugcaccuggugaagauccccacccacagacacaucgugggcaagcccugccccaagccccacagacugaaccacaugggcaucugcagcugcggccuguacaagcagcccggcgugcccgugagauggaagagaugaggacuaguaauaaggaaacuguaugaaugucugugggcaggaagugaagagauccuucuguaaagguuuuuggaauuaugucugcugaauaauaaacuuuuuugaaauaauaaaucugguagaaaaaugagaucucaaaggcucuuuucagagccaccaaaaaaaaaaaaaaaaaaaaaaaaaaaaaaaaaaaaaaaaaaaaaaaaaaaaaaaaaaaaaaaaagaauu

SEQ ID NO: 14668 - RNA, 1781 nt, Artificial Sequence
  mRNA product Design b-4 (hSL-A64-N5) comprising derived and/or modified sequence from LASV(AV;Clade V)__CCA30314__GPC (opt4)
aggagagucccgcagucggcguccagcggcucugcuuguucgugugugugucguugcaggccuuauucaagcuuaccaugggccagaucgugaccuucuuccaggaggugccccacgugaucgaggaggugaugaacaucgugcugaucgcccugagcauccuggccgugcugaagggccuguacaacaucgccaccugcggccugaucggccugaucaccuuccugcugcugugcggcagaagcugcagcagcaaccuguacaagggcguguacgagcugcagagccuggaccugaacauggagacccugaacaugaccaugccccugagcugcaccaagaacaacagccaccacuacaucagagugggcaacgacaccggccuggagcugacccugaccaacaccagcauccugaaccacaaguucugcaaccugagcgacgcccacaagaaggaccuguacgaccacgcccugaugagcaucaucagcaccuuccaccugagcauccccaacuucaaccaguacgaggccaugagcugcgacuucaacggcggcaagaucagcgugcaguacaaccugagccacagcuacgccaucgacgccgccaaccacugcggcaccguggccaacggcauccugcagaccuucaugagaauggccuggggcggcagcuacaucgcccuggacagcggcagaggcaacugggacugcaucaugaccagcuaccaguaccugaucauccagaacaccaccugggagaaccacugccaguucagcagacccagccccaucggcuaccugggccugcugagccagagaaccagagacaucuacaucagcagaagacugcugggcaccuucaccuggacccugagcgacagcgagggcaacgccacccccggcggcuacugccugaccagauggaugcugaucgaggccgagcugaagugcuucggcaacaccgccguggccaagugcaacgagaagcacgacgaggaguucugcgacaugcugagacuguucgacuucaacaagcaggccaucagcagacugaagagcgaggcccagaugagcauccagcugaucaacaaggccgugaacgcccugaucaacgaccagcugaucaugaagaaccaccugagagacaucaugggcauccccuacugcaacuacagcaaguacugguaccugaaccacaccaucaccggcaagaccagccugcccaagugcuggcuggugagcaacggcagcuaccugaacgagacccacuucagcgacgacaucgagcagcaggccgacaacaugaucaccgagaugcugcagaaggaguacauggagagacagggcaagaccccccugggccugguggaccuguucguguucagcaccagcuucuaccugaucagcaucuuccugagacuggugaagauccccacccacagacacaucgugggcaagcccugccccaagccccacagacugaaccacaugggcaucugcagcugcggccuguacaagcagcccggcgugcccgugagauggaagagaugaggacuaguaauaaggaaacuguaugaaugucugugggcaggaagugaagagauccuucuguaaagguuuuuggaauuaugucugcugaauaauaaacuuuuuugaaauaauaaaucugguagaaaaaugagaucucaaaggcucuuuucagagccaccaaaaaaaaaaaaaaaaaaaaaaaaaaaaaaaaaaaaaaaaaaaaaaaaaaaaaaaaaaaaaaaaagaauu

SEQ ID NO: 14669 - RNA, 1778 nt, Artificial Sequence
  mRNA product Design b-4 (hSL-A64-N5) comprising derived and/or modified sequence from LASV(Togo/2016/7082;Clade VI)__AMR44577__GPC (opt4)
aggagagucccgcagucggcguccagcggcucugcuuguucgugugugugucguugcaggccuuauucaagcuuaccaugggccagaucaucaccuucuuccaggaggugccccacgugaucgaggaggugaugaacaucgugcugaucgcccugagccugcuggccauccugaagggcguguacaacguggccaccugcggcaucaucggccuggugaccuuccuguuccugugcggcagaagcugcagccugaucuacaagggcagcuacgagcugcagacccuggagcugaacauggagacccugaacaugaccaugccccugagcugcaccaagaacagcagccaccacuacaucagagugggcaacgagaccggccuggagcugacccugaccaacaccagcaucaucaaccacaaguucugcaaccugagcgacgcccacaagagaaaccuguacgaccacgcccugaugagcauccugagcaccuuccaccugagcauccccaacuucaaccaguacgaggccaugagcugcgacuucaacggcggcaagaucagcgugcaguacaaccugagccacgccuacgccguggacgccgccgagcacugcggcaccguggccaacggcgugcugcagaccuucaugagaauggccuggggcggcagcuacaucgcccuggacagcggcagaggcaacugggacugcaucaugaccagcuaccaguaccugaucauccagaacaccaccugggaggaccacugccaguucagcagacccagccccaucggcuaccugggccugcugagccagagaaccagagacaucuacaucagcagaagacugcugggcaccuucaccuggacccugagcgacagcgagggcaacgagacccccggcggcuacugccugaccagauggaugcugaucgaggccgagcugaagugcuucggcaacaccgccguggccaagugcaacgagaagcacgacgaggaguucugcgacaugcugagacuguucgacuucaacaagcaggccauccagagacugaagagcgaggcccagaugagcauccagcugaucaacaaggccgugaacgcccugaucaacgaccagcugaucaugaagaaccaccugagagacaugaugggcauccccuacugcaacuacagcaaguacugguaccugaaccacaccagcagcggcagaaccagccugcccaagugcuggcuggugagcaacggcagcuaccugaacgagacccacuucagcgacgacaucgagcagcaggccgacaacaugaucaccgagaugcugcagaaggaguacaucgacagacagggcaagaccccccugggccugguggaccuguucguguucagcaccagcuucuaccugaucagcaucuuccugcaccugaucaagauccccacccacagacacaucgugggcaagcccugccccaagccccacagacugaaccacaugggcaucugcagcugcggccuguacaagcagcccggcgugcccaccagauggaagagaugaggacuaguaauaaggaaacuguaugaaugucugugggcaggaagugaagagauccuucuguaaagguuuuuggaauuaugucugcugaauaauaaacuuuuuugaaauaauaaaucugguagaaaaaugagaucucaaaggcucuuuucagagccaccaaaaaaaaaaaaaaaaaaaaaaaaaaaaaaaaaaaaaaaaaaaaaaaaaaaaaaaaaaaaaaaaagaauu

SEQ ID NO: 14670 - RNA, 1778 nt, Artificial Sequence
  mRNA product Design b-4 (hSL-A64-N5) comprising derived and/or modified sequence from LASV(KAK-428;Clade n.d. (VII))__ANH09740__GPC (opt4)
aggagagucccgcagucggcguccagcggcucugcuuguucgugugugugucguugcaggccuuauucaagcuuaccaugggccagaucgugaccuucuuccaggaggugccccacgugaucgaggaggugaugaacaucgugcugaucgcccugagccugcuggccauccugaagggccuguacaacuucgccaccugcggcgugaucggccugaucaccuuccugcugcugugcggcagaagcugcagcgccaccuacaagggccaguacgagcugcagacccuggagcugaacauggagagccugaacaugaccaugccccugagcugcaccaagaacaacagccaccacuacaucagagccggcaacaacaccggccuggagcugacccugaccaacaccagcaucaucagccacaaguucugcaaccugagcgacgcccacaagaagaaccuguacgaccacacccugaugagcaucaucaccaccuuccaccugagcauccccaacuucaaccaguacgaggccaugagcugcgacuucaacggcggcaagaucagcauccaguacaaccugagccacagcuacgccggcgacgccgcccagcacugcggcaccguggccaacggcgugcugcagaccuucaugagaauggccuggggcggcagcuaccuggcccuggacagcggcagaagaggcugggacugcaucaucagcagcuaccaguaccugaucauccagaacaccaccugggacgaccacugccaguucagcagacccagccccaucggcuaccugggcuucgugagccagaagaccagagacaucuacaucagcagaagacugcugggcaccuucaccuggacccugagcgacagcgagggccacgacaugcccggcggcuacugccugaccagauggaugcugaucgaggccgaccugaagugcuucggcaacaccgccguggccaagugcaacgagaagcacgacgaggaguucugcgacauguggagacuguucgacuucaacaagcaggccauccagagacugaaggccgaggcccagaugaacauccagcugaucaacaaggccgugaacgcccugaucaacgaccagcugaugaugaagaaccaccugagagacaucaugggcauccccuacugcaacuacagcaaguucugguaccugaacaacaccaccaccggcagaaccagccugcccagaugcuggcugaucagcaacggcagcuaccugaacgagacccacuucagcgacgacaucgagcagcaggccgacaacaugaucaccgagaugcugcagaaggaguacauggacagacagggcaagaccccccugggccugguggaccuguucguguucagcaccagcuucuaccugaucaccaucuuccugcaccuggugaagauccccacccacagacacaucgugggcaagcccugccccaagccccacagacugaaccacaugggcaucugcagcugcggccuguacaagcagcccggcgugcccgugagauggaagagaugaggacuaguaauaaggaaacuguaugaaugucugugggcaggaagugaagagauccuucuguaaagguuuuuggaauuaugucugcugaauaauaaacuuuuuugaaauaauaaaucugguagaaaaaugagaucucaaaggcucuuuucagagccaccaaaaaaaaaaaaaaaaaaaaaaaaaaaaaaaaaaaaaaaaaaaaaaaaaaaaaaaaaaaaaaaaagaauu

SEQ ID NO: 14671 - RNA, 1778 nt, Artificial Sequence; identical to SEQ ID NO: 14665
  mRNA product Design b-4 (hSL-A64-N5) comprising derived and/or modified sequence from LASV(Pinneo-NIG-1969;Clade I)__AIT17836__GPC (opt4)

SEQ ID NO: 14672 - RNA, 1778 nt, Artificial Sequence
  mRNA product Design b-4 (hSL-A64-N5) comprising derived and/or modified sequence from LASV(ISTH0009-NIG-2011;Clade II)__AIT17404__GPC (opt4)
aggagagucccgcagucggcguccagcggcucugcuuguucgugugugugucguugcaggccuuauucaagcuuaccaugggccagaucaucaccuucuuccaggaggugccccacgugaucgaggaggugaugaacaucgugcugaucgcccugagccugcuggccauccugaagggcaucuacaacguggccaccugcggccuguucggccuggugagcuuccugcugcugugcggcagaagcugcagcaccaccuacaagggcguguacgagcugcagacccuggagcuggacauggccagccugaacaugaccaugccccugagcugcaccaagaacaacagccaccacuacaucauggugggcaacgagaccggccuggagcugacccugaccaacaccagcaucaucaaccacaaguucugcaaccugagcgacgcccacaagaagaaccuguacgaccacgcccugaugagcaucaucagcaccuuccaccugagcauccccaacuucaaccaguacgaggccaugagcugcgacuucaacggcggcaagaucagcgugcaguacaaccugagccacgccuacgccguggacgccgccaaccacugcggcaccaucgccaacggcgugcugcagaccuucaugagaauggccuggggcggcagcuacaucgcccuggacagcggcaagggcagcugggacugcaucaugaccagcuaccaguaccugaucauccagaacaccaccugggaggaccacugccaguucagcagacccagccccaucggcuaccugggccugcugagccagagaaccagagacaucuacaucagcagaagacugcugggcaccuucaccuggacccugagcgacagcgagggcaacgagacccccggcggcuacugccugaccagauggaugcugaucgaggccgagcugaagugcuucggcaacaccgccguggccaagugcaacgagaagcacgacgaggaguucugcgacaugcugagacuguucgacuucaacaagcaggccaucagaagacugaagaccgaggcccagaugagcauccagcugaucaacaaggccgugaacgcccugaucaacgaccagcugaucaugaagaaccaccugagagacaucaugggcauccccuacugcaacuacagcaaguacugguaccugaaccacaccgugaccggcaagaccagccugcccagaugcuggcuggugagcaacggcagcuaccugaacgagacccacuucagcgacgacaucgagcagcaggccgacaacaugaucaccgagcugcugcagaaggaguacauggacagacagggcaagaccccccugggccugguggaccuguucguguucagcaccagcuucuaccugaucagcaucuuccugcaccugaucaagauccccacccacagacacaucaccggcaagcccugccccaagccccacagacugaaccacaugggcaucugcagcugcggccuguacaagcaccccggcgugcccgugaaguggaagagaugaggacuaguaauaaggaaacuguaugaaugucugugggcaggaagugaagagauccuucuguaaagguuuuuggaauuaugucugcugaauaauaaacuuuuuugaaauaauaaaucugguagaaaaaugagaucucaaaggcucuuuucagagccaccaaaaaaaaaaaaaaaaaaaaaaaaaaaaaaaaaaaaaaaaaaaaaaaaaaaaaaaaaaaaaaaaagaauu

SEQ ID NO: 14673 - RNA, 1778 nt, Artificial Sequence
  mRNA product Design b-4 (hSL-A64-N5) comprising derived and/or modified sequence from LASV(ISTH2010-NIG-2012;Clade II)__AIT17482__GPC (opt4)
aggagagucccgcagucggcguccagcggcucugcuuguucgugugugugucguugcaggccuuauucaagcuuaccaugggccagaucaucaccuucuuccaggaggugccccacgugaucgaggaggugaugaacaucgugcugaucgcccugagccugcuggccauccugaagggcaucuacaacguggccaccugcggccuguucggccuggugagcuuccugcugcugugcggcagaagcugcagcaccaccuacaagggcguguacgagcugcagacccuggagcuggacauggccagccugaacaugaccaugccccugagcugcaccaagaacaacagccaccacuacaucauggugggcaacgagaccggccuggagcugacccugaccaacaccagcaucaucaaccacaaguucugcaaccugagcgacgcccacaagaagaaccuguacgaccacgcccugaugagcaucaucagcaccuuccaccugagcauccccaacuucaaccaguacgaggccaugagcugcgacuucaacggcggcaagaucagcgugcaguacaaccugagccacgccuacgccguggacgccgccaaccacugcggcaccaucgccaacggcgugcugcagaccuucaugagaauggccuggggcggcagcuacaucgcccuggacagcggcaagggcagcugggacugcaucaugaccagcuaccaguaccugaucauccagaacaucaccugggaggaccacugccaguucagcagacccagccccaucggcuaccugggccugcugagccagagaaccagagacaucuacaucagcagaagacugcugggcaccuucaccuggacccugagcgacagcgagggcaacgagacccccggcggcuacugccugaccagauggaugcugaucgaggccgagcugaagugcuucggcaacaccgccguggccaagugcaacgagaagcacgacgaggaguucugcgacaugcugagacuguucgacuucaacaagcaggccaucagaagacugaagaccgaggcccagaugagcauccagcugaucaacaaggccgugaacgcccugaucaacgaccagcugaucaugaagaaccaccugagagacaucaugggcauccccuacugcaacuacagcaaguacugguaccugaaccacaccgugaccggcaagaccagccugcccagaugcuggcuggugagcaacggcagcuaccugaacgagacccacuucagcgacgacaucgagcagcaggccgacaacaugaucaccgagcugcugcagaaggaguacaucgacagacagggcaagaccccccugggccugguggaccuguucguguucagcaccagcuucuaccugaucagcaucuuccugcaccuggugaagauccccacccacagacacguggugggcaagcccugccccaagccccacagacugaaccacaugggcaucugcagcugcggccuguacaagcaccccggcgugcccgugaaguggaagagaugaggacuaguaauaaggaaacuguaugaaugucugugggcaggaagugaagagauccuucuguaaagguuuuuggaauuaugucugcugaauaauaaacuuuuuugaaauaauaaaucugguagaaaaaugagaucucaaaggcucuuuucagagccaccaaaaaaaaaaaaaaaaaaaaaaaaaaaaaaaaaaaaaaaaaaaaaaaaaaaaaaaaaaaaaaaaagaauu

SEQ ID NO: 14674 - RNA, 1778 nt, Artificial Sequence
  mRNA product Design b-4 (hSL-A64-N5) comprising derived and/or modified sequence from LASV(Lassa virus/H.sapiens-wt/NGA/2015/ISTH_0543;Clade II)__AVO03639__GPC (opt4)
aggagagucccgcagucggcguccagcggcucugcuuguucgugugugugucguugcaggccuuauucaagcuuaccaugggccagaucaucaccuucuuccaggaggugccccacgugaucgaggaggugaugaacaucgugcugaucgcccugagccugcuggccauccugaagggcaucuacaacguggccaccugcggccuguucggccuggugagcuuccugcugcugugcggcagaagcugcagcaccaccuacaagggcguguacgagcugcagacccuggagcuggacauggccaaccugaacaugaccaugccccugagcugcaccaagaacaacagccaccacuacaucauggugggcaacgagaccggccuggagcugacccugaccaacaccagcaucaucaaccacaaguucugcaaccugagcgacgcccacaagaagaaccuguacgaccacgcccugaugagcaucaucagcaccuuccaccugagcauccccaacuucaaccaguacgaggccaugagcugcgacuucaacggcggcaagaucagcgugcaguacaaccugagccacaccuacgccguggacgccgccaaccacugcggcaccaucgccaacggcgugcugcagaccuucaugagaauggccuggggcggcagcuacaucgcccuggacagcggcaagggcagcugggacugcaucaugaccagcuaccaguaccuggugauccagaacaccaccugggaggaccacugccaguucagcagacccagccccaucggcuaccugggccugcugagccagagaaccagagacaucuacaucagcagaagacugcugggcaccuucaccuggacccugagcgacagcgagggcaacgagacccccggcggcuacugccugaccagauggaugcugaucgaggccgagcugaagugcuucggcaacaccgccguggccaagugcaacgagaagcacgacgaggaguucugcgacaugcugagacuguucgacuucaacaagcaggccaucagaagacugaagaccgaggcccagaugagcauccagcugaucaacaaggccgugaacgcccugaucaacgaccagcugaucaugaagaaccaccugagagacaucaugggcauccccuacugcaacuacagcaaguacugguaccugaaccacaccgugaccggcaagaccagccugcccagaugcuggcuggugagcaacggcagcuaccugaacgagacccacuucagcgacgacaucgagcagcaggccgacaacaugaucaccgagcugcugcagaaggaguacaucgacagacagggcaagaccccccugggccugguggaccuguucguguucagcaccagcuucuaccugaucagcaucuuccugcaccuggugaagauccccacccacagacacaucaccggcaagcccugccccaagccccacagacugaaccacaugggcaucugcagcugcggccuguacaagcaccccggcgugcccgugaaguggaagagaugaggacuaguaauaaggaaacuguaugaaugucugugggcaggaagugaagagauccuucuguaaagguuuuuggaauuaugucugcugaauaauaaacuuuuuugaaauaauaaaucugguagaaaaaugagaucucaaaggcucuuuucagagccaccaaaaaaaaaaaaaaaaaaaaaaaaaaaaaaaaaaaaaaaaaaaaaaaaaaaaaaaaaaaaaaaaagaauu

SEQ ID NO: 14675 - RNA, 1778 nt, Artificial Sequence
  mRNA product Design b-4 (hSL-A64-N5) comprising derived and/or modified sequence from LASV(Lassa virus/H.sapiens-wt/NGA/2016/ISTH_0009;Clade II)__AVO03571__GPC (opt4)
aggagagucccgcagucggcguccagcggcucugcuuguucgugugugugucguugcaggccuuauucaagcuuaccaugggccagaucaucaccuucuuccaggaggugccccacgugaucgaggaggugaugaacaucgugcugaucgcccugagccugcuggccauccugaagggcaucuacaacguggccaccugcggccugcugggccuggugagcuuccugcugcugugcggcagaagcugcagcaccaccuacaagggcguguacgagcugcagacccuggagcuggacauggccagccugaacaugaccaugccccugagcugcaccaagaacaacagccaccacuacaucauggugggcaacgagaccggccuggagcugacccugaccaacaccagcaucaucaaccacaaguucugcaaccugagcgacgcccacaagaagaaccuguacgaccacgcccugaugagcaucaucagcaccuuccaccugagcauccccaacuucaaccaguacgaggccaugagcugcgacuucaacggcggcagaaucagcgugcaguacaaccugagccacagcuacgccguggacgccgccaaccacugcggcaccaucgccaacggcgugcugcagaccuucaugagaauggccuggggcggcagcuacaucgcccuggacagcggcaagggcagcugggacugcaucaugaccagcuaccaguaccugaucauccagaacaccaccugggaggaccacugccaguucagcagacccagccccaucggcuaccugggccugcugagccagagaaccagagacaucuacaucagcagaagacugcugggcaccuucaccuggacccugagcgacagcgagggcaacgagacccccggcggcuacugccugaccagauggaugcugaucgaggccgagcugaagugcuucggcaacaccgccguggccaagugcaacgagaagcacgacgaggaguucugcgacaugcugagacuguucgacuucaacaagcaggccaucagaagacugaagaccgaggcccagaugagcauccagcugaucaacaaggccgugaacgcccugaucaacgaccagcugaucaugaagaaccaccugagagacaucaugggcauccccuacugcaacuacagcaaguacugguaccugaaccacaccgugaccggcaagaccagccugcccagaugcuggcuggugagcaacggcagcuaccugaacgagacccacuucagcgacgacaucgagcagcaggccgacaacaugaucaccgagcugcugcagaaggaguacaucgacagacagggcaagaccccccugggccugguggaccuguucguguucagcaccagcuucuaccugaucagcaucuuccugcaccuggugaagauccccacccacagacacaucaccggcaagcccugccccaagccccacagacugaaccacaugggcaucugcagcugcggccuguacaaccaccccggcgugcccgugaaguggaagagaugaggacuaguaauaaggaaacuguaugaaugucugugggcaggaagugaagagauccuucuguaaagguuuuuggaauuaugucugcugaauaauaaacuuuuuugaaauaauaaaucugguagaaaaaugagaucucaaaggcucuuuucagagccaccaaaaaaaaaaaaaaaaaaaaaaaaaaaaaaaaaaaaaaaaaaaaaaaaaaaaaaaaaaaaaaaaagaauu

SEQ ID NO: 14676 - RNA, 1778 nt, Artificial Sequence
  mRNA product Design b-4 (hSL-A64-N5) comprising derived and/or modified sequence from LASV(Lassa virus/H.sapiens-wt/NGA/2016/ISTH_0017;Clade II)__AVO03567__GPC (opt4)
aggagagucccgcagucggcguccagcggcucugcuuguucgugugugugucguugcaggccuuauucaagcuuaccaugggccagaucaucaccuucuuccaggaggugccccacgugaucgaggaggugaugaacaucgugcugaucgcccugagccugcuggccauccugaagggcaucuacaacguggccaccugcggccuguucggccuggugagcuuccugcugcugugcggcagaagcugcagcaccaccuacaagggcguguacgagcugcagacccuggagcuggacauggccagccugaacaugaccaugccccugagcugcaccaagaacaacagccaccacuacaucauggugggcaacgagaccggccuggagcugacccugaccaacaccagcaucaucaaccacaaguucugcaaccugagcgacgcccacaagaagaaccuguacgaccacgcccugaugagcaucaucagcaccuuccaccugagcauccccaacuucaaccaguacgaggccaugagcugcgacuucaacggcggcaagaucagcgugcaguacaaccugagccacaccuacgccaucgacgccgccaaccacugcggcaccaucgccaacggcgugcugcagaccuucaugagaauggccuggggcggcagcuacaucgcccuggacagcggcaagggcagcugggacugcaucaugaccagcuaccaguaccugaucauccagaacaccaccugggaggaccacugccaguucagcagacccagccccaucggcuaccugggccugcugagccagagaaccagagacaucuacaucagcagaagacugcugggcaccuucaccuggacccugagcgacagcgagggcaacgagacccccggcggcuacugccugaccagauggaugcugaucgaggccgagcugaagugcuucggcaacaccgccguggccaagugcaacgagaagcacgacgaggaguucugcgacaugcugagacuguucgacuucaacaagcaggccaucagaagacugaagaccgaggcccagaugagcauccagcugaucaacaaggccgugaacgcccugaucaacgaccagcugaucaugaagaaccaccugagagacaucaugggcauccccuacugcaacuacagcaaguacugguaccugaaccacaccgugaccggcaagaccagccugcccagaugcuggcuggugagcaacggcagcuaccugaacgagacccacuucagcgacgacaucgagcagcaggccgacaacaugaucaccgagcugcugcagaaggaguacauggacagacagggcaagaccccccugggccugguggaccuguucguguucagcaccagcuucuaccugaucagcaucuuccugcaccuggugagaauccccacccacagacacgugaucggcaagcccugccccaagccccacagacugaaccacaugggcaucugcagcugcggccuguacaagcaccccggcgugcccgugaaguggaagagaugaggacuaguaauaaggaaacuguaugaaugucugugggcaggaagugaagagauccuucuguaaagguuuuuggaauuaugucugcugaauaauaaacuuuuuugaaauaauaaaucugguagaaaaaugagaucucaaaggcucuuuucagagccaccaaaaaaaaaaaaaaaaaaaaaaaaaaaaaaaaaaaaaaaaaaaaaaaaaaaaaaaaaaaaaaaaagaauu

SEQ ID NO: 14677 - RNA, 1778 nt, Artificial Sequence
  mRNA product Design b-4 (hSL-A64-N5) comprising derived and/or modified sequence from LASV(Lassa virus/H.sapiens-wt/NGA/2018/ISTH_0959;Clade II)__AVV65099__GPC (opt4)
aggagagucccgcagucggcguccagcggcucugcuuguucgugugugugucguugcaggccuuauucaagcuuaccaugggccagaucaucaccuucuuccaggaggugccccacgugaucgaggaggugaugaacaucgugcugaucgcccugagccugcuggccauccugaagggcaucuacaacguggugaccugcggccuguucggccuggugagcuuccugcugcugugcggcagaagcugcagcaccaccuacaagggcguguacgagcugcagacccuggagcuggacauggccagccugaacaugaccaugccccugagcugcaccaagaacaacagccaccacuacaucauggugggcaacgagaccggccuggagcugacccugaccaacaccagcaucaucaaccacaaguucugcaaccugagcgacgcccacaagaagaaccuguacgaccacgcccugaugagcaucaucagcaccuuccaccugagcauccccaacuucaaccaguacgaggccaugagcugcgacuucaacggcggcaagaucagcgugcaguacaaccugagccacgccuacgccaucgacgccgccaaccacugcggcaccaucgccaacggcgugcugcagaccuucaugagaauggccuggggcggcagcuacaucgcccuggacagcggcaagggcagcugggacugcaucaugaccagcuaccaguaccugaucauccagaacaccaccugggaggaccacugccaguucagcagacccagccccaucggcuaccugggccugcugagccagagaaccagagacaucuacaucagcagaagacugcugggcaccuucaccuggacccugagcgacagcgagggcaacgagacccccggcggcuacugccugaccagauggaugcugaucgaggccgagcugaagugcuucggcaacaccgccguggccaagugcaacgagaagcacgacgaggaguucugcgacaugcugagacuguucgacuucaacaagcaggccaucagaagacugaagaccgaggcccagaugagcauccagcugaucaacaaggccgugaacgcccugaucaacgaccagcugaucaugaagaaccaccugagagacaucaugggcauccccuacugcaacuacagcaaguacugguaccugaaccacaccgugaccggcaagaccagccugcccagaugcuggcuggugagcaacggcagcuaccugaacgagacccacuucagcgacgacaucgagcagcaggccgacaacaugaucaccgagcugcugcagaaggaguacaucgacagacagggcaagaccccccugggccugguggaccuguucguguucagcaccagcuucuaccugaucagcaucuuccugcaccuggugaagauccccacccacagacacgugaucggcaagcccugccccaagccccacagacugaaccacaugggcaucugcagcugcggccuguacaagcaccccggcgugcccgugaaguggaagagaugaggacuaguaauaaggaaacuguaugaaugucugugggcaggaagugaagagauccuucuguaaagguuuuuggaauuaugucugcugaauaauaaacuuuuuugaaauaauaaaucugguagaaaaaugagaucucaaaggcucuuuucagagccaccaaaaaaaaaaaaaaaaaaaaaaaaaaaaaaaaaaaaaaaaaaaaaaaaaaaaaaaaaaaaaaaaagaauu

SEQ ID NO: 14678 - RNA, 1778 nt, Artificial Sequence
  mRNA product Design b-4 (hSL-A64-N5) comprising derived and/or modified sequence from LASV(LASV003-NIG-2008;Clade II)__AIT17580__GPC (opt4)
aggagagucccgcagucggcguccagcggcucugcuuguucgugugugugucguugcaggccuuauucaagcuuaccaugggccagaucaucaccuucuuccaggaggugccccacgugaucgaggaggugaugaacaucgugcugaucgcccugagccugcuggccauccugaagggcaucuacaacguggccaccugcggccuguucggccuggugagcuuccugcugcugugcggcagaagcugcagcaccaccuacaagggcguguacgagcugcagacccuggagcuggacauggccagccugaacaugaccaugccccugagcugcaccaagaacaacagccaccacuacaucauggugggcaacgagaccggccuggagcugacccugaccaacaccagcaucaucaaccacaaguucugcaaccugagcgacgcccacaagaagaaccuguacgaccacgcccugaugagcaucaucagcaccuuccaccugagcauccccaacuucaaccaguacgaggccaugagcugcgacuucaacggcggcaagaucagcgugcaguacaaccugagccacaccuacgccguggacgccgccaaccacugcggcaccaucgccaacggcgugcugcagaccuucaugagaauggccuggggcggcagcuacaucgcccuggacagcggcaagggcagcugggacugcaucaugaccagcuaccaguaccugaucauccagaacaccaccugggaggaccacugccaguucagcagacccagccccaucggcuaccugggccugcugagccagagaaccagagacaucuacaucagcagaagacugcugggcaccuucaccuggacccugagcgacagcgagagcaacgagacccccggcggcuacugccugaccagauggaugcugaucgaggccgagcugaagugcuucggcaacaccgccguggccaagugcaacgagaagcacgacgaggaguucugcgacaugcugagacuguucgacuucaacaagcaggccaucagaagacugaaggccgaggcccagaugagcauccagcugaucaacaaggccgugaacgcccugaucaacgaccagcugaucaugaagaaccaccugagagacaucaugggcauccccuacugcaacuacagcaaguacugguaccugaaccacaccgugaccggcagaaccagccugcccagaugcuggcuggugagcaacggcagcuaccugaacgagacccacuucagcgacgacaucgagcagcaggccgacaacaugaucaccgagcugcugcagaaggaguacauggacagacagggcaagaccccccugggccugguggaccuguucguguucagcaccagcuucuaccugaucagcaucuuccugcaccuggugaagauccccacccacagacacgugaucggcaagcccugccccaagccccacagacugaaccacaugggcaucugcagcugcggccuguacaagcaccccggcgugcccgugaaguggaagagaugaggacuaguaauaaggaaacuguaugaaugucugugggcaggaagugaagagauccuucuguaaagguuuuuggaauuaugucugcugaauaauaaacuuuuuugaaauaauaaaucugguagaaaaaugagaucucaaaggcucuuuucagagccaccaaaaaaaaaaaaaaaaaaaaaaaaaaaaaaaaaaaaaaaaaaaaaaaaaaaaaaaaaaaaaaaaagaauu

SEQ ID NO: 14679 - RNA, 1778 nt, Artificial Sequence
  mRNA product Design b-4 (hSL-A64-N5) comprising derived and/or modified sequence from LASV(LASV035-NIG-2009;Clade II)__AIT17588__GPC (opt4)
aggagagucccgcagucggcguccagcggcucugcuuguucgugugugugucguugcaggccuuauucaagcuuaccaugggccagaucaucaccuucuuccaggaggugccccacgugaucgaggaggugaugaacaucgugcugaucgcccugagccugcuggccauccugaagggcaucuacaacguggccaccugcggccuguucggccuggugagcuuccugcugcugugcggcagaagcugcagcaccaccuacaagggcguguacgagcugcagacccuggagcuggacauggccagccugaacaugaccaugccccugagcugcaccaagaacaacagccaccacuacaucauggugggcaacgagaccggccuggagcugacccugaccaacaccagcaucaucaaccacaaguucugcaaccugagcgacgcccacaagaagaaccuguacgaccacgcccugaugagcaucaucagcaccuuccaccugagcauccccaacuucaaccaguacgaggccaugagcugcgacuucaacggcggcaagaucagcgugcaguacaaccugagccacgccuacgccguggacgccgccaaccacugcggcaccaucgccaacggcgugcugcagaccuucaugagaauggccuggggcggcagcuacaucgcccuggacagcggcaagggcagcugggacugcaucaugaccagcuaccaguaccugaucauccagaacaccaccugggaggaccacugccaguucagcagacccagccccaucggcuaccugggccugcugagccagagaaccagagacaucuacaucagcagaagacugcugggcaccuucaccuggacccugagcgacagcgagggcaacgagacccccggcggcuacugccugaccagauggaugcugaucgaggccgagcugaagugcuucggcaacaccgccguggccaagugcaacgagaagcacgacgaggaguucugcgacaugcugagacuguucgacuucaacaagcaggccaucagaagacugaaggccgaggcccagaugagcauccagcugaucaacaaggccgugaacgcccugaucaacgaccagcugaucaugaagaaccaccugagagacaucaugggcauccccuacugcaacuacagcaaguacugguaccugaaccacaccgugaccggcaagaccagccugcccagaugcuggcuggugagcaacggcagcuaccugaacgagacccacuucagcgacgacaucgagcagcaggccgacaacaugaucaccgagcugcugcagaaggaguacaucgacagacagggcaagaccccccugggccugguggaccuguucguguucagcaccagcuucuaccugaucagcaucuuccugcaccuggugaagauccccacccacagacacgugaucggcaagcccugccccaagccccacagacugaaccacaugggcaucugcagcugcggccuguacaagcaccccggcgugcccgugaaguggaagagaugaggacuaguaauaaggaaacuguaugaaugucugugggcaggaagugaagagauccuucuguaaagguuuuuggaauuaugucugcugaauaauaaacuuuuuugaaauaauaaaucugguagaaaaaugagaucucaaaggcucuuuucagagccaccaaaaaaaaaaaaaaaaaaaaaaaaaaaaaaaaaaaaaaaaaaaaaaaaaaaaaaaaaaaaaaaaagaauu

SEQ ID NO: 14680 - RNA, 1778 nt, Artificial Sequence
  mRNA product Design b-4 (hSL-A64-N5) comprising derived and/or modified sequence from LASV(LASV1000-NIG-2009;Clade II)__AIT17782__GPC (opt4)
aggagagucccgcagucggcguccagcggcucugcuuguucgugugugugucguugcaggccuuauucaagcuuaccaugggccagaucaucaccuucuuccaggaggugccccacgugaucgaggaggugaugaacaucgugcugaucgcccugagccugcuggccauccugaagggcaucuacaacguggccaccugcggccuguucggccuggugagcuuccugcugcugugcggcagaagcugcagcaccaccuacaagggcguguacgagcugcagacccuggagcuggacauggccagccugaacaugaccaugccccugagcugcaccaagaacaacagccaccacuacaucauggugggcaacgagaccggccuggagcugacccugaccaacaccagcaucaucaaccacaaguucugcaaccugagcgacgcccacaagaagaaccuguacgaccacgcccugaugagcaucaucagcaccuuccaccugagcauccccaacuucaaccaguacgaggccaugagcugcgacuucaacggcggcaagaucagcgugcaguacaaccugagccacaccuacgccguggacgccgccaaccacugcggcaccaucgccaacggcgugcugcagaccuucaugagaauggccuggggcggcagcuacaucgcccuggacagcggcaagggcagcugggacugcaucaugaccagcuaccaguaccugaucauccagaacaccaccugggaggaccacugccaguucagcagacccagccccaucggcuaccugggccugcugagccagagaaccagagacaucuacaucagcagaagacugcugggcaccuucaccuggacccugagcgacagcgagggcaacgagacccccggcggcuacugccugaccagauggaugcugaucgaggccgagcugaagugcuucggcaacaccgccguggccaagugcaacgagaagcacgacgaggaguucugcgacaugcugagacuguucgacuucaacaagcaggccaucaagagacugaagaccgaggcccagaugagcauccagcugaucaacaaggccgugaacgcccugaucaacgaccagcugaucaugaagaaccaccugagagacaucaugggcauccccuacugcaacuacagcaaguacugguaccugaaccacaccgugaccggcaagaccagccugcccagaugcuggcuggugagcaacggcagcuaccugaacgagacccacuucagcgacgacaucgagcagcaggccgacaacaugaucaccgagcugcugcagaaggaguacaucgacagacagggcaagaccccccugggccugguggaccuguucguguucagcaccagcuucuaccugaucagcaucuuccugcaccuggugaagauccccacccacagacacguggugggcaagcccugccccaagccccacagacugaaccacaugggcaucugcagcugcggccuguacaagcaccccggcgugcccgugaaguggaagagaugaggacuaguaauaaggaaacuguaugaaugucugugggcaggaagugaagagauccuucuguaaagguuuuuggaauuaugucugcugaauaauaaacuuuuuugaaauaauaaaucugguagaaaaaugagaucucaaaggcucuuuucagagccaccaaaaaaaaaaaaaaaaaaaaaaaaaaaaaaaaaaaaaaaaaaaaaaaaaaaaaaaaaaaaaaaaagaauu

SEQ ID NO: 14681 - RNA, 1778 nt, Artificial Sequence
  mRNA product Design b-4 (hSL-A64-N5) comprising derived and/or modified sequence from LASV(LASV221-NIG-2010;Clade II)__AIT17624__GPC (opt4)
aggagagucccgcagucggcguccagcggcucugcuuguucgugugugugucguugcaggccuuauucaagcuuaccaugggccagaucaucaccuucuuccaggaggugccccacgugaucgaggaggugaugaacaucgugcugaucgcccugagccugcuggccauccugaagggcaucuacaacguggccaccugcggccuguucggccuggugagcuuccugcugcugugcggcagaagcugcagcaccaccuacaagggcguguacgagcugcagacccuggagcuggacauggccagccugaacaugaccaugccccugagcugcaccaagaacaacagccaccacuacaucauggugggcaacgagaccggccuggagcugacccugaccaacaccagcaucaucaaccacaaguucugcaaccugagcgacgcccacaagaagaaccuguacgaccacgcccugaugagcaucaucagcaccuuccaccugagcauccccaacuucaaccaguacgaggccaugagcugcgacuucaacggcggcaagaucagcgugcaguacaaccugagccacaccuacgccaucgacgccgccaaccacugcggcaccaucgccaacggcgugcugcagaccuucaugagaauggccuggggcggcagcuacaucgcccuggacagcggcaagggcagcugggacugcaucaugaccagcuaccaguaccugaucauccagaacaccaccugggaggaccacugccaguucagcagacccagccccaucggcuaccugggccugcugagccagagaaccagagacaucuacaucagcagaagacugcugggcaccuucaccuggacccugagcgacagcgagggcaacgagacccccggcggcuacugccugaccagauggaugcugaucgaggccgagcugaagugcuucggcaacaccgccguggccaagugcaacgagaagcacgacgaggaguucugcgacaugcugagacuguucgacuucaacaagcaggccaucagaagacugaagaccgaggcccagaugagcauccagcugaucaacaaggccgugaacgcccugaucaacgaccagcugaucaugaagaaccaccugagagacaucaugggcauccccuacugcaacuacagcaaguacugguaccugaaccacaccgugaccggcaagaccagccugcccagaugcuggcuggugagcaacggcagcuaccugaacgagacccacuucagcgacgacaucgagcagcaggccgacaacaugaucaccgagaugcugcagaaggaguacauggacagacagggcaagaccccccugggccugguggaccuguucguguucagcaccagcuucuaccugaucagcaucuuccugcaccuggugaagauccccacccacagacacgugaucggcaagcccugccccaagccccacagacugaaccacaugggcaucugcagcugcggccuguacaagcaccccggcgugcccgugaaguggaagagaugaggacuaguaauaaggaaacuguaugaaugucugugggcaggaagugaagagauccuucuguaaagguuuuuggaauuaugucugcugaauaauaaacuuuuuugaaauaauaaaucugguagaaaaaugagaucucaaaggcucuuuucagagccaccaaaaaaaaaaaaaaaaaaaaaaaaaaaaaaaaaaaaaaaaaaaaaaaaaaaaaaaaaaaaaaaaagaauu

SEQ ID NO: 14682 - RNA, 1778 nt, Artificial Sequence
  mRNA product Design b-4 (hSL-A64-N5) comprising derived and/or modified sequence from LASV(LASV237-NIG-2010;Clade II)__AIT17638__GPC (opt4)
aggagagucccgcagucggcguccagcggcucugcuuguucgugugugugucguugcaggccuuauucaagcuuaccaugggccagaucaucaccuucuuccaggaggugccccacgugaucgaggaggugaugaacaucgugcugaucgcccugagccugcuggccauccugaagggcaucuacaacguggccaccugcggccuguucggccuggugagcuuccugcugcugugcggcagaagcugcagcaccaccuacaagggcguguacgagcugcagacccuggagcuggacauggccagccugaacaugaccaugccccugagcugcaccaagaacaacagccaccacuacaucauggugggcaacgagaccggccuggagcugacccugaccaacaccagcaucaucaaccacaaguucugcaaccugagcgacgcccacaagaaggaccuguacgaccacgcccugaugagcaucaucagcaccuuccaccugagcauccccaacuucaaccaguacgaggccaugagcugcgacuucaacggcggcaagaucagcgugcaguacaaccugagccacaccuacgccguggacgccgccaaccacugcggcaccaucgccaacggcgugcugcagaccuucaugagaauggccuggggcggcagcuacaucgcccuggacagcggcaagggcagcugggacugcaucaugaccagcuaccaguaccugaucauccagaacaccaccugggaggaccacugccaguucagcagacccagccccaucggcuaccugggccugcugagccagagaaccagagacaucuacaucagcagaagacugcugggcaccuucaccuggacccugagcgacagcgagggcaacgagacccccggcggcuacugccugaccagauggaugcugaucgaggccgagcugaagugcuucggcaacaccgccguggccaagugcaacgagaagcacgacgaggaguucugcgacaugcugagacuguucgacuucaacaagcaggccaucagaagacugaagaccgaggcccagaugagcauccagcugaucaacaaggccgugaacgcccugaucaacgaccagcugaucaugaagaaccaccugagagacaucaugggcauccccuacugcaacuacagcaaguacugguaccugaaccacaccgugaccggcaagaccagccugcccagaugcuggcuggugagcaacggcagcuaccugaacgagacccacuucagcgacgacaucgagcagcaggccgacaacaugaucaccgagcugcugcagaaggaguacauggacagacagggcaagaccccccugggccugguggaccuguucguguucagcaccagcuucuaccugaucagcaucuuccugcaccugaucaagauccccacccacagacacaucaccggcaagcccugccccaagccccacagacugaaccacaugggcaucugcagcugcggccuguacaagcaccccggcgugcccgugaaguggaagagaugaggacuaguaauaaggaaacuguaugaaugucugugggcaggaagugaagagauccuucuguaaagguuuuuggaauuaugucugcugaauaauaaacuuuuuugaaauaauaaaucugguagaaaaaugagaucucaaaggcucuuuucagagccaccaaaaaaaaaaaaaaaaaaaaaaaaaaaaaaaaaaaaaaaaaaaaaaaaaaaaaaaaaaaaaaaaagaauu

SEQ ID NO: 14683 - RNA, 1778 nt, Artificial Sequence
  mRNA product Design b-4 (hSL-A64-N5) comprising derived and/or modified sequence from LASV(LASV253-NIG-2011;Clade II)__AIT17670__GPC (opt4)
aggagagucccgcagucggcguccagcggcucugcuuguucgugugugugucguugcaggccuuauucaagcuuaccaugggccagaucaucaccuucuuccaggaggugccccacgugaucgaggaggugaugaacaucgugcugaucgcccugagccugcuggccauccugaagggcaucuacaacguggccaccugcggccuguucggccuggugagcuuccugcugcugugcggcagaagcugcagcaccaccuacaagggcguguacgagcugcagacccuggagcuggacauggccagccugaacaugaccaugccccugagcugcaccaagaacaacagccaccacuacaucauggugggcaacgagaccggccuggagcugacccugaccaacaccagcaucaucaaccacaaguucugcaaccugagcgacgcccacaagaagaaccuguacgaccacgcccugaugagcaucaucagcaccuuccaccugagcauccccaacuucaaccaguacgaggccaugagcugcgacuucaacggcggcaagaucagcgugcaguacaaccugagccacaccuacgccguggacgccgccaaccacugcggcaccaucgccaacggcgugcugcagaccuucaugagaauggccuggggcggcagcuacaucgcccuggacagcggcaagggcagcugggacugcaucaugaccagcuaccaguaccugaucauccagaacaccaccugggaggaccacugccaguucagcagacccagccccaucggcuaccugggccugcugagccagagaaccagagacaucuacaucagcagaagacugcugggcaccuucaccuggacccugagcgacagcgagggcaacgagacccccggcggcuacugccugaccagauggaugcugaucgaggccgagcugaagugcuucggcaacaccgccguggccaagugcaacgagaagcacgacgaggaguucugcgacaugcugagacuguucgacuucaacaagcaggccaucagaagacugaaggccgaggcccagaugagcauccagcugaucaacaaggccgugaacgcccugaucaacgaccagcugaucaugaagaaccaccugagagacaucaugggcauccccuacugcaacuacagcaaguacugguaccugaaccacaccgugaccggcagaaccagccugcccagaugcuggcuggugagcaacggcagcuaccugaacgagacccacuucagcgacgacaucgagcagcaggccgacaacaugaucaccgagcugcugcagaaggaguacaucgacagacagggcaagaccccccugggccugguggaccuguucguguucagcaccagcuucuaccugaucagcaucuuccugcaccuggugaagauccccacccacagacacaucaucggcaagcccugccccaagccccacagacugaaccacaugggcaucugcagcugcggccuguacaagcaccccggcgugcccgugaaguggaagagaugaggacuaguaauaaggaaacuguaugaaugucugugggcaggaagugaagagauccuucuguaaagguuuuuggaauuaugucugcugaauaauaaacuuuuuugaaauaauaaaucugguagaaaaaugagaucucaaaggcucuuuucagagccaccaaaaaaaaaaaaaaaaaaaaaaaaaaaaaaaaaaaaaaaaaaaaaaaaaaaaaaaaaaaaaaaaagaauu

SEQ ID NO: 14684 - RNA, 1778 nt, Artificial Sequence
  mRNA product Design b-4 (hSL-A64-N5) comprising derived and/or modified sequence from LASV(LASV254-NIG-2011;Clade II)__AIT17674__GPC (opt4)
aggagagucccgcagucggcguccagcggcucugcuuguucgugugugugucguugcaggccuuauucaagcuuaccaugggccagaucaucaccuucuuccaggaggugccccacgugaucgaggaggugaugaacaucgugcugaucgcccugagccugcuggccauccugaagggcaucuacaacguggccaccugcggccuguucggccuggugagcuuccugcugcugugcggcagaagcugcagcaccaccuacaagggcguguacgagcugcagacccuggagcuggacaugaccaaccugaacaugaccaugccccugagcugcaccaagaacaacagccaccacuacaucauggugggcaacgagaccggccuggagcugacccugaccaacaccagcaucaucaaccacaaguucugcaaccugagcgacgcccacaagaagaaccuguacaaccacgcccugaugagcaucaucagcaccuuccaccugagcauccccaacuucaaccaguacgaggccaugagcugcgacuucaacggcggcaagaucagcgugcaguacaaccugagccacagcuacgccguggacgccgccaaccacugcggcaccaucgccaacggcgugcugcagaccuucaugagaauggccuggggcggcagcuacaucgcccuggacagcggcaagggcaacugggacugcaucaugaccagcuaccaguaccugaucauccagaacaccaccugggaggaccacugccaguucagcagacccagccccaucggcuaccugggccugcugagccagagaaccagagacaucuacaucagcagaagacugcugggcaccuucaccuggacccugagcgacagcgagggcaacgagacccccggcggcuacugccugaccagauggaugcugaucgaggccgagcugaagugcuucggcaacaccgccguggccaagugcaacgagaagcacgacgaggaguucugcgacaugcugagacuguucgacuucaacaagcaggccaucagaagacugaagaccgaggcccaggccaacauccagcugaucaacaaggccgugaacgcccugaucaacgaccagcugaucaugaagaaccaccugagagacaucaugggcauccccuacugcaacuacagcaaguacugguaccugaaccacaccgugaccggcaagaccagccugcccagaugcuggcuggugagcaacggcagcuaccugaacgagacccacuucagcgacgacaucgagcagcaggccgacaacaugaucaccgagcugcugcagaaggaguacauggacagacagggcaagaccccccugggccugguggaccuguucguguucagcaccagcuucuaccugaucagcaucuuccugcaccuggugaagauccccacccacagacacgugaucggcaagcccugccccaagccccacagacugaaccacaugggcaucugcagcugcggccuguacaagcaccccggcgugcccgugaaguggaagagaugaggacuaguaauaaggaaacuguaugaaugucugugggcaggaagugaagagauccuucuguaaagguuuuuggaauuaugucugcugaauaauaaacuuuuuugaaauaauaaaucugguagaaaaaugagaucucaaaggcucuuuucagagccaccaaaaaaaaaaaaaaaaaaaaaaaaaaaaaaaaaaaaaaaaaaaaaaaaaaaaaaaaaaaaaaaaagaauu

SEQ ID NO: 14685 - RNA, 1778 nt, Artificial Sequence
  mRNA product Design b-4 (hSL-A64-N5) comprising derived and/or modified sequence from LASV(Nig08-A19;Clade III)__ADU56618__GPC (opt4)
aggagagucccgcagucggcguccagcggcucugcuuguucgugugugugucguugcaggccuuauucaagcuuaccaugggccagaucgugaccuucuuccaggaggugccccacgugaucgaggaggugaugaacaucgugcugaucgcccugagcauccuggccauccugaagggccuguacaacaucgccaccugcggccugaucggccuggugaccuuccugcugcugagcggcagaagcugcagcaugaccuacaagggcguguacgagcugcagacccuggagcugaacaugaacacccugaacaugaccaugccccugagcugcaccaagaacaacagccaccacuacaucauggugggcaacgagaccggccuggagcugacccugaccaacaccagccugcugcaccacaaguucugcaaccugagcgacgcccacaagaagaaccuguacgaccacacccugaugagcaucaucagcaccuuccaccugagcauccccaacuucaaccaguacgaggccaugagcugcgacuucaacggcggcaagaucaccgugcaguacaaccugagccacagcuacgccaucgacgccgccaaccacugcggcaccguggccaacggcgugcugcagaccuucaugagaauggccuggggcggcagcuacaucgcccuggacagcggcagaggcaagugggacugcaucaugaccagcuaccaguaccugaucauccagaacaccaccugggaggaccacugccaguucagcagacccagccccaucggcuaccugggccugcugagccagagaaccagagacaucuacaucagcagaagacugcugggcaccuucaccuggacccugagcgacagcgagggcaacgagacccccggcggcuacugccugaccagauggaugcugaucgaggccgagcugaagugcuucggcaacaccgccguggccaagugcaacgagaagcacgacgaggaguucugcgacaugcugagacuguucgacuucaacaagcaggccaucagaagacugaaggccgaggcccagaugagcauccagcugaucaacaaggccgugaacgcccugaucaacgaccagcugaucaugaagaaccaccugagagacaucaugggcauccccuacugcaacuacagcaaguacugguaccugaaccacaccagcaccggcagaaccagccugcccagaugcuggcuggugagcaacggcagcuaccugaacgagacccacuucagcgacgacaucgagcagcaggccgacaacaugaucaccgagaugcugcagaaggaguaccuggacagacagggcaagaccccccugggccugguggaccuguucguguucagcaccagcuucuaccugaucagcaucuuccugcaccuggugaagauccccacccacagacacaucgugggcaagcccugccccaagccccacagacugaaccacaugggcaucugcagcugcggccuguacaagcagcccggcgugcccgugagauggaagagaugaggacuaguaauaaggaaacuguaugaaugucugugggcaggaagugaagagauccuucuguaaagguuuuuggaauuaugucugcugaauaauaaacuuuuuugaaauaauaaaucugguagaaaaaugagaucucaaaggcucuuuucagagccaccaaaaaaaaaaaaaaaaaaaaaaaaaaaaaaaaaaaaaaaaaaaaaaaaaaaaaaaaaaaaaaaaagaauu

SEQ ID NO: 14686 - RNA, 1781 nt, Artificial Sequence
  mRNA product Design b-4 (hSL-A64-N5) comprising derived and/or modified sequence from LASV(G1180-SLE-2010;Clade IV)__AIT17168__GPC (opt4)
aggagagucccgcagucggcguccagcggcucugcuuguucgugugugugucguugcaggccuuauucaagcuuaccaugggccagaucgugaccuucuuccaggaggugccccacgugaucgaggaggugaugaacaucgugcugaucgcccugagcauccuggccgugcugaagggccuguacaacuucgccaccugcggccuggugggccugcugaccuuccugcugcugugcggcagaagcugcaccgccagcagauacaagggcguguacgagcugcagacccuggagcugaacauggagacccugaacaugaccaugccccugagcugcaccaagaacaacagccaccacuacaucauggugggcaacgagaccggccuggagcugacccugaccaacaccagcaucaucaaccacaaguucugcaaccugagcgacgcccacaagaagaaccuguacgaccacgcccugaugagcaucaucagcaccuuccaccugagcauccccaacuucaaccaguacgaggccaugagcugcgacuucaacggcggcaagaucagcgugcaguacaaccugagccacagcuacgccggcgacgccgccaaccacugcggcaccguggccaacggcgugcugcagaccuucaugagaauggccuggggcggcagcuacaucgcccuggacagcggccacggcagcugggacugcaucaugaccagcuaccaguaccugaucauccagaacaccaccugggaggaccacugccaguucagcagacccagccccaucggcuaccugggccugcugagccagagaaccagagacaucuacaucagcagaagacugcugggcaccuucaccuggacccugagcgacagcgagggcaaggacacccccggcggcuacugccugaccagauggaugcugaucgaggccgagcugaagugcuucggcaacaccgccguggccaagugcaacgagaagcacgacgaggaguucugcgacaugcugagacuguucgacuucaacaagcaggccauccagagacugaaggccgaggcccagaugagcauccagcugaucaacaaggccgugaacgcccugaucaacgaccagcugaucaugaagaaccaccugagagacaucaugggcauccccuacugcaacuacagcaaguacugguaccugaaccacaccaccaccggcaagaccagccugcccaagugcuggcuggugagcaacggcagcuaccugaacgagacccacuucagcgacgacaucgagcagcaggccgacaacaugaucaccgagaugcugcagaaggaguacauggagagacagggcaagaccccccugggccugguggaccuguucguguucagcaccagcuucuaccugaucagcaucuuccugcaccuggugaagauccccacccacagacacaucgugggcaagagcugccccaagccccacagacugaaccacaugggcaucugcagcugcggccuguacaagcagcccggcgugcccgugaaguggaagagaugaggacuaguaauaaggaaacuguaugaaugucugugggcaggaagugaagagauccuucuguaaagguuuuuggaauuaugucugcugaauaauaaacuuuuuugaaauaauaaaucugguagaaaaaugagaucucaaaggcucuuuucagagccaccaaaaaaaaaaaaaaaaaaaaaaaaaaaaaaaaaaaaaaaaaaaaaaaaaaaaaaaaaaaaaaaaagaauu

SEQ ID NO: 14687 - RNA, 1781 nt, Artificial Sequence
  mRNA product Design b-4 (hSL-A64-N5) comprising derived and/or modified sequence from LASV(G1442-SLE-2011;Clade IV)__AIT17180__GPC (opt4)
aggagagucccgcagucggcguccagcggcucugcuuguucgugugugugucguugcaggccuuauucaagcuuaccaugggccagaucgugaccuucuuccaggaggugccccacgugaucgaggaggugaugaacaucgugcugaucgcccugagcauccuggccgugcugaagggccuguacaacguggccaccugcggccugaucggccuggugaccuuccugcugcugugcggcagaagcugcaccaccacccuguacaagggcguguacgagcugcagacccuggagcugaacauggagacccugaacaugaccaugccccugagcugcaccaagaacaacagccaccacuacaucagagugggcaacgagaccggccuggagcugacccugaccaacaccagcaucaucaaccacaaguucugcaaccugagcgacgcccacaagaagaaccuguacgaccacgcccugaugagcaucaucagcaccuuccaccugagcauccccaacuucaaccaguacgaggccaugagcugcgacuucaacggcggcaagaucagcgugcaguacaaccugagccacagcuacgccggcgacgccgccaaccacugcggcaccguggccaacggcgugcugcagaccuucaugagaauggccuggggcggcagcuacaucgcccuggacagcggcagaggcaacugggacugcaucaugaccagcuaccaguaccugaucauccagaacaccaccugggacgaccacugccaguucagcagacccagccccaucggcuaccugggccugcugagccagagaaccagagacguguacaucagcagaagacugcugggcaccuucaccuggacccugagcgacagcgagggcaaggacacccccggcggcuacugccugaccagauggaugcugaucgaggccgagcugaagugcuucggcaacaccgccguggccaagugcaacgagaagcacgacgaggaguucugcgacaugcugagacuguucgacuucaacaagcaggccauccagagacugaaggccgaggcccagaugagcauccagcugaucaacaaggccgugaacgcccugaucaacgaccagcugaucaugaagaaccaccugagagacaucaugggcauccccuacugcaacuacagcaaguacugguaccugaacaacaccgccaccggcaagaccagccugcccaagugcuggcugaucagcaacggcagcuaccugaacgagacccacuucagcgacgacaucgagcaggaggccgacaacaugaucaccgagaugcugcagaaggaguacauggagagacagggcaagaccccccugggccugguggaccuguucguguucagcaccagcuucuaccugaucagcaucuuccugcaccuggugaagauccccacccacagacacaucgugggcaagagcugccccaagccccacagacugaaccacaugggcaucugcagcugcggccuguacaagcagcccggcgugcccgugagauggaagagaugaggacuaguaauaaggaaacuguaugaaugucugugggcaggaagugaagagauccuucuguaaagguuuuuggaauuaugucugcugaauaauaaacuuuuuugaaauaauaaaucugguagaaaaaugagaucucaaaggcucuuuucagagccaccaaaaaaaaaaaaaaaaaaaaaaaaaaaaaaaaaaaaaaaaaaaaaaaaaaaaaaaaaaaaaaaaagaauu

SEQ ID NO: 14688 - RNA, 1781 nt, Artificial Sequence
  mRNA product Design b-4 (hSL-A64-N5) comprising derived and/or modified sequence from LASV(G3010-SLE-2013;Clade IV)__AIT17344__GPC (opt4)
aggagagucccgcagucggcguccagcggcucugcuuguucgugugugugucguugcaggccuuauucaagcuuaccaugggccagaucgugaccuucuuccaggaggugccccacgugaucgaggaggugaugaacaucgugcugaucgcccugagcauccuggccgugcugaagggccuguacaacuucgccaccugcggccuggugggccuggugaccuuccugcugcugugcggcagaagcugcaccaccagccuguacaagggcguguacgagcugcagacccuggagcugaacauggagacccugaacaugaccaugccccugagcugcaccaagaacaacagccaccacuacaucauggugggcaacgagaccggccuggagcugacccugaccaacaccagcaucaucaaccacaaguucugcaaccugagcgacgcccacaagaagaaccuguacaaccacgcccugaugagcaucaucagcaccuuccaccugagcauccccaacuucaaccaguacgaggccaugagcugcgacuucaacggcggcaagaucagcgugcaguacaaccugagccacagcuacgccggcgacgccgccagccacugcggcaccguggccaacggcgugcugcagaccuucaugagaauggccuggggcggcagcuacaucgcccuggacagcggcuacggcaagugggacugcaucaugaccagcuaccaguaccugaucauccagaacaccaccugggaggaccacugccaguucagcagacccagccccaucggcuaccugggccugcugagccagagaaccagagacaucuacaucagcagaagacugcugggcaccuucaccuggacccugagcgacagcgagggcaaggacacccccggcggcuacugccugaccagauggaugcugaucgaggccgagcugaagugcuucggcaacaccgccguggccaagugcaacgagaagcacgacgaggaguucugcgacaugcugagacuguucgacuucaacaagcaggccauccagagacugaagaccgaggcccagaugagcauccagcugaucaacaaggccgugaacgcccugaucaacgaccagcugaucaugaagaaccaccugagagacaucaugggcauccccuacugcaacuacagcaaguacugguaccugaaccacaccaccaccggcaagaccagccugcccaagugcuggcuggugagcaacggcagcuaccugaacgagacccacuucagcgacgacaucgagcagcaggccgacaacaugaucaccgagaugcugcagaaggaguacauggagagacagggcaagaccccccugggccugguggaccuguucguguucagcaccagcuucuaccugaucagcaucuuccugcaccuggugaagauccccacccacagacacaucgugggcaagagcugccccaagccccacagacugaaccacaugggcaucugcagcugcggccuguacaagcagcccggcgugcccgugagauggaagagaugaggacuaguaauaaggaaacuguaugaaugucugugggcaggaagugaagagauccuucuguaaagguuuuuggaauuaugucugcugaauaauaaacuuuuuugaaauaauaaaucugguagaaaaaugagaucucaaaggcucuuuucagagccaccaaaaaaaaaaaaaaaaaaaaaaaaaaaaaaaaaaaaaaaaaaaaaaaaaaaaaaaaaaaaaaaaagaauu

SEQ ID NO: 14689 - RNA, 1781 nt, Artificial Sequence
  mRNA product Design b-4 (hSL-A64-N5) comprising derived and/or modified sequence from LASV(G502-SLE-2009;Clade IV)__AIT17126__GPC (opt4)
aggagagucccgcagucggcguccagcggcucugcuuguucgugugugugucguugcaggccuuauucaagcuuaccaugggccagaucgugaccuucuuccaggaggugccccacgugaucgaggaggugaugaacaucgugcugaucgcccugagcauccuggccgugcugaagggccuguacaacuucgccaccugcggccuggugggccugcugaccuuccugcugcugugcggcagaagcugcaccaccggccuguacaagggcguguacgagcugcagacccuggagcugaacauggagacccugaacaugaccaugccccugagcugcaccaagaacaacagccaccacuacaucauggugggcaacgagaccggccuggagcugacccugaccaacaccagcaucaucaaccacaaguucugcaaccugagcgacgcccacaagaagaaccuguacgaccacgcccugaugagcaucaucagcaccuuccaccugagcauccccaacuucaaccaguacgaggccaugagcugcgacuucaacggcggcaagaucagcgugcaguacaaccugagccacagcuacgccggcgacgccgccgaccacugcggcaccguggccaacggcgugcugcagaccuucaugagaauggccuggggcggcagcuacaucgcccuggacagcggcagaggcagaugggacugcaucaugaccagcuaccaguaccugaucauccagaacaccaccugggaggaccacugccaguucagcagacccagccccaucggcuaccugggccugcugagccagagaaccagagacaucuacaucagcagaagacugcugggcaccuucaccuggacccugagcgacagcgagggcaaggacacccccggcggcuacugccugaccagauggaugcugaucgaggccgagcugaagugcuucggcaacaccgccguggccaagugcaacgagaagcacgacgaggaguucugcgacaugcugagacuguucgacuucaacaagcaggccauccagagacugaaggccgaggcccagaugagcauccagcugaucaacaaggccgugaacgcccugaucaacgaccagcuggugaugaagaaccaccugagagacaucaugggcauccccuacugcaacuacagcagauacugguaccugaaccacaccaccaccggcagaaccagccugcccaagugcuggcuggugagcaacggcagcuaccugaacgagacccacuucagcgacgacaucgagcagcaggccgacaacaugaucaccgagaugcugcagaaggaguacauggagagacagggcaagaccccccugggccugguggaccuguucguguucagcaccagcuucuaccugaucagcaucuuccugcaccuggugaagauccccacccacagacacaucgugggcaagagcugccccaagccccacagacugaaccacaugggcaucugcagcugcggccuguacaagcagcccggcgugcccgugaaguggaagagaugaggacuaguaauaaggaaacuguaugaaugucugugggcaggaagugaagagauccuucuguaaagguuuuuggaauuaugucugcugaauaauaaacuuuuuugaaauaauaaaucugguagaaaaaugagaucucaaaggcucuuuucagagccaccaaaaaaaaaaaaaaaaaaaaaaaaaaaaaaaaaaaaaaaaaaaaaaaaaaaaaaaaaaaaaaaaagaauu

SEQ ID NO: 14690 - RNA, 1781 nt, Artificial Sequence
  mRNA product Design b-4 (hSL-A64-N5) comprising derived and/or modified sequence from LASV(G733-SLE-2010;Clade IV)__AIT17154__GPC (opt4)
aggagagucccgcagucggcguccagcggcucugcuuguucgugugugugucguugcaggccuuauucaagcuuaccaugggccagaucgugaccuucuuccaggaggugccccacgugaucgaggaggugaugaacaucgugcugaucgcccugagcauccuggccgugcugaagggccuguacaacuucgccaccugcggcaucgugggccuggugagcuuccugcugcugugcggcagaagcugcaccaccagccuguacaagggcguguacgagcugcagacccuggagcugaacauggagacccugaacaugaccaugccccugagcugcaccaagaacaacagccaccacuacaucauggugggcaacgagaccggccuggagcugacccugaccaacaccagcaucaucaaccacaaguucugcaaccugagcgacgcccacaagaagaaccuguacgaccacgcccugaugagcaucaucagcaccuuccaccugagcauccccaacuucaaccaguacgaggccaugagcugcgacuucaacggcggcaagaucagcgugcaguacaaccugagccacagcuacgccggcgacgccgccaaccacugcggcaccaucgccaacggcgugcugcagaccuucaugagaauggccuggggcggcagcuacaucgcccuggacagcggcagagacagaugggacugcaucaugaccagcuaccaguaccugaucauccagaacaccaccugggaggaccacugccaguucagcagacccagccccaucggcuaccugggccugcugagccagagaaccagagacaucuacaucagcagaagacugcugggcaccuucaccuggacccugagcgacagcgagggcaaggacacccccggcggcuacugccugaccagauggaugcugaucgaggccgagcugaagugcuucggcaacaccgccguggccaagugcaacgagaagcacgacgaggaguucugcgacaugcugagacuguucgacuucaacaagcaggccauccagagacugaaggccgaggcccagaugagcauccagcugaucaacaaggccgugaacgcccugaucaacgaccagcugaucaugaagaaccaccugagagacaucaugggcauccccuacugcaacuacagcaaguacugguaccugaaccacaccaccaccggcaagaccagccugcccaagugcuggcuggugagcaacggcagcuaccugaacgagacccacuucagcgacgacaucgagcagcaggccgacaacaugaucaccgagaugcugcagaaggaguacauggagagacagggcaagaccccccugggccugguggaccuguucguguucagcaccagcuucuaccugaucagcaucuuccugcaccuggugaagauccccacccacagacacguggugggcaagagcugccccaagccccacagacugaaccacaugggcaucugcagcugcggccuguacggccagcccggcgugcccgugaaguggaagagaugaggacuaguaauaaggaaacuguaugaaugucugugggcaggaagugaagagauccuucuguaaagguuuuuggaauuaugucugcugaauaauaaacuuuuuugaaauaauaaaucugguagaaaaaugagaucucaaaggcucuuuucagagccaccaaaaaaaaaaaaaaaaaaaaaaaaaaaaaaaaaaaaaaaaaaaaaaaaaaaaaaaaaaaaaaaaagaauu

SEQ ID NO: 14691 - RNA, 1781 nt, Artificial Sequence
  mRNA product Design b-4 (hSL-A64-N5) comprising derived and/or modified sequence from MOPV/LASV reassortant(IGS-1;Clade IV)__AFY05576__GPC (opt4)
aggagagucccgcagucggcguccagcggcucugcuuguucgugugugugucguugcaggccuuauucaagcuuaccaugggccagaucgugaccuucuuccaggaggugccccacgugaucgaggaggugaugaacaucgugcugaucgcccugagcgugcuggccgugcugaagggccuguacaacuucgccaccugcggccuggugggccuggugaccuuccugcugcugugcggcagaagcugcaccaccagccuguacaagggcguguacgagcugcagacccuggagcugaacauggagacccugaacaugaccaugccccugagcugcaccaagaacaacagccaccacuacaucauggugggcaacgagaccggccuggagcugacccugaccaacaccagcaucaucaaccacaaguucugcaaccugagcgacgcccacaagaagaaccuguacgaccacgcccugaugagcaucaucagcaccuuccaccugagcauccccaacuucaaccaguacgaggccaugagcugcgacuucaacggcggcaagaucagcgugcaguacaaccugagccacagcuacgccggcgacgccgccaaccacugcggcaccguggccaacggcgugcugcagaccuucaugagaauggccuggggcggcagcuacaucgcccuggacagcggcagaggcaacugggacugcaucaugaccagcuaccaguaccugaucauccagaacaccaccugggaggaccacugccaguucagcagacccagccccaucggcuaccugggccugcugagccagagaaccagagacaucuacaucagcagaagacugcugggcaccuucaccuggacccugagcgacagcgagggcgaggacacccccggcggcuacugccugaccagauggaugcugaucgaggccgagcugaagugcuucggcaacaccgccguggccaagugcaacgagaagcacgacgaggaguucugcgacaugcugagacuguucgacuucaacaagcaggccauccagagacugaaggccgaggcccagaugagcauccagcugaucaacaaggccgugaacgcccugaucaacgaccagcugaucaugaagaaccaccugagagacaucaugggcauccccuacugcaacuacagcaaguacugguaccugaaccacaccaccaccggcagaaccagccugcccaagugcuggcuggugagcaacggcagcuaccugaacgagacccacuucagcgacgacaucgagcagcaggccgacaacaugaucaccgagaugcugcagaaggaguacauggagagacagggcaagaccccccugggccugguggaccuguucguguucagcaccagcuucuaccugaucagcaucuuccugcaccuggugaagauccccacccacagacacaucgugggcaagagcugccccaagccccacagacugaaccacaugggcaucugcagcugcggccuguacaagcagcccggcgugcccgugaaguggaagagaugaggacuaguaauaaggaaacuguaugaaugucugugggcaggaagugaagagauccuucuguaaagguuuuuggaauuaugucugcugaauaauaaacuuuuuugaaauaauaaaucugguagaaaaaugagaucucaaaggcucuuuucagagccaccaaaaaaaaaaaaaaaaaaaaaaaaaaaaaaaaaaaaaaaaaaaaaaaaaaaaaaaaaaaaaaaaagaauu

SEQ ID NO: 14692 - RNA, 1781 nt, Artificial Sequence
  mRNA product Design b-4 (hSL-A64-N5) comprising derived and/or modified sequence from LASV(LM765-SLE-2012;Clade IV)__AIT17814__GPC (opt4)
aggagagucccgcagucggcguccagcggcucugcuuguucgugugugugucguugcaggccuuauucaagcuuaccaugggccagaucgugaccuucuuccaggaggugccccacgugaucgaggaggugaugaacaucgugcugaucgcccugagcauccuggccgugcugaagggccuguacaacuucgccaccugcggccuggugggccuggugaccuuccugcugcugugcggcagaagcugcaccaccagccuguacaagggcguguacgagcugcagacccuggagcugaacauggagacccugaacaugaccaugccccugagcugcaccaagaacaacagccaccacuacaucauggugggcaacgagaccggccuggagcugacccugaccaacaccagcaucaucgaccacaaguucugcaaccugagcgacgcccacagaaagaaccuguacgaccacgcccugaugagcaucaucagcaccuuccaccugagcauccccaacuucaaccaguacgaggccaugagcugcgacuucaacggcggcaagaucagcgugcaguacaaccugagccacagcuacgccaaggacgccgccgaccacugcggcaccguggccaacggcgugcugcagaccuucaugagaauggccuggggcggcagcuacaucgcccuggacagcggcagaggcagaugggacugcaucaugaccagcuaccaguaccugaucauccagaacaccaccugggaggaccacugccaguucagcagacccagccccaucggcuaccugggccugcugagccagagaaccagagacaucuacaucagcagaagacugcugggcaccuucaccuggacccugagcgacagcgagggcaaggacacccccggcggcuacugccugaccagauggaugcugaucgaggccgagcugaagugcuucggcaacaccgccguggccaagugcaacgagaagcacgacgaggaguucugcgacaugcugagacuguucgacuucaacaagcaggccauccagagacugaaggccgaggcccagaugagcauccagcugaucaacaaggccgugaacgcccugaucaacgaccagcugaucaugaagaaccaccugagagacaucaugggcauccccuacugcaacuacagcaaguacugguaccugaaccacaccaccaccggcaagaccagccugcccaagugcuggcuggugagcaacggcagcuaccugaacgagacccacuucagcgacgacaucgagcagcaggccgacaacaugaucaccgagaugcugcagaaggaguacauggagagacagggcaagaccccccugggccugguggaccuguucguguucagcaccagcuucuaccugaucagcaucuuccugcaccuggugaagauccccacccacagacacaucgugggcaagcccugccccaagccccacagacugaaccacaugggcaucugcagcugcggccuguacaagcagcccggcgugcccgugaaguggaagagaugaggacuaguaauaaggaaacuguaugaaugucugugggcaggaagugaagagauccuucuguaaagguuuuuggaauuaugucugcugaauaauaaacuuuuuugaaauaauaaaucugguagaaaaaugagaucucaaaggcucuuuucagagccaccaaaaaaaaaaaaaaaaaaaaaaaaaaaaaaaaaaaaaaaaaaaaaaaaaaaaaaaaaaaaaaaaagaauu

SEQ ID NO: 14693 - RNA, 1781 nt, Artificial Sequence
  mRNA product Design b-4 (hSL-A64-N5) comprising derived and/or modified sequence from LASV(LM776-SLE-2012;Clade IV)__AIT17824__GPC (opt4)
aggagagucccgcagucggcguccagcggcucugcuuguucgugugugugucguugcaggccuuauucaagcuuaccaugggccagaucgugaccuucuuccaggaggugccccacgugaucgaggaggugaugaacaucgugcugaucgcccugagcauccuggccgugcugaagggccuguacaacuucgccaccugcggccuggugggccuggugaccuuccugcugcugugcggcagaagcugcaccaccagcguguacaagggcguguacgagcugcagacccuggagcugaacauggagacccugaacaugaccaugccccugagcugcaccaagaacaacagccaccacuacaucauggugggcaacgagaccggccuggagcugacccugaccaacaccagcaucaucaaccacaaguucugcaaccugagcgacgcccacaagaagaaccuguacgaccacgcccugaugagcaucaucagcaccuuccaccugagcauccccaacuucaaccaguacgaggccaugagcugcgacuucaacggcggcaagaucagcgugcaguacaaccugagccacagcuacgccggcgacgccgccaaccacugcggcaccguggccaacggcgugcugcagaccuucaugagaauggccuggggcggcagcuacaucgcccuggacagcggccacggcaagugggacugcaucaugaccagcuaccaguaccugaucauccagaacaccaccugggaggaccacugccaguucagcagacccagccccaucggcuaccugggccugcugagccagagaaccagagacaucuacaucagcagaagacugcugggcaccuucaccuggacccugagcgacagcgagggcaaggacacccccggcggcuacugccugaccagauggaugcugaucgaggccgagcugaagugcuucggcaacaccgccguggccaagugcaacgagaagcacgacgaggaguucugcgacaugcugagacuguucgacuucaacaagcaggccauccagagacugaaggccgaggcccagaugagcauccagcugaucaacaaggccgugaacgcccugaucaacgaccagcugaucaugaagaaccaccugagagacaucaugggcauccccuacugcaacuacagcaaguacugguaccugaaccacaccaccaccggcaagaccagccugcccaagugcuggcuggugagcaacggcagcuaccugaacgagacccacuucagcgacgacaucgagcagcaggccgacaacaugaucaccgagaugcugcagaaggaguacauggagagacagggcaagaccccccugggccugguggaccuguucguguucagcaccagcuucuaccugaucagcaucuuccugcaccuggugaagauccccacccacagacacaucgugggcaagagcugccccaagccccacagacugaaccacaugggcaucugcagcugcggccuguacaagcagcccggcgugcccgugagauggaagagaugaggacuaguaauaaggaaacuguaugaaugucugugggcaggaagugaagagauccuucuguaaagguuuuuggaauuaugucugcugaauaauaaacuuuuuugaaauaauaaaucugguagaaaaaugagaucucaaaggcucuuuucagagccaccaaaaaaaaaaaaaaaaaaaaaaaaaaaaaaaaaaaaaaaaaaaaaaaaaaaaaaaaaaaaaaaaagaauu

SEQ ID NO: 14694 - RNA, 1781 nt, Artificial Sequence
  mRNA product Design b-4 (hSL-A64-N5) comprising derived and/or modified sequence from LASV(Mad39;Clade IV)__ANH09722__GPC (opt4)
aggagagucccgcagucggcguccagcggcucugcuuguucgugugugugucguugcaggccuuauucaagcuuaccaugggccagaucgugaccuucuuccaggaggugccccacgugaucgaggaggugaugaacaucgugcugaucgcccugagcauccuggccgugcugaagggccuguacaacguggccaccugcggccugaucggccuggugaccuuccugcugcugugcggcagaagcugcaccaccacccuguacaagggcguguacgagcugcaggcccuggagcugaacauggagacccugaacaugaccaugccccugagcugcaccaagaacaacagccaccacuacaucagagugggcaacgagaccggccuggagcugacccugaccaacaccagccugaucaaccacaaguucugcaaccugagcgacgcccacaagaagaaccuguacgaccacgcccugaugagcaucaucagcaccuuccaccugagcauccccaacuucaaccaguacgaggccaugagcugcgacuucaacgacggcaagaucagcgugcaguacaaccugagccacaccuacgccggcgacaccgccaaccacugcggcaccguggccaacggcgugcugcagaccuucaugagaauggccuggggcggcagcuacaucgcccuggacagcggcagaggcggcugggacugcaucaugaccagcuaccaguaccugaucauccagaacaccaccugggaggaccacugccaguucagcagacccagccccaucggcuaccugggccugcugagccagagaaccagagacaucuacaucagcagaagacugcugggcaccuucaccuggacccugagcgacagcgagggcaaggacacccccggcggcuacugccugaccagauggaugcugaucgaggccgagcugaagugcuucggcaacaccgccguggccaagugcaacgagaagcacgacgaggaguucugcgacaugcugagacuguucgacuucaacaagcaggccauccagagacugaaggccgaggcccagaugagcauccagcugaucaacaaggccgugaacgcccugaucaacgaccagcugaucaugaagaaccaccugagagacaucaugggcauccccuacugcaacuacagcaaguacugguaccugaaccacaccgugaccggcaagaccagccugcccaagugcuggcuggugagcaacggcagcuaccugaacgagacccacuucagcgacgacaucgagcagcaggccgacaacaugaucaccgagaugcugcagaaggaguacauggagagacagggcaagaccccccugggccugguggaccuguucguguucagcaccagcuucuaccugaucagcaucuuccugcaccuggugaagauccccacccacagacacguggugggcaagcccugccccaagccccacagacugaaccacaugggcaucugcagcugcggcuucuacaagcagcccggcgugcccgugagauggaagagaugaggacuaguaauaaggaaacuguaugaaugucugugggcaggaagugaagagauccuucuguaaagguuuuuggaauuaugucugcugaauaauaaacuuuuuugaaauaauaaaucugguagaaaaaugagaucucaaaggcucuuuucagagccaccaaaaaaaaaaaaaaaaaaaaaaaaaaaaaaaaaaaaaaaaaaaaaaaaaaaaaaaaaaaaaaaaagaauu

SEQ ID NO: 14695 - RNA, 1781 nt, Artificial Sequence
  mRNA product Design b-4 (hSL-A64-N5) comprising derived and/or modified sequence from LASV(Z0947-SLE-2011;Clade IV)__AIT17840__GPC (opt4)
aggagagucccgcagucggcguccagcggcucugcuuguucgugugugugucguugcaggccuuauucaagcuuaccaugggccagaucgugaccuucuuccaggaggugccccacgugaucgaggaggugaugaacaucgugcugaucgcccugagcauccuggccgugcugaagggccuguacaacuucgccaccugcggccuggugggccuggugaccuuccugcugcugugcggcagaagcugcaccaucagccuguacaagggcguguacgagcugcagacccuggagcugaacauggagacccugaacaugaccaugccccugagcugcaccaagaacaacagccaccacuacaucauggugggcaacgagaccggccuggagcugacccugaccaacaccagcaucaucaaccacaaguucugcaaccugagcgacgcccacaagaagaaccuguacgaccacgcccugaugagcaucaucagcaccuuccaccugagcauccccaacuucaaccaguacgaggccaugagcugcgacuucaacggcggcaagaucagcgugcaguacaaccugagccacagcuacgccggcgacgccgccaaccacugcggcaccguggccaacggcgugcugcagaccuucaugagaauggccuggggcggcagcuacaucgcccuggacagcggcagagacagaugggacugcaucaugaccagcuaccaguaccugaucauccagaacaccaccugggaggaccacugccaguucagcagacccagccccaucggcuaccugggccugcugagccagagaaccagagacaucuacaucagcagaagacugcugggcaccuucaccuggacccugagcgacagcgagggcaaggacacccccggcggcuacugccugaccagauggaugcugaucgaggccgagcugaagugcuucggcaacaccgccguggccaagugcaacgagaagcacgacgaggaguucugcgacaugcugagacuguucgacuucaacaagcaggccauccagagacugaaggccgaggcccagaugagcauccagcugaucaacaaggccgugaacgcccugaucaacgaccagcugaucaugaagaaccaccugagagacaucaugggcauccccuacugcaacuacagcaaguacugguaccugaaccacaccaccaccggcaagaccagccugcccaagugcuggcuggugagcaacggcagcuaccugaacgagacccacuucagcgacgacaucgagcagcaggccgacaacaugaucaccgagaugcugcagaaggaguacauggagagacagggcaagaccccccugggccugguggaccuguucguguucagcaccagcuucuaccugaucagcaucuuccugcaccuggugaagauccccacccacagacacaucgugggcaagcccugccccaagccccacagacugaaccacaugggcaucugcagcugcggccuguacaagcagcccggcgugcccgugaaguggaagagaugaggacuaguaauaaggaaacuguaugaaugucugugggcaggaagugaagagauccuucuguaaagguuuuuggaauuaugucugcugaauaauaaacuuuuuugaaauaauaaaucugguagaaaaaugagaucucaaaggcucuuuucagagccaccaaaaaaaaaaaaaaaaaaaaaaaaaaaaaaaaaaaaaaaaaaaaaaaaaaaaaaaaaaaaaaaaagaauu

SEQ ID NO: 14696 - RNA, 1781 nt, Artificial Sequence
  mRNA product Design b-4 (hSL-A64-N5) comprising derived and/or modified sequence from LASV(Josiah;Clade IV)__NP_694870__GPC (opt5)
aggagagucccgcagucggcguccagcggcucugcuuguucgugugugugucguugcaggccuuauucaagcuuaccaugggccagaucgugaccuucuuucaagaggucccccacguuauugaagaggugaugaacaucgugcugauugcccucagcguccuggcugugcuuaaggggcuguacaauuucgccacaugcggacucguuggccuggugacguuucuucugcucugugggagauccugcaccacaucucuguauaaaggagucuacgaacugcagacccucgagcugaacauggaaacacuuaauaugaccaugccucugagcuguacaaagaacaauucccaucacuauaucauggugggcaacgagaccgggcucgagcugacgcuuaccaauacaucuauuaucaaccauaaauucugcaaucugagcgacgcgcacaagaaaaaccucuacgaucaugcucugauguccaucauuucuaccuuucaccugagcaucccgaauuucaaccaguaugaagccauguccugugacuuuaauggaggcaagauuagcguucaguacaaccucucucacuccuaugccggcgaugcugccaaucauugcgggacaguggcuaacggaguccugcaaaccuucaugcggauggccuggggcgggagcuacaucgcgcuugacucuggacgcggcaacugggauuguauuaugacguccuaccaguaucugaucauucagaauacaaccugggaggaccacugccaguuuagcagacccucuccuaucggguaccucggacugcuuucccaacggacacgcgauaucuauauuagcagacggcugcucggcaccuucaccuggacacuguccgacucugaaggcaaggauacgcccgggggauacugucugacccgcuggaugcucaucgaggccgagcugaaaugcuuuggcaacacagcuguggccaaguguaaugaaaaacaugacgaggaguucugcgauaugcuuagacuguuugacuucaacaagcaggcuauucagcggcucaaagccgaagcgcagaugagcauccaacugauuaauaaggccgugaacgcucuuaucaaugaucagcugaucaugaagaaccaccuccgcgacauuauggggaucccuuauugcaauuacuccaaauauugguaccugaaccacaccacaaccggaagaacgagccugcccaaguguuggcucgucucuaauggcuccuaccugaacgaaacacauuucagcgacgauauugagcagcaagccgacaauaugaucaccgagaugcuucagaaagaauauauggagcggcaggggaagaccccucugggacucguugaucuguuuguguucucuaccagcuuuuaccugauuuccaucuuccuucaccucgugaaaaucccgacacaucgccacauugucggcaagucuugccccaaaccucauagacugaaccacaugggcaucuguagcugcgggcuguauaagcagcccggagugccuguuaaguggaaacggugaggacuaguaauaaggaaacuguaugaaugucugugggcaggaagugaagagauccuucuguaaagguuuuuggaauuaugucugcugaauaauaaacuuuuuugaaauaauaaaucugguagaaaaaugagaucucaaaggcucuuuucagagccaccaaaaaaaaaaaaaaaaaaaaaaaaaaaaaaaaaaaaaaaaaaaaaaaaaaaaaaaaaaaaaaaaagaauu

SEQ ID NO: 14697 - RNA, 1778 nt, Artificial Sequence
  mRNA product Design b-4 (hSL-A64-N5) comprising derived and/or modified sequence from LASV(LP;Clade I)__AAF86701__GPC (opt5)
aggagagucccgcagucggcguccagcggcucugcuuguucgugugugugucguugcaggccuuauucaagcuuaccaugggccagaucauuaccuucuuucaagaggugccccacgucaucgaagagguuaugaacauugugcugaucgcccucagccugcuugcuauucugaaggggcucuacaauaucgccacaugcggaaucauuggccugguggcguuccuuuuucugugugggaaauccugcucucucacgcugaagggaggcuaugaacugcagacccucgagcugaacauggaaacacuuaauaugaccaugccucugagcuguaccaaaaacuccucucaucacuacaucagagucgggaaugagacaggacucgagcugacacuuaccaacacgagcauuaucaaucauaaguucugcaaccuguccgacgcucacaaaaagaaucucuaugaucaugcccugaugucuauuaucagcaccuuucaccuguccauuccgaacuucaaucaguacgaagccaugagcugugacuuuaacggcggcaagaucucugugcaguauaaucucucccacagcuacgcuggggaugccgcugagcauugcggaacaguugccaacggcgugcugcaaaccuucaugcggauggcguggggagggcgcuauaucgcccuugacucuggcaaagggaauugggauuguauuaugacauccuaccaguaccugaucauucagaacaccacgugggaagaccacugccaguuuagcagacccucuccuaucggauaucucggccugcuuucccaacggacacgcgauauuuacaucagcagacggcugcucggcaccuucacauggacccuguccgacucugaggggaacgagacccccggaggcuauugucugacacgcuggaugcucaucgaagcugagcugaagugcuuugggaauacggccgucgcuaaauguaacgaaaagcaugaugaggaguucugcgacaugcuuagacuguuugauuucaauaaacaggccauucggcgccucaaggcggaagcccagaugagcauccagcugauuaacaaggcugugaaugcccuuaucaacgaccaacugauuaugaaaaaucaccucagagauaucaugggaaucccuuacugcaacuauuccaaguacugguaucugaaucacaccagcucuggccggacaucccugcccaaauguuggcucauuagcaacgggucuuaccugaaugagacccaguucagcgacgacaucgaacagcaagcugauaacaugauuacagagaugcuucagaaggaauacaucgagcgccagggaaaaaccccucugggccucguugacauuuuuaucuucuccacgucuuuuuaucugauuagcaucuuccugcaucuuaucaagauuccgacacacagacauaucgugggcaaacccugcccuaagccccaccggcucaaucauaugggggucuguuccugcggacuguacaagcacccuggcgugcccaccaaauggaagcgcugaggacuaguaauaaggaaacuguaugaaugucugugggcaggaagugaagagauccuucuguaaagguuuuuggaauuaugucugcugaauaauaaacuuuuuugaaauaauaaaucugguagaaaaaugagaucucaaaggcucuuuucagagccaccaaaaaaaaaaaaaaaaaaaaaaaaaaaaaaaaaaaaaaaaaaaaaaaaaaaaaaaaaaaaaaaaagaauu

SEQ ID NO: 14698 - RNA, 1778 nt, Artificial Sequence
  mRNA product Design b-4 (hSL-A64-N5) comprising derived and/or modified sequence from LASV(803213;Clade II)__AAF86703__GPC (opt5)
aggagagucccgcagucggcguccagcggcucugcuuguucgugugugugucguugcaggccuuauucaagcuuaccaugggccagaucauuaccuucuuucaagaggugccccacgucaucgaagagguuaugaacauugugcugaucgcccucagccugcuugcuauucugaaggggaucuacaauguggccacaugcggacucuucggccugaucuccuuucuucugcucugugggagaucuugcagcgucacguauaaaggaguguacgaacugcagacccuggagcucaacauggcgaaucugaacaugacaaugccucuuuccuguaccaagaauaacucucaucacuauauuaugguuggcaaugaaacagggcuggagcucacccugacaaacaccagcaucauuaaucauaaauucugcaaccuuuccgacgcucacaagaaaaaucuguacgaucaugcccucaugucuaucauuagcacguuucaccuguccaucccgaacuucaaucaguaugaggccaugagcugugacuuuaacggaggcaagauuucugugcaguacaaucugucccacagcuucgcugucgaugccgcuaaccauugcggcaccaucgccaacggggugcuccaaacauuuaugcggauggcguggggaggcucuuauaucgcccuggacuccgggaagggaaauugggauuguauuaugaccagcuaccaguaccuuaucauucagaacacaaccugggaagaccacugccaguucucucgccccuccccuaucggcuaucuggggcuccugagccaaagaacgcgggauauuuacaucucccgcagacuucugggaacauuuaccuggacacucucugacagcgagggcaaugaagcucccggcggguauugucugacccgguggaugcugaucgaggccgagcucaaaugcuucggaaacaccgcuguugccaaguguaaugaaaaacaugaugaggaauuuugcgacaugcugcgccuuuucgauuucaacaagcaggcgauuaaaagacugaagacagaggcccagauguccauccagcucauuaauaaggcugugaacgcccugaucaaugaccaacuuauuaugaaaaaccaucugcgggauaucaugggcaucccuuacugcaauuauagccgcuacugguaucucaaccacacggucaccgggaagacaucucugcccagauguuggcugguguccaauggaagcuaccucaacgaaacccacuuuucugacgacauugagcagcaggcugauaauaugaucacagagaugcugcaaaaagaauacauggaccggcagggcaagaccccucuugggcugguggaucucuucgucuuuagcacguccuucuaucugauuucuaucuuucugcaccuuguuaaaauuccgacacaucgccacaucgugggaaagcccugcccuaaaccccauagacucaaccacaugggcauuuguagcugcggccuguacaagcacccuggggugcccgucaaguggaaacggugaggacuaguaauaaggaaacuguaugaaugucugugggcaggaagugaagagauccuucuguaaagguuuuuggaauuaugucugcugaauaauaaacuuuuuugaaauaauaaaucugguagaaaaaugagaucucaaaggcucuuuucagagccaccaaaaaaaaaaaaaaaaaaaaaaaaaaaaaaaaaaaaaaaaaaaaaaaaaaaaaaaaaaaaaaaaagaauu

SEQ ID NO: 14699 - RNA, 1778 nt, Artificial Sequence
  mRNA product Design b-4 (hSL-A64-N5) comprising derived and/or modified sequence from LASV(GA391;Clade III)__CAA36645__GPC (opt5)
aggagagucccgcagucggcguccagcggcucugcuuguucgugugugugucguugcaggccuuauucaagcuuaccaugggccagaucgugaccuucuuucaagaggucccccacguuauugaagaggugaugaacaucgugcugauugcccucagcauccuggcuauucuuaaggggcuguacaaugucgccacaugcggacucaucggccuggugacguuccuucugcucuccgggagaucuuguagccugaucuauaaaggaaccuacgaacugcagacacucgagcugaacauggaaacccuuaauaugacaaugccucuguccugcaccaagaacaauucucaucacuauauucggguuggcaacgagacagggcucgagcugacccuuacgaauaccagcauccugaaccauaaauuuuguaaucucuccgacgcgcacaagcgcaaccuguacgaucauucucugaugagcauuaucuccacauuccaccucagcauuccgaauuuuaaccaguaugaagcuaugucuugcgacuucaauggaggcaaaaucaccgugcaguacaaccugucccacagcuuugccgucgaugccgcuggccauugugggacacuugccaauggagugcugcaaaccuucaugagaauggcuuggggcgggucuuauauugcccucgacuccggacggggcaacugggauugcaucaugacgagcuaccaguaccugaucauucagaacacaaccugggacgaucacugucaguuuucucgccccuccccuaucggguaucuuggacugcucagccaaagaacacgggacauuuacaucucccgcagacugcugggcaccuucaccuggacacucucugauagcgagggcaaugaaacgcccgggggauauugccugacccgguggaugcuuauugaggcggagcugaaguguuuuggcaacacagccguugcuaagugcaaugaaaaacaugacgaggaguucugugauaugcuccgccuguuugacuucaacaagcaggccaucagacggcuuaaaaccgaagcucagauguccauccagcugauuaauaaggccgugaacgcgcucaucaaugaucaacugauuaugaaaaaccaucugcgcgacaucauggggauuccuuacugcaauuauagcagauacugguaucucaaccacacaucuaccggaaagacgucccugccccggugcuggcuuaucagcaauggcucuuaccugaacgaaacaaaguucagcgacgauaucgagcagcaggccgacaauaugauuaccgagaugcuccaaaaagaauacaucgaucgccaggggaagaccccucugggacuggucgaccuuuuuguguucuccacaucuuuuuaucucauuagcaucuuccugcaccuggugaaaauuccgacccacagacauaucgucggcaagcccuguccuaaaccccaccggcucaaccauaugggcauuugcuccugugggcuguacaagcagccuggaguucccgugagauggaaacgcugaggacuaguaauaaggaaacuguaugaaugucugugggcaggaagugaagagauccuucuguaaagguuuuuggaauuaugucugcugaauaauaaacuuuuuugaaauaauaaaucugguagaaaaaugagaucucaaaggcucuuuucagagccaccaaaaaaaaaaaaaaaaaaaaaaaaaaaaaaaaaaaaaaaaaaaaaaaaaaaaaaaaaaaaaaaaagaauu

SEQ ID NO: 14700 - RNA, 1781 nt, Artificial Sequence
  mRNA product Design b-4 (hSL-A64-N5) comprising derived and/or modified sequence from LASV(AV;Clade V)__CCA30314__GPC (opt5)
aggagagucccgcagucggcguccagcggcucugcuuguucgugugugugucguugcaggccuuauucaagcuuaccaugggccagaucgugaccuucuuucaagaggucccccacguuauugaagaggugaugaacaucgugcugauugcccucagcauccuggcuguccuuaaggggcuguacaauauugccacaugcggacucaucggccugaucacguuccuucugcucugugggagauccugcucuagcaaccuguauaaaggaguguacgaacugcagucccucgaccugaauauggagacccuuaacaugacaaugccucugucuuguaccaagaauaacagccaucacuauauucggguuggcaaugauacagggcucgaacugacccuuacaaacaccuccauccugaaucauaaauuuugcaaccucucugacgcgcacaagaaagaucuguacgaccaugcucugaugagcauuaucuccacguuccaccucagcauuccgaauuuuaaccaguaugaggccaugucuugugauuucaauggaggcaagaucuccgugcaguacaaccugagccacucuuaugccauugacgcugccaaucauugcggcaccgucgcuaacgggauccuucaaacauuuaugcgcauggccuggggaggcuccuacaucgcgcuggauagcgggagaggaaacugggacuguauuaugaccucuuaccaguaucucaucauucagaauacaaccugggagaaccacugccaguucucccggcccagcccuaucggcuaccuggggcuucugucccaacgcacgagagauauuuauaucucucggcgccuccugggaacauuuaccuggacacugagcgacuccgaaggcaaugccacccccggcggguacugucucaccagauggaugcugaucgaggcugaacuuaagugcuucggaaacacagccguggcuaaauguaaugagaagcaugaugaggaauuuugcgacaugcugcgccucuucgauuuuaacaaacaggccauuagccggcugaagucugaggcgcagauguccauccagcuuauuaauaaagccguuaacgcucugaucaaugaccaacucauuaugaagaaccaccugagagacaucaugggcaucccuuauugcaauuacagcaaguauugguaccugaaccacacgauuaccgggaaaacaucucuccccaaguguuggcuggugagcaauggauccuaccuuaacgaaacccauuucucugaugacaucgagcagcaggccgauaauaugauuacagaaaugcugcaaaaagaguauauggagcggcagggcaagaccccucucgggcuggucgaccuguucguguuuagcacguccuucuaccuuaucagcauuuuucuccgccuggugaaaaucccgacacacagacauauugucggaaagcccugcccuaaaccccaccggcugaaccauaugggcaucuguucuugcggccucuauaagcagccugggguucccgugcgcuggaagagaugaggacuaguaauaaggaaacuguaugaaugucugugggcaggaagugaagagauccuucuguaaagguuuuuggaauuaugucugcugaauaauaaacuuuuuugaaauaauaaaucugguagaaaaaugagaucucaaaggcucuuuucagagccaccaaaaaaaaaaaaaaaaaaaaaaaaaaaaaaaaaaaaaaaaaaaaaaaaaaaaaaaaaaaaaaaaagaauu

SEQ ID NO: 14701 - RNA, 1778 nt, Artificial Sequence
  mRNA product Design b-4 (hSL-A64-N5) comprising derived and/or modified sequence from LASV(Togo/2016/7082;Clade VI)__AMR44577__GPC (opt5)
aggagagucccgcagucggcguccagcggcucugcuuguucgugugugugucguugcaggccuuauucaagcuuaccaugggccagaucauuaccuucuuucaagaggugccccacgucaucgaagagguuaugaacauugugcugaucgcccucagccugcuugcuauucugaaggggguguacaaugucgccacaugcggaaucaucggccucgugacguuccuguuucuuugugggagauccugcucucugauuuauaaaggaagcuacgaacuccagacccuggagcugaacauggaaacacucaauaugaccaugccucuguccuguacaaagaacucuagccaucacuauauccggguuggcaaugagaccgggcuugagcugacacucaccaacacguccauuaucaaucauaaauucugcaaccugucugacgcgcacaagcgcaaucuuuacgaucaugcucugaugagcauucucuccaccuuucaccugagcaucccgaacuucaaucaguaugaagccaugucuugugacuuuaacggaggcaaaauuuccgugcaguacaaucugagccacgccuaugcugucgaugccgcugagcauugcggcacaguggccaacgggguucuccaaaccuucaugagaauggcguggggaggcucuuacaucgcccuggacuccgggcggggaaauugggauuguaucaugacaagcuaccaguaucuuauuauccagaacaccacgugggaagaccacugccaguuuucucgccccuccccuauuggcuaccuggggcuccugagccaaagaacacgggauaucuauauuucccgcagacuucugggaaccuucacauggacccucucugacagcgagggcaacgagacccccggcggguacugucugacacgguggaugcugaucgaagcugagcucaagugcuuuggaaauacggccguggcuaaguguaacgaaaaacaugaugaggaguucugcgacaugcugcgccuuuuugauuucaauaagcaggccauccagagacugaaauccgaagcgcagaugagcauucaacucaucaacaaggccgucaaugcucugauuaacgaccagcuuaucaugaaaaaucaucugcgggauaugaugggcauuccuuauugcaacuacucuaaguauugguaccucaaucacaccuccagcgggcgcacaucucugcccaaguguuggcuggugagcaacggauccuaccucaaugagacccacuucucugacgacaucgaacagcaagccgauaacaugaucacagagaugcugcagaaagaauauauugacagacagggcaagaccccucuugggcugguggaucucuuugucuucagcacguccuuuuaccugaucagcauuuuccugcaccuuaucaaaauuccgacacaucggcacaucguuggaaagcccugcccuaaaccccaucgccucaaucacaugggcauuuguucuugcggccuguauaagcagccuggggugcccaccagauggaaacggugaggacuaguaauaaggaaacuguaugaaugucugugggcaggaagugaagagauccuucuguaaagguuuuuggaauuaugucugcugaauaauaaacuuuuuugaaauaauaaaucugguagaaaaaugagaucucaaaggcucuuuucagagccaccaaaaaaaaaaaaaaaaaaaaaaaaaaaaaaaaaaaaaaaaaaaaaaaaaaaaaaaaaaaaaaaaagaauu

SEQ ID NO: 14702 - RNA, 1778 nt, Artificial Sequence
  mRNA product Design b-4 (hSL-A64-N5) comprising derived and/or modified sequence from LASV(KAK-428;Clade n.d. (VII))__ANH09740__GPC (opt5)
aggagagucccgcagucggcguccagcggcucugcuuguucgugugugugucguugcaggccuuauucaagcuuaccaugggccagaucgugaccuucuuucaagaggucccccacguuauugaagaggugaugaacaucgugcugauugcccucagccugcuugcuauccugaaggggcucuacaauuucgccacaugcggagucauuggccugaucacguuucuucugcucugugggagauccugcucugcgaccuauaaaggacaguacgaacugcagacacuggagcucaacauggaaagccugaauaugaccaugccucuuuccuguacaaagaacaauucucaucacuauauccgggcuggcaacaauaccgggcuggagcucacacugaccaacacgagcauuaucucccauaaauucugcaaucuuucugacgcccacaagaaaaaccuguacgaucauacccucaugagcauuaucacaaccuuucaccuguccauuccgaauuucaaccaguaugaggccaugagcugugacuuuaauggaggcaagaucucuauucaauacaaccugucccacagcuaugcuggcgaugccgcucagcauugcgggacaguggccaauggaguucuccagaccuucaugcgcauggcguggggcgggucuuaccuggcccuugacuccggaagacggggcugggauuguaucaucagcucuuaccaguaucugauuauccaaaacacgacaugggacgaucacugccaguuuucccgccccagcccuauuggguaccucggauucgugucccagaagaccagagacaucuauauuucucggcgccugcuuggcacauuuaccuggacccugagcgauuccgaaggccaugacaugcccgggggauacugucucacaagauggaugcugaucgaggcugaucugaaaugcuucggcaacacggccgucgcuaaguguaaugaaaaacacgacgaggaguuuugcgauauguggcgccucuucgacuucaacaagcaggccauccaacggcugaaagcggaagcccagaugaauauucagcuuaucaacaaggcugugaaugcccugauuaacgaccaacucaugaugaagaaucaccugagagauaucauggggauuccuuauugcaacuacagcaaauuuugguaucuuaauaacaccacaaccggacggacaucucugccccgcuguuggcucaucuccaauggcagcuaccugaacgagacccauuucucugacgauaucgaacagcaggcugacaauaugauuacggagaugcugcagaaggaauacauggauagacaagggaaaacaccucucggacugguugaccuuuuuguguucagcaccuccuuuuaucugaucaccauuuuccuccaccuggucaagaucccgacacaucggcacauugugggcaaacccugcccuaagccccaucgccugaaccacaugggcaucuguucuugcgggcuuuacaaacagccuggagugcccgucagauggaagcggugaggacuaguaauaaggaaacuguaugaaugucugugggcaggaagugaagagauccuucuguaaagguuuuuggaauuaugucugcugaauaauaaacuuuuuugaaauaauaaaucugguagaaaaaugagaucucaaaggcucuuuucagagccaccaaaaaaaaaaaaaaaaaaaaaaaaaaaaaaaaaaaaaaaaaaaaaaaaaaaaaaaaaaaaaaaaagaauu

SEQ ID NO: 14703 - RNA, 1778 nt, Artificial Sequence; identical to SEQ ID NO: 14697
  mRNA product Design b-4 (hSL-A64-N5) comprising derived and/or modified sequence from LASV(Pinneo-NIG-1969;Clade I)__AIT17836__GPC (opt5)

SEQ ID NO: 14704 - RNA, 1778 nt, Artificial Sequence
  mRNA product Design b-4 (hSL-A64-N5) comprising derived and/or modified sequence from LASV(ISTH0009-NIG-2011;Clade II)__AIT17404__GPC (opt5)
aggagagucccgcagucggcguccagcggcucugcuuguucgugugugugucguugcaggccuuauucaagcuuaccaugggccagaucauuaccuucuuucaagaggugccccacgucaucgaagagguuaugaacauugugcugaucgcccucagccugcuugcuauucugaaggggaucuacaauguggccacaugcggacucuucggccuggucuccuuucuucugcucugugggagaucuugcagcacgaccuauaaaggaguguacgaacugcagacacuggagcucgacauggcgucccugaacaugaccaugccucuuucuuguacaaagaauaacagccaucacuauaucaugguuggcaaugaaaccgggcuggagcucacacugaccaacacguccauuaucaaucauaaauucugcaaccuuucugaugcucacaagaaaaaucuguacgaccaugcccucaugagcauuaucuccaccuuucaccugagcauuccgaacuucaaucaguaugaggccaugucuugugauuuuaacggaggcaagaucuccgugcaguacaaucugagccacgcuuaugccgucgacgcugccaaccauugcggcacaauugcgaauggggugcuccaaaccuucaugcggauggccuggggaggcucuuacaucgcucuggauuccgggaagggaagcugggacuguaucaugacaucuuaccaguaucuuauuauccagaacaccacgugggaagaucacugccaguuuucccgccccagcccuauuggcuaccuggggcuccugucccaaagaacacgggacaucuauauuucucgcagacuucugggaaccuucacauggacccucagcgauuccgagggcaacgaaacccccggcggguacugucugacacgguggaugcugaucgaggccgagcucaaaugcuuuggaaauacggcuguugccaaguguaacgaaaaacaugacgaggaguucugcgauaugcugcgccuuuuugacuucaauaagcaggcgaucagacggcugaaaaccgaagcccagaugagcauucagcucaucaacaaggcugugaaugcccugauuaacgaucaacuuaucaugaagaaucaucugcgcgacauuaugggcaucccuuauugcaacuacucuaaauauugguaccucaaucacacagucaccgggaagacaucccugcccagauguuggcuggugagcaacggaucuuaccucaaugaaacccacuucagcgacgauaucgagcagcaggcugacaacaugauuacggagcugcuucaaaaagaauauauggaucggcagggcaagacaccucuggggcucguggaccuguuugucuucuccaccucuuuuuaccugaucagcauuuuccuucaccucaucaaaauuccgacccaucgccacaucacaggaaagcccugcccuaaaccccauagacugaaucacaugggcauuuguuccugcggccuguauaagcacccugggguucccgugaaguggaaacggugaggacuaguaauaaggaaacuguaugaaugucugugggcaggaagugaagagauccuucuguaaagguuuuuggaauuaugucugcugaauaauaaacuuuuuugaaauaauaaaucugguagaaaaaugagaucucaaaggcucuuuucagagccaccaaaaaaaaaaaaaaaaaaaaaaaaaaaaaaaaaaaaaaaaaaaaaaaaaaaaaaaaaaaaaaaaagaauu

SEQ ID NO: 14705 - RNA, 1778 nt, Artificial Sequence
  mRNA product Design b-4 (hSL-A64-N5) comprising derived and/or modified sequence from LASV(ISTH2010-NIG-2012;Clade II)__AIT17482__GPC (opt5)
aggagagucccgcagucggcguccagcggcucugcuuguucgugugugugucguugcaggccuuauucaagcuuaccaugggccagaucauuaccuucuuucaagaggugccccacgucaucgaagagguuaugaacauugugcugaucgcccucagccugcuugcuauucugaaggggaucuacaauguggccacaugcggacucuucggccuggucuccuuucuucugcucugugggagaucuugcagcacgaccuauaaaggaguguacgaacugcagacacuggagcucgacauggcgucccugaacaugaccaugccucuuucuuguacaaagaauaacagccaucacuauaucaugguuggcaaugaaaccgggcuggagcucacacugaccaacacguccauuaucaaucauaaauucugcaaccuuucugaugcucacaagaaaaaucuguacgaccaugcccucaugagcauuaucuccaccuuucaccugagcauuccgaacuucaaucaguaugaggccaugucuugugauuuuaacggaggcaagaucuccgugcaguacaaucugagccacgcuuaugccgucgacgcugccaaccauugcggcacaauugcgaauggggugcuccaaaccuucaugcggauggccuggggaggcucuuacaucgcucuggauuccgggaagggaagcugggacuguaucaugacaucuuaccaguaucuuauuauccagaacauuaccugggaagaucacugccaguuuucccgccccagcccuaucggcuaccuggggcuccugucccaaagaacgcgggacauuuauaucucucgcagacuucugggaacauucaccuggacacucagcgauuccgagggcaacgaaacccccggcggguacugucugacccgguggaugcugaucgaggccgagcucaaaugcuuuggaaauacagcuguugccaaguguaacgaaaaacaugacgaggaguucugcgauaugcugcgccuuuuugacuucaauaagcaggcgauuagacggcugaaaacggaagcccagaugagcauccagcucauuaacaaggcugugaaugcccugaucaacgaucaacuuauuaugaagaaucaucugcgcgacaucaugggcaucccuuauugcaacuacucuaaauauugguaccucaaucacaccgucacagggaagaccucccugcccagauguuggcuggugagcaacggaucuuaccucaaugaaacacacuucagcgacgauauugagcagcaggcugacaacaugaucaccgagcugcuucaaaaagaauauauugaucggcagggcaagacgccucuggggcucguggaccuguuugucuucuccacaucuuuuuaccugaucagcauuuuccuucaccucguuaaaaucccgacccaucgccacguggugggaaagcccugcccuaaaccccauagacugaaucacaugggcauuuguuccugcggccuguauaagcacccugggguccccgugaaguggaaacggugaggacuaguaauaaggaaacuguaugaaugucugugggcaggaagugaagagauccuucuguaaagguuuuuggaauuaugucugcugaauaauaaacuuuuuugaaauaauaaaucugguagaaaaaugagaucucaaaggcucuuuucagagccaccaaaaaaaaaaaaaaaaaaaaaaaaaaaaaaaaaaaaaaaaaaaaaaaaaaaaaaaaaaaaaaaaagaauu

SEQ ID NO: 14706 - RNA, 1778 nt, Artificial Sequence
  mRNA product Design b-4 (hSL-A64-N5) comprising derived and/or modified sequence from LASV(Lassa virus/H.sapiens-wt/NGA/2015/ISTH_0543;Clade II)__AVO03639__GPC (opt5)
aggagagucccgcagucggcguccagcggcucugcuuguucgugugugugucguugcaggccuuauucaagcuuaccaugggccagaucauuaccuucuuucaagaggugccccacgucaucgaagagguuaugaacauugugcugaucgcccucagccugcuugcuauucugaaggggaucuacaauguggccacaugcggacucuucggccuggucuccuuucuucugcucugugggagaucuugcagcacgaccuauaaaggaguguacgaacugcagacacuggagcucgacauggcgaaccugaauaugaccaugccucuuuccuguacaaagaacaauucucaucacuauaucaugguuggcaacgaaaccgggcuggagcucacacugaccaauacgagcauuaucaaccauaaauucugcaaucuuuccgaugcucacaagaaaaaccuguacgaccaugcccucaugucuauuaucagcaccuuucaccuguccauuccgaauuucaaccaguaugaggccaugagcugugauuuuaauggaggcaagaucucugugcaguacaaccugucccacacauaugcugucgacgccgcuaaucauugcggcaccauugccaacggggugcuccaaacauucaugcggauggcguggggaggcagcuacaucgcccuggauucugggaagggauccugggacuguaucaugaccagcuaccaguaucuuguuauucagaacacgacaugggaagaucacugccaguuuucucgccccuccccuaucggcuaccuggggcuccugagccaaagaacccgggacauuuauaucucccgcagacuucugggaacauucaccuggacccucucugauagcgagggcaaugaaacacccggcggguacugucugacgcgguggaugcugauugaggcugagcucaaaugcuuuggaaacaccgccguggcuaaguguaaugaaaaacaugacgaggaguucugcgauaugcugcgccuuuuugacuucaacaagcaggccaucagacggcugaaaacagaagcgcagauguccauccagcucauuaauaaggccgucaacgcucugaucaaugaucaacuuauuaugaagaaccaucugcgcgacaucaugggcauuccuuauugcaauuacagcaaauauugguaccucaaccacaccgugacagggaagaccucucugcccagauguuggcugguguccaauggaagcuaccucaacgaaacgcacuucucugacgauaucgagcagcaggccgacaauaugaucacagagcugcuucaaaaagaauauauugaucggcagggcaagaccccucuggggcucgucgaccuguuuguuuucagcaccuccuuuuaccugaucucuauuuuccuucaccucgugaaaaucccgacacaucgccacauuaccggaaagcccugcccuaaaccccauagacugaaccacaugggcaucuguagcugcggccuguauaagcacccuggggugcccgucaaguggaaacggugaggacuaguaauaaggaaacuguaugaaugucugugggcaggaagugaagagauccuucuguaaagguuuuuggaauuaugucugcugaauaauaaacuuuuuugaaauaauaaaucugguagaaaaaugagaucucaaaggcucuuuucagagccaccaaaaaaaaaaaaaaaaaaaaaaaaaaaaaaaaaaaaaaaaaaaaaaaaaaaaaaaaaaaaaaaaagaauu

SEQ ID NO: 14707 - RNA, 1778 nt, Artificial Sequence
  mRNA product Design b-4 (hSL-A64-N5) comprising derived and/or modified sequence from LASV(Lassa virus/H.sapiens-wt/NGA/2016/ISTH_0009;Clade II)__AVO03571__GPC (opt5)
aggagagucccgcagucggcguccagcggcucugcuuguucgugugugugucguugcaggccuuauucaagcuuaccaugggccagaucauuaccuucuuucaagaggugccccacgucaucgaagagguuaugaacauugugcugaucgcccucagccugcuugcuauucugaaggggaucuacaauguggccacaugcggacuccugggccuugucuccuuccugcuccugugugggagaucuugcagcacgaccuauaaaggaguguacgaacugcagacacucgagcuggacauggcgucccuuaacaugaccaugccucugucuuguacaaagaauaacagccaucacuauaucaugguuggcaaugaaaccgggcucgagcugacacuuaccaacacguccauuaucaaucauaaauuuugcaaccugucugaugcucacaagaaaaaucucuacgaccaugcccugaugagcauuaucuccaccuuccaccugagcauuccgaacuuuaaucaguaugaggccaugucuugugauuucaacggaggccggaucuccgugcaguacaaucucagccacucuuaugcugucgacgccgcuaaccauugcggcacaauugccaauggggugcugcaaaccuuuaugcgcauggcguggggaggcuccuacaucgcccuugauagcgggaagggaucuugggacuguaucaugacauccuaccaguaucugauuauccagaacaccacgugggaagaucacugccaguucagcagacccuccccuauuggcuaccucgggcugcuuucucaacggacacgcgacaucuauauuagcagacggcugcucggaaccuuuacauggacccuguccgauagcgagggcaacgaaacccccggcggguacugucugacacgcuggaugcucaucgaggcugagcugaagugcuucggaaauacggccguugcuaaauguaacgaaaagcaugacgaggaauuuugcgauaugcuuagacuguucgacuuuaauaaacaggccauccggcgccucaagaccgaggcgcagaugucuauucagcugaucaacaaagccgugaaugcucuuauuaacgaucaacugaucaugaagaaucaccucagagacauuaugggcaucccuuauugcaacuacuccaaguauugguaccugaaucacacagucaccgggaaaacaagccugccccgguguuggcucgugucuaacggaagcuaccugaaugaaacccauuucuccgacgauaucgagcagcaggccgacaacaugauuacggagcuucugcaaaaggaauauaucgaucgccagggcaaaacaccucucgggcugguggaccuguucgucuuuucuaccagcuucuaccuuauuuccaucuuucuccaccugguuaagauuccgacccauagacacaucacaggaaaacccugcccuaagccccaucggcugaaucacaugggcauuuguagcugcggccucuauaaccacccuggggugcccgugaaauggaagcgcugaggacuaguaauaaggaaacuguaugaaugucugugggcaggaagugaagagauccuucuguaaagguuuuuggaauuaugucugcugaauaauaaacuuuuuugaaauaauaaaucugguagaaaaaugagaucucaaaggcucuuuucagagccaccaaaaaaaaaaaaaaaaaaaaaaaaaaaaaaaaaaaaaaaaaaaaaaaaaaaaaaaaaaaaaaaaagaauu

SEQ ID NO: 14708 - RNA, 1778 nt, Artificial Sequence
  mRNA product Design b-4 (hSL-A64-N5) comprising derived and/or modified sequence from LASV(Lassa virus/H.sapiens-wt/NGA/2016/ISTH_0017;Clade II)__AVO03567__GPC (opt5)
aggagagucccgcagucggcguccagcggcucugcuuguucgugugugugucguugcaggccuuauucaagcuuaccaugggccagaucauuaccuucuuucaagaggugccccacgucaucgaagagguuaugaacauugugcugaucgcccucagccugcuugcuauucugaaggggaucuacaauguggccacaugcggacucuucggccuggucuccuuucuucugcucugugggagaucuugcagcacgaccuauaaaggaguguacgaacugcagacacuggagcucgacauggcgucccugaacaugaccaugccucuuucuuguacaaagaauaacagccaucacuauaucaugguuggcaaugaaaccgggcuggagcucacacugaccaacacguccauuaucaaucauaaauucugcaaccuuucugaugcucacaagaaaaaucuguacgaccaugcccucaugagcauuaucuccaccuuucaccugagcauuccgaacuucaaucaguaugaggccaugucuugugauuuuaacggaggcaagaucuccgugcaguacaaucugagccacacauaugcuauugacgccgcuaaccauugcggcaccaucgccaaugggguccuccaaacauucaugcggauggcguggggaggcucuuacaucgcccuggauuccgggaagggaagcugggacuguauuaugaccucuuaccaguaucuuaucauucagaacacgacaugggaagaucacugccaguuuucccgccccagcccuaucggcuaccuggggcuccugucccaaagaacccgggacauuuauaucucucgcagacuucugggaacauucaccuggacccucagcgauuccgagggcaacgaaacacccggcggguacugucugacgcgguggaugcugaucgaggcugagcucaaaugcuuuggaaauaccgccguggcuaaguguaacgaaaaacaugacgaggaguucugcgauaugcugcgccuuuuugacuucaauaagcaggccauuagacggcugaaaacagaagcgcagaugagcauccagcucauuaacaaggccguuaaugcucugaucaacgaucaacuuauuaugaagaaucaucugcgcgacaucaugggcaucccuuauugcaacuacucuaaauauugguaccucaaucacaccgugacagggaagaccucccugcccagauguuggcuggucagcaacggaucuuaccucaaugaaacgcacuucagcgacgauauugagcagcaggccgacaacaugaucacagagcugcuucaaaaagaauauauggaucggcagggcaagaccccucuggggcucguggaccuguuuguguucuccaccucuuuuuaccugauuagcaucuuccuucaccucguccgcauuccgacacauagacacguuaucggaaaacccugcccuaagccccaucggcugaaucacaugggcauuuguuccugcggccuguauaaacacccuggggugcccgugaaguggaagcgcugaggacuaguaauaaggaaacuguaugaaugucugugggcaggaagugaagagauccuucuguaaagguuuuuggaauuaugucugcugaauaauaaacuuuuuugaaauaauaaaucugguagaaaaaugagaucucaaaggcucuuuucagagccaccaaaaaaaaaaaaaaaaaaaaaaaaaaaaaaaaaaaaaaaaaaaaaaaaaaaaaaaaaaaaaaaaagaauu

SEQ ID NO: 14709 - RNA, 1778 nt, Artificial Sequence
  mRNA product Design b-4 (hSL-A64-N5) comprising derived and/or modified sequence from LASV(Lassa virus/H.sapiens-wt/NGA/2018/ISTH_0959;Clade II)__AVV65099__GPC (opt5)
aggagagucccgcagucggcguccagcggcucugcuuguucgugugugugucguugcaggccuuauucaagcuuaccaugggccagaucauuaccuucuuucaagaggugccccacgucaucgaagagguuaugaacauugugcugaucgcccucagccugcuugcuauucugaaggggaucuacaauguggucacaugcggacucuucggccugguguccuuucuucugcucugugggagaucuugcagcacgaccuauaaaggaguuuacgaacugcagacacuggagcucgacauggccucccugaacaugaccaugccucuuucuuguacaaagaauaacagccaucacuauaucauggugggcaaugaaaccgggcuggagcucacacugaccaacacguccauuaucaaucauaaauucugcaaccuuucugaugcgcacaagaaaaaucuguacgaccaugcucucaugagcauuaucuccaccuuucaccugagcauuccgaacuucaaucaguaugaggccaugucuugugauuuuaacggaggcaagaucuccguccaguacaaucugagccacgccuaugcuauugacgccgcuaaccauugcggcacaaucgccaauggggugcuccaaaccuucaugcggauggcguggggaggcucuuacaucgcccuggauuccgggaagggaagcugggacuguauuaugacaucuuaccaguaucuuaucauucagaacaccacgugggaagaucacugccaguuuucccgccccagcccuaucggcuaccuggggcuccugucccaaagaacacgggacauuuauaucucucgcagacuucugggaaccuucacauggacccucagcgauuccgagggcaacgaaacccccggcggguacugucugacacgguggaugcugaucgaggcugagcucaaaugcuuuggaaauacggccguugcuaaguguaacgaaaaacaugacgaggaguucugcgauaugcugcgccuuuuugacuucaauaagcaggccauuagacggcugaaaaccgaagcgcagaugagcauccagcucauuaacaaggccgugaaugcucugaucaacgaucaacuuauuaugaagaaucaucugcgcgacaucaugggcaucccuuauugcaacuacucuaaauauugguaccucaaucacacagucaccgggaagacaucccugcccagauguuggcuggugagcaacggaucuuaccucaaugaaacccacuucagcgacgauauugagcagcaggccgacaacaugaucacggagcugcuucaaaaagaauauauugaucggcagggcaagacaccucuggggcucguggaccuguuugucuucuccaccucuuuuuaccugaucagcauuuuccuucaccucguuaaaaucccgacccaucgccacgugauuggaaagcccugcccuaaaccccauagacugaaucacaugggcaucuguuccugcggccuguauaagcacccuggggugcccgucaaguggaaacggugaggacuaguaauaaggaaacuguaugaaugucugugggcaggaagugaagagauccuucuguaaagguuuuuggaauuaugucugcugaauaauaaacuuuuuugaaauaauaaaucugguagaaaaaugagaucucaaaggcucuuuucagagccaccaaaaaaaaaaaaaaaaaaaaaaaaaaaaaaaaaaaaaaaaaaaaaaaaaaaaaaaaaaaaaaaaagaauu

SEQ ID NO: 14710 - RNA, 1778 nt, Artificial Sequence
  mRNA product Design b-4 (hSL-A64-N5) comprising derived and/or modified sequence from LASV(LASV003-NIG-2008;Clade II)__AIT17580__GPC (opt5)
aggagagucccgcagucggcguccagcggcucugcuuguucgugugugugucguugcaggccuuauucaagcuuaccaugggccagaucauuaccuucuuucaagaggugccccacgucaucgaagagguuaugaacauugugcugaucgcccucagccugcuugcuauucugaaggggaucuacaauguggccacaugcggacucuucggccuggucuccuuucuucugcucugugggagaucuugcagcacgaccuauaaaggaguguacgaacugcagacacuggagcucgacauggcgucccugaacaugaccaugccucuuucuuguacaaagaauaacagccaucacuauaucaugguuggcaaugaaaccgggcuggagcucacacugaccaacacguccauuaucaaucauaaauucugcaaccuuucugaugcucacaagaaaaaucuguacgaccaugcccucaugagcauuaucuccaccuuucaccugagcauuccgaacuucaaucaguaugaggccaugucuugugauuuuaacggaggcaagaucuccgugcaguacaaucugagccacacauaugcugucgacgccgcuaaccauugcggcaccauugccaauggggugcuccaaacauucaugcggauggcguggggaggcucuuacaucgcccuggauuccgggaagggaagcugggacuguaucaugaccucuuaccaguaucuuauuauccagaacacgacaugggaagaucacugccaguuuucccgccccagcccuauuggcuaccuggggcuccugucccaaagaacccgggacaucuauauuucucgcagacuucugggaacauucaccuggacccucagcgauuccgagagcaacgaaacacccggcggcuacugucugacgcgguggaugcugaucgaggcugagcucaaaugcuuugggaauaccgccguugcuaaguguaacgaaaaacaugacgaggaguucugcgauaugcugcgccuuuuugacuucaauaagcaggccaucagacggcugaaagcggaagcccagaugucuauucagcucaucaacaaggcugugaaugcccugauuaacgaucaacuuaucaugaagaaucaucugcgcgacauuaugggaaucccuuauugcaacuacuccaaauauugguaccucaaucacacagucaccggcagaacaagccugccccgguguuggcuggugucuaacgggagcuaccucaaugaaacccacuucuccgacgauaucgagcagcaggcugacaacaugauuacggagcugcuucaaaaggaauauauggaucgccagggaaaaacaccucugggccucguggaccuguuugucuucucuaccagcuuuuaccugaucuccauuuuccuucaccucguuaagaucccgacccauagacacgugauugggaaacccugcccuaagccccaucggcugaaucacaugggaaucuguagcugcggccuguauaaacacccuggcgugcccgucaaguggaagcgcugaggacuaguaauaaggaaacuguaugaaugucugugggcaggaagugaagagauccuucuguaaagguuuuuggaauuaugucugcugaauaauaaacuuuuuugaaauaauaaaucugguagaaaaaugagaucucaaaggcucuuuucagagccaccaaaaaaaaaaaaaaaaaaaaaaaaaaaaaaaaaaaaaaaaaaaaaaaaaaaaaaaaaaaaaaaaagaauu

SEQ ID NO: 14711 - RNA, 1778 nt, Artificial Sequence
  mRNA product Design b-4 (hSL-A64-N5) comprising derived and/or modified sequence from LASV(LASV035-NIG-2009;Clade II)__AIT17588__GPC (opt5)
aggagagucccgcagucggcguccagcggcucugcuuguucgugugugugucguugcaggccuuauucaagcuuaccaugggccagaucauuaccuucuuucaagaggugccccacgucaucgaagagguuaugaacauugugcugaucgcccucagccugcuugcuauucugaaggggaucuacaauguggccacaugcggacucuucggccuggucuccuuucuucugcucugugggagaucuugcagcacgaccuauaaaggaguguacgaacugcagacacuggagcucgacauggcgucccugaacaugaccaugccucuuucuuguacaaagaauaacagccaucacuauaucaugguuggcaaugaaaccgggcuggagcucacacugaccaacacguccauuaucaaucauaaauucugcaaccuuucugaugcucacaagaaaaaucuguacgaccaugcccucaugagcauuaucuccaccuuucaccugagcauuccgaacuucaaucaguaugaggccaugucuugugauuuuaacggaggcaagaucuccgugcaguacaaucugagccacgcuuaugccgucgacgcugccaaccauugcggcacaauugcgaauggggugcuccaaaccuucaugcggauggccuggggaggcucuuacaucgcucuggauuccgggaagggaagcugggacuguaucaugacaucuuaccaguaucuuauuauccagaacaccacgugggaagaucacugccaguuuucccgccccagcccuauuggcuaccuggggcuccugucccaaagaacacgggacaucuauauuucucgcagacuucugggaaccuucacauggacccucagcgauuccgagggcaacgaaacccccggcggguacugucugacacgguggaugcugaucgaggccgagcucaaaugcuuuggaaauacggcuguugccaaguguaacgaaaaacaugacgaggaguucugcgauaugcugcgccuuuuugacuucaauaagcaggcgaucagacggcugaaagccgaagcucagaugagcauucagcucaucaacaaggccgugaaugcucugauuaacgaucaacuuaucaugaagaaucaucugcgcgacauuaugggcaucccuuauugcaacuacucuaaauauugguaccucaaucacaccgucacagggaagaccucccugcccagauguuggcuggugagcaacggaucuuaccucaaugaaacacacuucagcgacgauaucgagcagcaggccgacaacaugauuaccgagcugcuucaaaaagaauauaucgaucggcagggcaagacgccucuggggcucguggaccuguuugucuucuccacaucuuuuuaccugauuagcaucuuccuucaccucguuaaaauuccgacccaucgccacgugaucggaaagcccugcccuaaaccccauagacugaaucacaugggcauuuguuccugcggccuguauaagcacccuggggugcccgucaaguggaaacggugaggacuaguaauaaggaaacuguaugaaugucugugggcaggaagugaagagauccuucuguaaagguuuuuggaauuaugucugcugaauaauaaacuuuuuugaaauaauaaaucugguagaaaaaugagaucucaaaggcucuuuucagagccaccaaaaaaaaaaaaaaaaaaaaaaaaaaaaaaaaaaaaaaaaaaaaaaaaaaaaaaaaaaaaaaaaagaauu

SEQ ID NO: 14712 - RNA, 1778 nt, Artificial Sequence
  mRNA product Design b-4 (hSL-A64-N5) comprising derived and/or modified sequence from LASV(LASV1000-NIG-2009;Clade II)__AIT17782__GPC (opt5)
aggagagucccgcagucggcguccagcggcucugcuuguucgugugugugucguugcaggccuuauucaagcuuaccaugggccagaucauuaccuucuuucaagaggugccccacgucaucgaagagguuaugaacauugugcugaucgcccucagccugcuugcuauucugaaggggaucuacaauguggccacaugcggacucuucggccuggucuccuuucuucugcucugugggagaucuugcagcacgaccuauaaaggaguguacgaacugcagacacuggagcucgacauggcgucccugaacaugaccaugccucuuucuuguacaaagaauaacagccaucacuauaucaugguuggcaaugaaaccgggcuggagcucacacugaccaacacguccauuaucaaucauaaauucugcaaccuuucugaugcucacaagaaaaaucuguacgaccaugcccucaugagcauuaucuccaccuuucaccugagcauuccgaacuucaaucaguaugaggccaugucuugugauuuuaacggaggcaagaucuccgugcaguacaaucugagccacacauaugcugucgacgccgcuaaccauugcggcaccauugccaauggggugcuccaaacauucaugcggauggcguggggaggcucuuacaucgcccuggauuccgggaagggaagcugggacuguaucaugaccucuuaccaguaucuuauuauccagaacacgacaugggaagaucacugccaguuuucccgccccagcccuauuggcuaccuggggcuccugucccaaagaacccgggacaucuauauuucucgcagacuucugggaacauucaccuggacccucagcgauuccgagggcaacgaaacacccggcggguacugucugacgcgguggaugcugaucgaggcugagcucaaaugcuuuggaaauaccgccguugcuaaguguaacgaaaaacaugacgaggaguucugcgauaugcugcgccuuuuugacuucaauaagcaggccaucaaaagacugaagacagaagcgcagaugagcauucagcucaucaacaaggccgugaaugcucugauuaacgaucaacuuaucaugaaaaaucaucugcgggacauuaugggcaucccuuauugcaacuacucuaaguauugguaccucaaucacaccgucacagggaaaaccucccugccccgcuguuggcuggugagcaacggaucuuaccucaaugaaacgcacuucagcgacgauaucgagcagcaggccgacaacaugauuacagagcugcuucaaaaggaauauaucgauagacagggcaaaaccccucuggggcucguggaccuguuugucuucuccaccucuuuuuaccugauuagcaucuuccuucaccucguuaagauuccgacacaucggcacguggugggaaaacccugcccuaagccccaucgccugaaucacaugggcaucuguuccugcggccuguauaagcacccugggguccccgugaaauggaagagaugaggacuaguaauaaggaaacuguaugaaugucugugggcaggaagugaagagauccuucuguaaagguuuuuggaauuaugucugcugaauaauaaacuuuuuugaaauaauaaaucugguagaaaaaugagaucucaaaggcucuuuucagagccaccaaaaaaaaaaaaaaaaaaaaaaaaaaaaaaaaaaaaaaaaaaaaaaaaaaaaaaaaaaaaaaaaagaauu

SEQ ID NO: 14713 - RNA, 1778 nt, Artificial Sequence
  mRNA product Design b-4 (hSL-A64-N5) comprising derived and/or modified sequence from LASV(LASV221-NIG-2010;Clade II)__AIT17624__GPC (opt5)
aggagagucccgcagucggcguccagcggcucugcuuguucgugugugugucguugcaggccuuauucaagcuuaccaugggccagaucauuaccuucuuucaagaggugccccacgucaucgaagagguuaugaacauugugcugaucgcccucagccugcuugcuauucugaaggggaucuacaauguggccacaugcggacucuucggccuggucuccuuucuucugcucugugggagaucuugcagcacgaccuauaaaggaguguacgaacugcagacacuggagcucgacauggcgucccugaacaugaccaugccucuuucuuguacaaagaauaacagccaucacuauaucaugguuggcaaugaaaccgggcuggagcucacacugaccaacacguccauuaucaaucauaaauucugcaaccuuucugaugcucacaagaaaaaucuguacgaccaugcccucaugagcauuaucuccaccuuucaccugagcauuccgaacuucaaucaguaugaggccaugucuugugauuuuaacggaggcaagaucuccgugcaguacaaucugagccacacauaugcuauugacgccgcuaaccauugcggcaccaucgccaaugggguccuccaaacauucaugcggauggcguggggaggcucuuacaucgcccuggauuccgggaagggaagcugggacuguauuaugaccucuuaccaguaucuuaucauucagaacacgacaugggaagaucacugccaguuuucccgccccagcccuaucggcuaccuggggcuccugucccaaagaacccgggacauuuauaucucucgcagacuucugggaacauucaccuggacccucagcgauuccgagggcaacgaaacacccggcggguacugucugacgcgguggaugcugaucgaggcugagcucaaaugcuuuggaaauaccgccguggcuaaguguaacgaaaaacaugacgaggaguucugcgauaugcugcgccuuuuugacuucaauaagcaggccauuagacggcugaaaacagaagcgcagaugagcauccagcucauuaacaaggccguuaaugcucugaucaacgaucaacuuauuaugaagaaucaucugcgcgacaucaugggcaucccuuauugcaacuacucuaaauauugguaccucaaucacaccgugacagggaagaccucccugcccagauguuggcuggucagcaacggaucuuaccucaaugaaacgcacuucagcgacgauauugagcagcaggccgacaacaugaucacagagaugcugcaaaaagaauauauggaucggcagggcaagaccccucuugggcugguggaccucuuuguguucuccaccucuuuuuaccugauuagcaucuuccugcaccuugucaaaauuccgacacaucgccacguuaucggaaagcccugcccuaaaccccauagacucaaucacaugggcauuuguuccugcggccuguauaagcacccuggggugcccgugaaguggaaacggugaggacuaguaauaaggaaacuguaugaaugucugugggcaggaagugaagagauccuucuguaaagguuuuuggaauuaugucugcugaauaauaaacuuuuuugaaauaauaaaucugguagaaaaaugagaucucaaaggcucuuuucagagccaccaaaaaaaaaaaaaaaaaaaaaaaaaaaaaaaaaaaaaaaaaaaaaaaaaaaaaaaaaaaaaaaaagaauu

SEQ ID NO: 14714 - RNA, 1778 nt, Artificial Sequence
  mRNA product Design b-4 (hSL-A64-N5) comprising derived and/or modified sequence from LASV(LASV237-NIG-2010;Clade II)__AIT17638__GPC (opt5)
aggagagucccgcagucggcguccagcggcucugcuuguucgugugugugucguugcaggccuuauucaagcuuaccaugggccagaucauuaccuucuuucaagaggugccccacgucaucgaagagguuaugaacauugugcugaucgcccucagccugcuugcuauucugaaggggaucuacaauguggccacaugcggacucuucggccuggucuccuuucuucugcucugugggagaucuugcagcacgaccuauaaaggaguguacgaacugcagacacuggagcucgacauggcgucccugaacaugaccaugccucuuucuuguacaaagaauaacagccaucacuauaucaugguuggcaaugaaaccgggcuggagcucacacugaccaacacguccauuaucaaucauaaauucugcaaccuuucugaugcucacaagaaagaccuguacgaucaugcccucaugagcauuaucuccaccuuucaccugagcauuccgaauuucaaccaguaugaggccaugucuugugacuuuaauggaggcaagaucuccgugcaguacaaccugagccacacauaugcugucgaugccgcuaaucauugcggcaccauugccaacggggugcuccaaacauucaugcggauggcguggggaggcucuuacaucgcccuggacuccgggaagggaagcugggauuguaucaugaccucuuaccaguaucuuauuauccagaauacgacaugggaagaccacugccaguuuucccgccccagcccuauuggcuaccuggggcuccugucccaaagaacccgggauaucuauauuucucgcagacuucugggaacauucaccuggacccucagcgacuccgagggcaacgaaacacccggcggguacugucugacgcgguggaugcugaucgaggcugagcucaaaugcuuuggaaacaccgccguugcuaaguguaaugaaaaacaugaugaggaguucugcgacaugcugcgccuuuuugauuucaacaagcaggccaucagacggcugaaaacagaagcgcagaugagcauucagcucaucaauaaggccgugaacgcucugauuaaugaccaacuuaucaugaagaaccaucugcgcgacauuaugggcaucccuuauugcaauuacucuaaauauugguaccucaaccacaccgucacagggaagaccucccugcccagauguuggcuggugagcaauggaucuuaccucaacgaaacgcacuucagcgaugacaucgagcagcaggccgauaauaugauuacagagcugcuucaaaaagaauauauggaccggcagggcaagaccccucuggggcucguggaucuguuugucuucuccaccucuuuuuaccugaucagcauuuuccuucaccucaucaaaauuccgacacaucgccacaucaccggaaagcccugcccuaaaccccauagacugaaccacaugggcauuuguuccugcggccuguauaagcacccugggguucccgugaaguggaaacggugaggacuaguaauaaggaaacuguaugaaugucugugggcaggaagugaagagauccuucuguaaagguuuuuggaauuaugucugcugaauaauaaacuuuuuugaaauaauaaaucugguagaaaaaugagaucucaaaggcucuuuucagagccaccaaaaaaaaaaaaaaaaaaaaaaaaaaaaaaaaaaaaaaaaaaaaaaaaaaaaaaaaaaaaaaaaagaauu

SEQ ID NO: 14715 - RNA, 1778 nt, Artificial Sequence
  mRNA product Design b-4 (hSL-A64-N5) comprising derived and/or modified sequence from LASV(LASV253-NIG-2011;Clade II)__AIT17670__GPC (opt5)
aggagagucccgcagucggcguccagcggcucugcuuguucgugugugugucguugcaggccuuauucaagcuuaccaugggccagaucauuaccuucuuucaagaggugccccacgucaucgaagagguuaugaacauugugcugaucgcccucagccugcuugcuauucugaaggggaucuacaauguggccacaugcggacucuucggccuggucuccuuucuucugcucugugggagaucuugcagcacgaccuauaaaggaguguacgaacugcagacacuggagcucgacauggcgucccugaacaugaccaugccucuuucuuguacaaagaauaacagccaucacuauaucaugguuggcaaugaaaccgggcuggagcucacacugaccaacacguccauuaucaaucauaaauucugcaaccuuucugaugcucacaagaaaaaucuguacgaccaugcccucaugagcauuaucuccaccuuucaccugagcauuccgaacuucaaucaguaugaggccaugucuugugauuuuaacggaggcaagaucuccgugcaguacaaucugagccacacauaugcugucgacgccgcuaaccauugcggcaccauugccaauggggugcuccaaacauucaugcggauggcguggggaggcucuuacaucgcccuggauuccgggaagggaagcugggacuguaucaugaccucuuaccaguaucuuauuauccagaacacgacaugggaagaucacugccaguuuucccgccccagcccuauuggcuaccuggggcuccugucccaaagaacccgggacaucuauauuucucgcagacuucugggaacauucaccuggacccucagcgauuccgagggcaacgaaacacccggcggguacugucugacgcgguggaugcugaucgaggcugagcucaaaugcuuuggaaauaccgccguugcuaaguguaacgaaaaacaugacgaggaguucugcgauaugcugcgccuuuuugacuucaauaagcaggccaucagacggcugaaagcggaagcccagaugagcauucagcucaucaacaaggcugugaaugcccugauuaacgaucaacuuaucaugaagaaucaucugcgcgacauuaugggcaucccuuauugcaacuacucuaaauauugguaccucaaucacacagucaccgggagaacaucccugccccgguguuggcuggugagcaacggaucuuaccucaaugaaacccacuucagcgacgauaucgagcagcaggcugacaacaugauuacggagcugcuucaaaaggaauauaucgaucgccagggcaaaacaccucuggggcucguggaccuguuugucuucuccaccucuuuuuaccugauuagcaucuuccuucaccucguuaagauuccgacccauagacacaucauuggaaaacccugcccuaagccccaucggcugaaucacaugggcaucuguuccugcggccuguauaaacacccuggggugcccgugaaguggaagcgcugaggacuaguaauaaggaaacuguaugaaugucugugggcaggaagugaagagauccuucuguaaagguuuuuggaauuaugucugcugaauaauaaacuuuuuugaaauaauaaaucugguagaaaaaugagaucucaaaggcucuuuucagagccaccaaaaaaaaaaaaaaaaaaaaaaaaaaaaaaaaaaaaaaaaaaaaaaaaaaaaaaaaaaaaaaaaagaauu

SEQ ID NO: 14716 - RNA, 1778 nt, Artificial Sequence
  mRNA product Design b-4 (hSL-A64-N5) comprising derived and/or modified sequence from LASV(LASV254-NIG-2011;Clade II)__AIT17674__GPC (opt5)
aggagagucccgcagucggcguccagcggcucugcuuguucgugugugugucguugcaggccuuauucaagcuuaccaugggccagaucauuaccuucuuucaagaggugccccacgucaucgaagagguuaugaacauugugcugaucgcccucagccugcuugcuauucugaaggggaucuacaauguggccacaugcggacucuucggccuggucuccuuucuucugcucugugggagaucuugcagcacgaccuauaaaggaguguacgaacugcagacacuggagcucgacaugaccaaccugaauaugacaaugccucuuuccuguaccaagaacaauucucaucacuauaucaugguuggcaacgaaacagggcuggagcucacccugacgaauaccagcauuaucaaccauaaauucugcaaucuuuccgaugcgcacaagaaaaaccuguacaaucaugcucucaugucuauuaucagcacauuucaccuguccauuccgaacuucaaucaguaugaggccaugagcugugacuuuaacggaggcaagaucucugugcaguacaaucugucccacagcuaugccgucgaugcugccaaccauugcggcaccauugcuaacggggugcuccaaacauucaugcggauggccuggggaggcucuuacaucgcgcuggacuccgggaagggaaauugggauuguaucaugaccagcuaccaguaucuuauuauccagaacacgacaugggaagaccacugccaguuuucucgccccuccccuauuggcuaccuggggcuccugagccaaagaacccgggauaucuauauuucccgcagacuucugggaacauucaccuggacccucucugacagcgagggcaaugaaacacccggcggguacugucugacgcgguggaugcugaucgaggccgagcucaaaugcuuuggaaacaccgcuguugccaaguguaaugaaaaacaugaugaggaguucugcgacaugcugcgccuuuuugauuucaacaagcaggcuaucagacggcugaaaacagaagcccaggcgaauauucagcucaucaacaaggccgugaaugcucugauuaacgaccaacuuaucaugaagaaucaucugcgcgauauuaugggcaucccuuauugcaacuacuccaaauauugguaccucaaucacaccgucacagggaagaccagccugcccagauguuggcuggugucuaacggauccuaccucaaugaaacgcacuucagcgacgacaucgagcagcaggccgauaacaugauuacagagcugcuucaaaaagaauauauggaccggcagggcaagaccccucuggggcucguggaucuguuugucuucucuaccagcuuuuaccugaucuccauuuuccuucaccucguuaaaaucccgacacaucgccacgugauuggaaagcccugcccuaaaccccauagacugaaccacaugggcaucuguucuugcggccuguauaagcacccuggggugcccgucaaguggaaacggugaggacuaguaauaaggaaacuguaugaaugucugugggcaggaagugaagagauccuucuguaaagguuuuuggaauuaugucugcugaauaauaaacuuuuuugaaauaauaaaucugguagaaaaaugagaucucaaaggcucuuuucagagccaccaaaaaaaaaaaaaaaaaaaaaaaaaaaaaaaaaaaaaaaaaaaaaaaaaaaaaaaaaaaaaaaaagaauu

SEQ ID NO: 14717 - RNA, 1778 nt, Artificial Sequence
  mRNA product Design b-4 (hSL-A64-N5) comprising derived and/or modified sequence from LASV(Nig08-A19;Clade III)__ADU56618__GPC (opt5)
aggagagucccgcagucggcguccagcggcucugcuuguucgugugugugucguugcaggccuuauucaagcuuaccaugggccagaucgugaccuucuuucaagaggucccccacguuauugaagaggugaugaacaucgugcugauugcccucagcauccuggcuauucuuaaggggcuguacaauaucgccacaugcggacucaucggccuggucacguuccuucugcucuccgggagaucuuguagcaugaccuauaaaggaguguacgaacugcagacacuggagcucaacaugaauacccugaacaugacaaugccucuuuccugcaccaagaauaacucucaucacuauauuaugguuggcaaugaaacagggcuggagcucacccugacgaacaccagccuucugcaucacaaauuuuguaaucucuccgacgcgcauaagaaaaaccuguacgaucacacacugaugucuaucauuagcaccuuccaccucuccaucccgaauuuuaaccaguaugaggcuaugagcugcgacuucaauggaggcaagauuacagugcaguacaaccugucucauuccuaugccaucgaugccgcuaaucacuguggcaccgucgccaacggggugcuucaaacguuuaugcggauggcuuggggaggcagcuacauugcccuggacucugggcgcggaaagugggauugcaucaugacauccuaccaguaucucaucauucagaacaccacaugggaagaccauugucaguucagcagacccucuccuaucggcuaccuggggcuucugucccaacggacccgcgauauuuauaucagcagacggcuccugggaaccuuuacauggacgcuguccgacucugagggcaaugaaacccccggcggguacugccucacacgcuggaugcugauugaggcggagcuuaaauguuucggaaacaccgccguugcuaagugcaaugaaaaacacgaugaggaauuuugugacaugcugagacucuucgauuuuaacaagcaggccauccggcgccugaaagcugaggcccagaugagcauccagcuuauuaauaaggcggugaacgcccugaucaaugaccaacucauuaugaagaaccaccugagagauaucaugggcauuccuuauugcaauuacuccaaauauugguaccugaaccauacaagcaccgggcggacgucucucccccgcugcuggcuggucuccaauggaagcuaccuuaacgaaacacacuucucugacgacaucgagcagcaggcugauaauaugaucaccgagaugcugcaaaaggaauaucucgacagacagggcaaaaccccucuggggcugguggaucuuuucguguuuagcacauccuucuaccucauuucuaucuuucugcaucuggucaagauuccgacccaccggcauaucguuggaaaacccuguccuaagccccaccgccucaaccacaugggcauuugcagcuguggccuguauaaacagccuggggugcccgugagauggaagcggugaggacuaguaauaaggaaacuguaugaaugucugugggcaggaagugaagagauccuucuguaaagguuuuuggaauuaugucugcugaauaauaaacuuuuuugaaauaauaaaucugguagaaaaaugagaucucaaaggcucuuuucagagccaccaaaaaaaaaaaaaaaaaaaaaaaaaaaaaaaaaaaaaaaaaaaaaaaaaaaaaaaaaaaaaaaaagaauu

SEQ ID NO: 14718 - RNA, 1781 nt, Artificial Sequence
  mRNA product Design b-4 (hSL-A64-N5) comprising derived and/or modified sequence from LASV(G1180-SLE-2010;Clade IV)__AIT17168__GPC (opt5)
aggagagucccgcagucggcguccagcggcucugcuuguucgugugugugucguugcaggccuuauucaagcuuaccaugggccagaucgugaccuucuuucaagaggucccccacguuauugaagaggugaugaacaucgugcugauugcccucagcauccuggcuguccuuaaggggcuguacaauuucgccacaugcggacucgugggccugcuuacguuucugcuccugugugggagauccugcaccgcgucucgguauaaaggaguuuacgaacugcagacacucgagcugaacauggaaacccuuaauaugacaaugccucugagcuguaccaagaacaauucccaucacuauauuauggugggcaacgagacagggcucgagcugacccuuacgaauaccucuaucaucaaccauaaauucugcaaucugagcgacgcucacaagaaaaaccucuacgaucaugcccugauguccauuaucucuacauuucaccugagcauuccgaauuucaaccaguaugaagccauguccugugacuuuaauggaggcaagaucagcguccaguacaaccucucucacuccuaugcuggcgaugccgcuaaucauugcgggaccguggccaacggaguucugcaaacauucaugcgcauggcguggggcgggagcuacauugcccuugacucuggacacggcuccugggauuguaucaugaccagcuaccaguaucugauuauccagaacacgacaugggaggaccauugccaguuuucuagacccuccccuaucggguaccucggacugcuuagccaacggacccgcgauauuuauaucuccagacggcugcucggcacauucaccuggacccugucugacagcgaaggcaaggauacacccgggggauacugucugacgcgcuggaugcucauugaggcugagcugaaaugcuuuggcaauaccgccguggcuaaguguaacgaaaaacacgacgaggaguucugcgauaugcuuagacuguuugacuucaauaagcaggccauccagcggcucaaagcggaagcccagauguccauucaacugaucaacaaggcugucaaugcccuuaucaacgaucagcugauuaugaagaaucaccuccgcgacaucauggggauuccuuauugcaacuacagcaaauauugguaccugaaucauacaaccacaggaaagaccucucugcccaaauguuggcucguguccaacggcagcuaccugaaugaaacgcacuucucugacgauaucgagcagcaagcugacaacaugauuacagagaugcuucagaaggaauauauggagagacaggggaaaaccccucugggacucguggaucuguuugucuucagcaccuccuuuuaccugaucucuaucuuccuucaucucguuaagauuccgacacaccggcauaucgugggcaaaagcugccccaagccucaccgccugaaucacaugggcauuuguuccugcgggcuguauaagcagcccggagugccugucaaauggaagagaugaggacuaguaauaaggaaacuguaugaaugucugugggcaggaagugaagagauccuucuguaaagguuuuuggaauuaugucugcugaauaauaaacuuuuuugaaauaauaaaucugguagaaaaaugagaucucaaaggcucuuuucagagccaccaaaaaaaaaaaaaaaaaaaaaaaaaaaaaaaaaaaaaaaaaaaaaaaaaaaaaaaaaaaaaaaaagaauu

SEQ ID NO: 14719 - RNA, 1781 nt, Artificial Sequence
  mRNA product Design b-4 (hSL-A64-N5) comprising derived and/or modified sequence from LASV(G1442-SLE-2011;Clade IV)__AIT17180__GPC (opt5)
aggagagucccgcagucggcguccagcggcucugcuuguucgugugugugucguugcaggccuuauucaagcuuaccaugggccagaucgugaccuucuuucaagaggucccccacguuauugaagaggugaugaacaucgugcugauugcccucagcauccuggcuguccuuaaggggcuguacaauguggccacaugcggacucauuggccugguuacguuccuucugcucugugggagauccugcaccacaacccuguauaaaggaguguacgaacugcagacacucgagcugaacauggaaacccuuaauaugacaaugccucugucuuguaccaagaacaauagccaucacuauauccgggucggcaacgagacggggcucgagcugacccuuacaaauaccuccaucauuaaccauaaauuuugcaaucugucugacgcgcacaagaaaaaccucuacgaucaugcucugaugagcaucauuuccacauuccaccugucuaucccgaauuuuaaccaguaugaagccaugagcugugacuucaauggaggcaagauuuccgugcaguacaaccucagccacucuuaugccggcgaugcugccaaucauugcgggaccguugcuaacggagugcugcaaacguuuaugcgcauggccuggggcggguccuacaucgcgcuugacagcggaagaggcaacugggauuguauuaugacaucuuaccaguaucugaucauccagaauaccacaugggacgaucacugccaguucucccggcccagcccuauuggguaccucggacugcuuucucaacgcaccagagacgucuauaucucccggcgccugcucggcaccuuuacauggacgcugagcgauuccgagggcaaggacacccccgggggauacugucugacaagauggaugcucauugaagccgagcugaaaugcuucggcaacaccgcuguggccaaguguaaugagaaacaugaugaagaguuuugcgacaugcuucggcuguucgauuuuaacaagcaggcuauccagcgccucaaagccgaagcgcagaugucuauucaacugaucaauaaggccgugaacgcucuuaucaaugaccagcugauuaugaagaaccaccucagagacaucauggggauuccuuauugcaauuacagcaaauauugguaccugaacaauacagccaccggaaagacgucccugcccaaauguuggcucaucagcaacggcucuuaccugaaugagacacacuucuccgaugacauugaacaggaggcugauaacaugaucaccgagaugcuucaaaaggaauauauggagcggcaggggaaaaccccucugggacucgucgaccuguucguuuuuagcacaucuuucuaccugaucagcauuuuucuucaucucgugaagaucccgacccaccgccauauugugggcaaauccugccccaagccucacagacugaaucauaugggcaucuguucuugcgggcuguauaagcagcccggagucccugugcgguggaaacgcugaggacuaguaauaaggaaacuguaugaaugucugugggcaggaagugaagagauccuucuguaaagguuuuuggaauuaugucugcugaauaauaaacuuuuuugaaauaauaaaucugguagaaaaaugagaucucaaaggcucuuuucagagccaccaaaaaaaaaaaaaaaaaaaaaaaaaaaaaaaaaaaaaaaaaaaaaaaaaaaaaaaaaaaaaaaaagaauu

SEQ ID NO: 14720 - RNA, 1781 nt, Artificial Sequence
  mRNA product Design b-4 (hSL-A64-N5) comprising derived and/or modified sequence from LASV(G3010-SLE-2013;Clade IV)__AIT17344__GPC (opt5)
aggagagucccgcagucggcguccagcggcucugcuuguucgugugugugucguugcaggccuuauucaagcuuaccaugggccagaucgugaccuucuuucaagaggucccccacguuauugaagaggugaugaacaucgugcugauugcccucagcauccuggcuguccuuaaggggcuguacaauuucgccacaugcggacucgugggccugguuacguuucuucugcucugugggagauccugcaccacaucucuguauaaaggaguguacgaacugcagacccucgagcugaacauggaaacacuuaauaugaccaugccucugagcuguacaaagaacaauucccaucacuauauuauggucggcaacgagaccgggcucgagcugacgcuuaccaauacaucuaucaucaaccauaaauucugcaaucugagcgacgcgcacaagaaaaaccucuacaaucaugcucugauguccauuaucucuaccuuucaccugagcauuccgaacuucaaucaguaugaagccauguccugugauuuuaacggaggcaagaucagcgugcaguacaaucucucucacuccuaugccggcgacgcugccagccauugcgggacaguugcuaacggagugcugcaaaccuucaugcggauggccuggggcgggucuuacauugcgcuugauuccggauacggcaagugggacuguaucaugacgagcuaucaguaccugauuauccagaacacaaccugggaggaucacugccaguuuucucgccccuccccuaucggguaucucggacugcuuagccaaagaacacgggacauuuacaucucccgcagacugcucggcaccuucaccuggacacugucugauagcgaaggcaaagacacgcccgggggauauugucugacccgguggaugcucauugaggccgagcugaagugcuuuggcaauacagcugucgccaaauguaacgaaaagcaugaugaggaguucugcgacaugcuucgccuguuugauuucaauaaacaggcuauccagagacucaagaccgaagcccagauguccauucaacugaucaacaaggcggugaaugcccuuaucaacgaccagcugauuaugaaaaaucaccuccgggauaucauggggauuccuuacugcaacuauagcaaguacugguaccugaaucacacaaccacgggaaaaacaucucugcccaaguguuggcucguguccaacggcagcuaucugaaugaaacccauuucucugacgacaucgagcagcaagcugauaacaugauuaccgagaugcuucagaaagaauacauggagcgccaggggaagacaccucugggacucgucgaccuguuuguuuucagcaccuccuuuuaucugaucucuaucuuccuucaccucgugaaaauuccgacacauagacacaucgugggcaagagcugccccaagccucaucggcugaaucacaugggcauuuguuccugcgggcuguacaaacagcccggagucccugugcgcuggaagagaugaggacuaguaauaaggaaacuguaugaaugucugugggcaggaagugaagagauccuucuguaaagguuuuuggaauuaugucugcugaauaauaaacuuuuuugaaauaauaaaucugguagaaaaaugagaucucaaaggcucuuuucagagccaccaaaaaaaaaaaaaaaaaaaaaaaaaaaaaaaaaaaaaaaaaaaaaaaaaaaaaaaaaaaaaaaaagaauu

SEQ ID NO: 14721 - RNA, 1781 nt, Artificial Sequence
  mRNA product Design b-4 (hSL-A64-N5) comprising derived and/or modified sequence from LASV(G502-SLE-2009;Clade IV)__AIT17126__GPC (opt5)
aggagagucccgcagucggcguccagcggcucugcuuguucgugugugugucguugcaggccuuauucaagcuuaccaugggccagaucgugaccuucuuucaagaggucccccacguuauugaagaggugaugaacaucgugcugauugcccucagcauccuggcuguccuuaaggggcuguacaauuucgccacaugcggacucgugggccugcuuacguuucugcuccugugugggagauccugcaccacaggacuguauaaaggcguuuacgaacuccagacccuggagcuuaacauggaaacacugaauaugaccaugccucucucuuguacaaagaacaauagccaucacuauauuaugguggggaacgagaccggacuggagcuuacgcugaccaauacauccaucaucaaccauaaauucugcaaucucucugacgcgcacaagaaaaaccuguacgaucaugcucugaugagcauuaucuccaccuuucaccucucuauuccgaauuucaaccaguaugaagccaugagcugugacuuuaauggcggcaagaucuccguccaguacaaccugagccacucuuaugccggggaugcugccgaccauugcggaacaguggcuaauggcguucuucaaaccuucaugcggauggccuggggaggguccuacauugcgcuggauagcggccgcgggagaugggacuguaucaugacgucuuaccaguaucucauuauccagaacacaaccugggaggaucacugccaguuuucccggcccagcccuaucggauaccugggccuucugucucaacgcacaagagacauuuauaucucccggcgccuccugggcaccuucaccuggacacugagcgauuccgaagggaaggacacgcccggaggcuacugucucaccagauggaugcugauugaggccgagcuuaaaugcuuugggaacacagcuguggccaaguguaaugaaaaacaugaugaggaguucugcgacaugcugcggcucuuugauuucaacaagcaggcuauccagcgccugaaagccgaagcgcagaugucuauucaacuuaucaauaaggccgucaacgcucugaucaaugaccagcucgugaugaagaaccaccugagagacauuaugggaaucccuuauugcaauuacagccgguauugguaccugaaccacaccacaaccggccgcacgucccuccccaaauguuggcuggugagcaaugggucuuaccuuaacgaaacacauuucuccgaugacauugagcagcaagccgauaauaugaucaccgagaugcugcagaaggaauauauggagagacagggaaaaaccccucucggccuggucgaccuguuuguuuucagcacaucuuuuuaccuuauuagcaucuuccuccaccuggugaagaucccgacccaucggcacauugugggcaaauccugccccaagccucaucgccugaaccacauggggaucuguucuugcggacucuauaaacagcccggcgucccugugaaguggaagagaugaggacuaguaauaaggaaacuguaugaaugucugugggcaggaagugaagagauccuucuguaaagguuuuuggaauuaugucugcugaauaauaaacuuuuuugaaauaauaaaucugguagaaaaaugagaucucaaaggcucuuuucagagccaccaaaaaaaaaaaaaaaaaaaaaaaaaaaaaaaaaaaaaaaaaaaaaaaaaaaaaaaaaaaaaaaaagaauu

SEQ ID NO: 14722 - RNA, 1781 nt, Artificial Sequence
  mRNA product Design b-4 (hSL-A64-N5) comprising derived and/or modified sequence from LASV(G733-SLE-2010;Clade IV)__AIT17154__GPC (opt5)
aggagagucccgcagucggcguccagcggcucugcuuguucgugugugugucguugcaggccuuauucaagcuuaccaugggccagaucgugaccuucuuucaagaggucccccacguuauugaagaggugaugaacaucgugcugauugcccucagcauccuggcuguccuuaaggggcuguacaauuucgccacaugcggaauugugggccucguuuccuuucugcuucugugugggagaucuugcacgaccagccucuauaaaggaguguacgaacugcagacacuggagcucaacauggaaacccugaauaugacaaugccucuuuccuguaccaagaacaauucucaucacuauaucauggucggcaacgagacagggcuggagcucacccugacgaauaccagcaucauuaaccauaaauucugcaaucuuuccgacgcgcacaagaaaaaccuguacgaucaugcucucaugucuaucauuagcacauuucaccuguccaucccgaauuucaaccaguaugaagccaugagcugugacuuuaauggaggcaagauuucugugcaguacaaccugucccacagcuaugccggcgaugcugccaaucauugcgggaccaucgcuaacggaguucuccaaacauucaugcggauggccuggggcgggucuuacauugcgcuggacuccggacgcgauagaugggacuguaucaugaccagcuaccaguaucuuaucauucagaacacgacaugggaggaucacugccaguuuucucggcccuccccuaucggcuaccuggggcuccugagccaacgcaccagagacauuuauaucucccggcgccuucugggaacauucaccuggacccucucugauagcgaaggcaaggacacacccggcggguacugucugacgagauggaugcugauugaggccgagcucaaaugcuuuggaaauaccgcuguggccaaguguaacgaaaaacaugaugaggaguucugcgacaugcugcggcuuuuugauuucaauaagcaggcuauccagcgccugaaagccgaagcgcagauguccauccaacucauuaacaaggccgucaaugcucugaucaacgaccagcuuauuaugaagaaucaccugagagacaucaugggcauuccuuauugcaacuacagcaaauauugguaccucaaucacacaaccacagggaagaccucucugcccaaauguuggcugguguccaacggaagcuaccucaaugaaacgcauuucucugaugacaucgagcagcaagccgauaacaugaucacagagaugcugcagaaggaauauauggagcggcagggcaaaaccccucuugggcugguggaccucuuugucuucagcaccuccuuuuaccugauuucuaucuuccugcaccuuguuaagauuccgacacaucgccacguggugggaaaaagcugccccaagccucauagacucaaucacaugggcaucuguuccugcggccuguaugggcagcccggagucccugugaaguggaaacggugaggacuaguaauaaggaaacuguaugaaugucugugggcaggaagugaagagauccuucuguaaagguuuuuggaauuaugucugcugaauaauaaacuuuuuugaaauaauaaaucugguagaaaaaugagaucucaaaggcucuuuucagagccaccaaaaaaaaaaaaaaaaaaaaaaaaaaaaaaaaaaaaaaaaaaaaaaaaaaaaaaaaaaaaaaaaagaauu

SEQ ID NO: 14723 - RNA, 1781 nt, Artificial Sequence
  mRNA product Design b-4 (hSL-A64-N5) comprising derived and/or modified sequence from MOPV/LASV reassortant(IGS-1;Clade IV)__AFY05576__GPC (opt5)
aggagagucccgcagucggcguccagcggcucugcuuguucgugugugugucguugcaggccuuauucaagcuuaccaugggccagaucgugaccuucuuucaagaggucccccacguuauugaagaggugaugaacaucgugcugauugcccucagcguccuggcugugcuuaaggggcuguacaauuucgccacaugcggacucguuggccuggugacguuucuucugcucugugggagauccugcaccacaucucuguauaaaggagucuacgaacugcagacccucgagcugaacauggaaacacuuaauaugaccaugccucugagcuguacaaagaacaauucccaucacuauaucauggugggcaacgagaccgggcucgagcugacgcuuaccaauacaucuauuaucaaccauaaauucugcaaucugagcgacgcgcacaagaaaaaccucuacgaucaugcucugauguccaucauuucuaccuuucaccugagcaucccgaauuucaaccaguaugaagccauguccugugacuuuaauggaggcaagauuagcguucaguacaaccucucucacuccuaugccggcgaugcugccaaucauugcgggacaguggcuaacggaguccugcaaaccuucaugcggauggccuggggcgggagcuacaucgcgcuugacucuggacgcggcaacugggauuguauuaugacguccuaccaguaucugaucauucagaauacaaccugggaggaccacugccaguuuagcagacccucuccuaucggguaccucggacugcuuucccaacggacacgcgauaucuauauuagcagacggcugcucggcaccuucaccuggacacuguccgacucugaaggcgaggauacgcccgggggauacugucugacccgcuggaugcucaucgaggccgaacugaagugcuuuggcaacacagcuguggccaaauguaaugagaagcaugacgaagaguucugcgauaugcuuagacuguuugacuucaacaaacaggcuauucagcggcucaaggccgaagcgcagaugagcauccaacugauuaauaaagccgugaacgcucuuaucaaugaucagcugaucaugaagaaccaccuccgcgacauuauggggaucccuuauugcaauuacuccaaguauugguaccugaaccacaccacaaccggaagaacgagccugcccaaauguuggcucgucucuaauggcuccuaccugaacgagacacauuucagcgacgauauugagcagcaagccgacaauaugaucaccgaaaugcuucagaaggaguauauggaacggcaggggaaaaccccucugggacucguugaucuguuuguguucucuaccagcuuuuaccugauuuccaucuuccuucaccucgugaagaucccgacacaucgccacauugucggcaaaucuugccccaagccucauagacugaaccacaugggcaucuguagcugcgggcuguauaaacagcccggagugccuguuaaguggaagcggugaggacuaguaauaaggaaacuguaugaaugucugugggcaggaagugaagagauccuucuguaaagguuuuuggaauuaugucugcugaauaauaaacuuuuuugaaauaauaaaucugguagaaaaaugagaucucaaaggcucuuuucagagccaccaaaaaaaaaaaaaaaaaaaaaaaaaaaaaaaaaaaaaaaaaaaaaaaaaaaaaaaaaaaaaaaaagaauu

SEQ ID NO: 14724 - RNA, 1781 nt, Artificial Sequence
  mRNA product Design b-4 (hSL-A64-N5) comprising derived and/or modified sequence from LASV(LM765-SLE-2012;Clade IV)__AIT17814__GPC (opt5)
aggagagucccgcagucggcguccagcggcucugcuuguucgugugugugucguugcaggccuuauucaagcuuaccaugggccagaucgugaccuucuuucaagaggucccccacguuauugaagaggugaugaacaucgugcugauugcccucagcauccuggcuguccuuaaggggcuguacaauuucgccacaugcggacucgugggccugguuacguuucuucugcucugugggagauccugcaccacaucucuguauaaaggaguguacgaacugcagacccucgagcugaacauggaaacacuuaauaugaccaugccucugagcuguacaaagaacaauucccaucacuauauuauggucggcaacgagaccgggcucgagcugacgcuuaccaauacaucuaucaucgaccauaaauucugcaaccugagcgaugcgcaccggaagaaucucuacgaccaugcucugauguccauuaucucuaccuuucaccugagcauuccgaacuucaaucaguaugaagccauguccugugauuuuaacggaggcaaaaucagcgugcaguacaaucucucucacuccuaugccaaggacgcugccgaucauugcggcacaguugcuaacggggugcugcaaaccuucaugcgcauggccuggggaggcagcuacauugcgcuugacucugggagaggacggugggauuguaucaugacguccuaccaguaucugauuauccagaauacaaccugggaggaccacugccaguuuagccgccccucuccuaucggcuaccucgggcugcuuucccaaagaacacgggauauuuauaucagccgcagacugcucggaaccuucaccuggacacuguccgacucugaaggcaaggauacgcccggcggguacugucugacccgguggaugcucauugaggccgagcugaaaugcuuuggaaacacagcugucgccaaguguaacgaaaaacaugacgaggaguucugcgauaugcuucgccuguuugacuucaauaagcaggcuauccagagacucaaagccgaagcgcagaugagcauucaacugaucaacaaggccgugaaugcucuuaucaacgaccagcugauuaugaagaaucaccuccgggauaucaugggcauuccuuauugcaacuacuccaaauauugguaccugaaucacaccacaaccgggaagacgagccugcccaaauguuggcucgugucuaacggauccuaccugaaugaaacacauuucagcgacgauaucgagcagcaagccgacaacaugauuaccgagaugcuucagaaggaauauauggagcgccagggcaaaaccccucuggggcucgucgaucuguuuguuuucucuaccagcuuuuaccugaucuccaucuuccuucaccucgugaagauuccgacacauagacacaucgugggaaaacccugcccuaagccccaucggcugaaucacaugggcauuuguucuugcggccuguauaagcagccugggguccccgugaaauggaagcgcugaggacuaguaauaaggaaacuguaugaaugucugugggcaggaagugaagagauccuucuguaaagguuuuuggaauuaugucugcugaauaauaaacuuuuuugaaauaauaaaucugguagaaaaaugagaucucaaaggcucuuuucagagccaccaaaaaaaaaaaaaaaaaaaaaaaaaaaaaaaaaaaaaaaaaaaaaaaaaaaaaaaaaaaaaaaaagaauu

SEQ ID NO: 14725 - RNA, 1781 nt, Artificial Sequence
  mRNA product Design b-4 (hSL-A64-N5) comprising derived and/or modified sequence from LASV(LM776-SLE-2012;Clade IV)__AIT17824__GPC (opt5)
aggagagucccgcagucggcguccagcggcucugcuuguucgugugugugucguugcaggccuuauucaagcuuaccaugggccagaucgugaccuucuuucaagaggucccccacguuauugaagaggugaugaacaucgugcugauugcccucagcauccuggcuguccuuaaggggcuguacaauuucgccacaugcggacucgugggccugguuacguuucuucugcucugugggagauccugcaccacaucuguguauaaaggagucuacgaacugcagacccuggagcucaacauggaaacacugaauaugaccaugccucuuagcuguacaaagaacaauucccaucacuauauuauggugggcaacgagaccgggcuggagcucacgcugaccaauacaucuaucaucaaccauaaauucugcaaucuuagcgacgcgcacaagaaaaaccuguacgaucaugcucucauguccauuaucucuaccuuucaccugagcauuccgaauuucaaccaguaugaagccauguccugugacuuuaauggaggcaagaucagcguucaguacaaccugucucacuccuaugccggcgaugcugccaaucauugcgggacaguggcuaacggaguccuccaaaccuucaugcggauggccuggggcgggagcuacauugcgcuggacucuggacacggcaagugggauuguaucaugacguccuaccaguaucuuauuauccagaacacaaccugggaggaccauugccaguuuagccgccccucuccuaucggguaccugggacuccugucccaaagaacacgggauauuuauaucagccgcagacuucugggcaccuucaccuggacacucuccgacucugaaggcaaagauacgcccgggggauacugucugacccgguggaugcugauugaggccgagcucaagugcuuuggcaauacagcuguggccaaauguaacgaaaagcacgacgaggaguucugcgauaugcugcgccuuuuugacuucaauaaacaggcuauccagagacugaaggccgaagcgcagaugagcauucaacucaucaacaaggccgugaaugcucugaucaacgaucagcuuauuaugaaaaaucaucugcgggacaucauggggauuccuuauugcaacuacuccaaguauugguaccucaaucacaccacaaccggaaaaacgagccugcccaaguguuggcuggucucuaacggcuccuaccucaaugaaacacacuucagcgacgauaucgagcagcaagccgacaacaugauuaccgagaugcugcagaaagaauauauggagcgccaggggaagaccccucuuggacugguugaucucuuuguguucucuaccagcuuuuaccugaucuccaucuuccugcaucuugugaaaauuccgacacacagacauaucgucggcaagucuugccccaagccucaccggcucaaucacaugggcauuuguagcugcgggcuguauaaacagcccggagugccuguucgcuggaagagaugaggacuaguaauaaggaaacuguaugaaugucugugggcaggaagugaagagauccuucuguaaagguuuuuggaauuaugucugcugaauaauaaacuuuuuugaaauaauaaaucugguagaaaaaugagaucucaaaggcucuuuucagagccaccaaaaaaaaaaaaaaaaaaaaaaaaaaaaaaaaaaaaaaaaaaaaaaaaaaaaaaaaaaaaaaaaagaauu

SEQ ID NO: 14726 - RNA, 1781 nt, Artificial Sequence
  mRNA product Design b-4 (hSL-A64-N5) comprising derived and/or modified sequence from LASV(Mad39;Clade IV)__ANH09722__GPC (opt5)
aggagagucccgcagucggcguccagcggcucugcuuguucgugugugugucguugcaggccuuauucaagcuuaccaugggccagaucgugaccuucuuucaagaggucccccacguuauugaagaggugaugaacaucgugcugauugcccucagcauccuggcuguccuuaaggggcuguacaauguggccacaugcggacucauuggccugguuacguuccuucugcucugugggagauccugcaccacaacccuguauaaaggaguguacgaacugcaggcgcucgagcugaacauggaaacacuuaauaugaccaugccucugucuuguacaaagaacaauagccaucacuauauccgggucggcaacgagaccgggcucgagcugacgcuuaccaauacaucccugaucaaccauaaauuuugcaaucucucugacgcucacaagaaaaaccuguacgaucaugcccugaugagcauuaucuccaccuuccaccucucuauuccgaauuuuaaccaguaugaagccaugagcugugacuucaaugauggaaagaucuccgugcaguacaaccugagccacacauaugcuggcgacaccgccaaucauugcggcacgguugcuaacggggugcuucaaacauuuaugcgcauggccuggggaggcucuuacauugcgcuggauuccgggagaggaggcugggacuguaucaugaccagcuaccaguaucucauuauccagaacacaaccugggaggaucacugccaguucucucggcccuccccuaucggguaccugggacuucugagccaacgcaccagagacauuuauaucucucggcgccuccugggcacauuuacguggacccuguccgauagcgaaggcaaggacacacccgggggauacugucucaccagauggaugcugauugaggccgagcuuaaaugcuucggcaauacagcugucgccaaguguaacgaaaaacaugaugaggaauuuugcgacaugcugcgccucuucgauuuuaauaagcaggcuauccagcggcugaaagccgaggcgcagauguccauucaacuuaucaacaaggccgugaaugcucugaucaacgaccagcucauuaugaagaaucaccugagagacaucauggggauuccuuauugcaacuacucuaaauauugguaccugaaucacaccgugacgggaaagacaagccuccccaaauguuggcuggucuccaacggcagcuaccuuaaugaaacccauuucucugaugacaucgagcagcaagccgauaacaugauuaccgagaugcugcagaaggaauauauggagcggcaggggaaaacaccucucggacugguugaccuguucguguuuuccaccagcuucuaccuuaucucuaucuuucuccaccuggugaagauuccgacacaucgccacgucgugggcaaacccugcccuaagccccauagacugaaucacaugggcaucuguagcugcggguucuauaagcagccuggaguucccgugcgguggaaacgcugaggacuaguaauaaggaaacuguaugaaugucugugggcaggaagugaagagauccuucuguaaagguuuuuggaauuaugucugcugaauaauaaacuuuuuugaaauaauaaaucugguagaaaaaugagaucucaaaggcucuuuucagagccaccaaaaaaaaaaaaaaaaaaaaaaaaaaaaaaaaaaaaaaaaaaaaaaaaaaaaaaaaaaaaaaaaagaauu

SEQ ID NO: 14727 - RNA, 1781 nt, Artificial Sequence
  mRNA product Design b-4 (hSL-A64-N5) comprising derived and/or modified sequence from LASV(Z0947-SLE-2011;Clade IV)__AIT17840__GPC (opt5)
aggagagucccgcagucggcguccagcggcucugcuuguucgugugugugucguugcaggccuuauucaagcuuaccaugggccagaucgugaccuucuuucaagaggucccccacguuauugaagaggugaugaacaucgugcugauugcccucagcauccuggcuguccuuaaggggcuguacaauuucgccacaugcggacucgugggccugguuacguuucuucugcucugugggagauccugcaccauuucucuguauaaaggaguguacgaacugcagacacucgagcugaacauggaaacccuuaauaugacaaugccucugagcuguaccaagaacaauucccaucacuauaucauggucggcaacgagacagggcucgagcugacccuuacgaauaccucuaucauuaaccauaaauucugcaaucugagcgacgcgcacaagaaaaaccucuacgaucaugcucugauguccaucauuucuacauuucaccugagcaucccgaauuucaaccaguaugaagccauguccugugacuuuaauggaggcaagauuagcgugcaguacaaccucucucacuccuaugccggcgaugcugccaaucauugcgggaccguugcuaacggagugcugcaaacauucaugcggauggccuggggcgggagcuacaucgcgcuugacucuggacgcgauagaugggacuguauuaugaccuccuaccaguaucugaucauccagaacacgacaugggaggaucacugccaguuuagccggcccucuccuauuggcuaccucgggcugcuuucccaacgcaccagagacaucuauauuagccggcgccugcucggaacauucaccuggacccuguccgauucugaaggcaaggacacacccggcggguacugucugacgagauggaugcucaucgaggccgagcugaaaugcuuuggaaauaccgcugucgccaaguguaacgaaaaacaugaugaggaguucugcgacaugcuucggcuguuugauuucaauaagcaggcuauucagcgccucaaagccgaagcgcagaugagcauccaacugaucaacaaggccgugaaugcucuuauuaacgaccagcugaucaugaagaaucaccucagagacauuaugggcaucccuuauugcaacuacuccaaauauugguaccugaaucacacaaccacagggaagaccagccugcccaaauguuggcucgugucuaacggauccuaccugaaugaaacgcauuucagcgaugacauugagcagcaagccgauaacaugaucacagagaugcuucagaaggaauauauggagcggcagggcaaaaccccucuggggcucgucgaccuguuuguuuucucuaccagcuuuuaccugaucuccauuuuccuucaccucgugaagaucccgacacaucgccacauugugggaaaacccugcccuaagccccauagacugaaucacaugggcaucuguucuugcggccuguauaagcagccugggguccccgugaaauggaagcggugaggacuaguaauaaggaaacuguaugaaugucugugggcaggaagugaagagauccuucuguaaagguuuuuggaauuaugucugcugaauaauaaacuuuuuugaaauaauaaaucugguagaaaaaugagaucucaaaggcucuuuucagagccaccaaaaaaaaaaaaaaaaaaaaaaaaaaaaaaaaaaaaaaaaaaaaaaaaaaaaaaaaaaaaaaaaagaauu

SEQ ID NO: 14728 - RNA, 1812 nt, Artificial Sequence
  mRNA product Design b-4 (hSL-A100) comprising derived and/or modified sequence from LASV(Josiah;Clade IV)__NP_694870__GPC (opt1)
aggagagucccgcagucggcguccagcggcucugcuuguucgugugugugucguugcaggccuuauucaagcuuaccaugggccagaucgugaccuucuuccaggaggucccccacgugaucgaggaggugaugaacaucguccugaucgcccucagcgugcuggccgugcugaaggggcucuacaacuucgcgaccugcggccuggucgggcuggugacguuccuccugcugugcggccgcuccugcaccaccagccucuacaaggggguguacgagcugcagacccuggagcucaacauggagacgcugaacaugaccaugccgcuguccugcaccaagaacaacagccaccacuacaucauggucggcaacgagaccggccucgagcugacgcugaccaacaccuccaucaucaaccacaaguucugcaaccucagcgacgcccacaagaagaaccuguacgaccacgcccugauguccaucaucagcaccuuccaccucuccauccccaacuucaaccaguacgaggccaugagcugcgacuucaacgggggcaagaucuccgugcaguacaaccugagccacuccuacgccggggacgcggccaaccacugcggcacgguggccaacgggguccugcagaccuucaugcggauggccuggggcggcagcuacaucgcgcucgacuccgggcgcggcaacugggacugcaucaugaccagcuaccaguaccugaucauccagaacaccacgugggaggaccacugccaguucucccggcccagccccaucggguaccugggccuccugucccagcgcacccgggacaucuacaucagccgccggcugcucggcaccuucaccuggacgcugagcgacuccgaggggaaggacaccccgggcggguacugccugacccgcuggaugcucaucgaggccgagcugaagugcuucggcaacaccgccguggccaagugcaacgagaagcacgacgaggaguucugcgacaugcugcggcuguucgacuucaacaagcaggccauccagcgccugaaggcggaggcccagaugagcauccagcugaucaacaaggccgugaacgcccucaucaacgaccagcugaucaugaagaaccaccuccgggacaucauggggauccccuacugcaacuacuccaaguacugguaccucaaccacacgaccaccggccgcaccagccugcccaagugcuggcuggucuccaacggcagcuaccucaacgagacgcacuucuccgacgacaucgagcagcaggccgacaacaugaucaccgagaugcugcagaaggaguacauggagcggcaggggaagacgccccugggccucguggaccuguucguguucagcaccuccuucuaccugaucagcaucuuccugcaccucgucaagaucccgacccaccgccacaucguggggaaguccugccccaagccccaccggcugaaccacaugggcaucugcagcugcgggcuguacaagcagcccggcgugccggucaaguggaagcgcugaggacuaguaauaaggaaacuguaugaaugucugugggcaggaagugaagagauccuucuguaaagguuuuuggaauuaugucugcugaauaauaaacuuuuuugaaauaauaaaucugguagaaaaaugagaucucaaaggcucuuuucagagccaccaaaaaaaaaaaaaaaaaaaaaaaaaaaaaaaaaaaaaaaaaaaaaaaaaaaaaaaaaaaaaaaaaaaaaaaaaaaaaaaaaaaaaaaaaaaaaaaaaaaaa

SEQ ID NO: 14729 - RNA, 1809 nt, Artificial Sequence
  mRNA product Design b-4 (hSL-A100) comprising derived and/or modified sequence from LASV(LP;Clade I)__AAF86701__GPC (opt1)
aggagagucccgcagucggcguccagcggcucugcuuguucgugugugugucguugcaggccuuauucaagcuuaccaugggccagaucaucaccuucuuccaggaggugccccacgucaucgaggaggugaugaacaucgugcugaucgcccucagccugcuggccauccucaaggggcuguacaacaucgcgaccugcggcaucaucgggcuggucgccuuccucuuccugugcggcaaguccugcagccugacgcucaagggcggguacgagcugcagacccuggagcucaacauggagacccugaacaugaccaugccgcuguccugcacgaagaacagcucccaccacuacauccgcgugggcaacgagaccgggcucgagcugacccugaccaacacgagcaucaucaaccacaaguucugcaaccucuccgacgcccacaagaagaaccuguacgaccacgcccugaugagcaucaucuccaccuuccaccucagcauccccaacuucaaccaguacgaggccauguccugcgacuucaacggcgggaagaucagcgugcaguacaaccugucccacagcuacgcgggcgacgccgccgagcacugcgggaccgucgccaacggcgugcugcagaccuucaugcggauggcguggggcgggcgcuacaucgcccucgacuccggcaaggggaacugggacugcaucaugacgagcuaccaguaccugaucauccagaacaccaccugggaggaccacugccaguucucccggcccagccccaucggcuaccugggccuccugucccagcgcacccgggacaucuacaucagccgccggcugcucgggacguucaccuggacccugagcgacuccgagggcaacgagacccccgggggcuacugccugacgcgcuggaugcucaucgaggccgagcugaagugcuucgggaacaccgccguggccaagugcaacgagaagcacgacgaggaguucugcgacaugcugcggcuguucgacuucaacaagcaggcgauccgccggcugaaggccgaggcccagaugagcauccagcugaucaacaaggccgucaacgcccucaucaacgaccagcugaucaugaagaaccaccuccgcgacaucaugggcauccccuacugcaacuacuccaaguacugguaccucaaccacaccagcuccggccggaccagccugcccaagugcuggcugaucuccaacgggagcuaccucaacgagacgcaguucuccgacgacaucgagcagcaggcggacaacaugaucaccgagaugcugcagaaggaguacaucgagcgccagggcaagaccccgcuggggcucguggacaucuucaucuucagcaccuccuucuaccugaucagcaucuuccugcaccugaucaagaucccgacgcaccggcacaucgugggcaagcccugccccaagccccaccgccucaaccacaugggggucugcuccugcggccuguacaagcacccgggcgugcccaccaaguggaagcggugaggacuaguaauaaggaaacuguaugaaugucugugggcaggaagugaagagauccuucuguaaagguuuuuggaauuaugucugcugaauaauaaacuuuuuugaaauaauaaaucugguagaaaaaugagaucucaaaggcucuuuucagagccaccaaaaaaaaaaaaaaaaaaaaaaaaaaaaaaaaaaaaaaaaaaaaaaaaaaaaaaaaaaaaaaaaaaaaaaaaaaaaaaaaaaaaaaaaaaaaaaaaaaaaa

SEQ ID NO: 14730 - RNA, 1809 nt, Artificial Sequence
  mRNA product Design b-4 (hSL-A100) comprising derived and/or modified sequence from LASV(803213;Clade II)__AAF86703__GPC (opt1)
aggagagucccgcagucggcguccagcggcucugcuuguucgugugugugucguugcaggccuuauucaagcuuaccaugggccagaucaucaccuucuuccaggaggugccccacgucaucgaggaggugaugaacaucgugcugaucgcccucagccugcuggccauccucaaggggaucuacaacgucgcgaccugcggccuguucgggcugaucuccuuccuccugcugugcggccgcagcugcuccgugacguacaaggggguguacgagcuccagacccuggagcugaacauggccaaccucaacaugaccaugccgcugagcugcaccaagaacaacucccaccacuacaucauggucggcaacgagacgggccuggagcucacccugaccaacaccagcaucaucaaccacaaguucugcaaccuguccgacgcccacaagaagaaccucuacgaccacgcccugaugagcaucaucuccacguuccaccugagcauccccaacuucaaccaguacgaggccauguccugcgacuucaacgggggcaagaucagcgugcaguacaaccucucccacagcuucgcgguggacgccgccaaccacugcgggaccaucgccaacggcguccugcagaccuucaugcggauggcguggggcggguccuacaucgcccuggacagcggcaaggggaacugggacugcaucaugaccuccuaccaguaccucaucauccagaacacgaccugggaggaccacugccaguucagccgccccucccccaucggcuaccuggggcugcucagccagcggacccgcgacaucuacaucagccggcgccugcugggcaccuucacguggacccucuccgacagcgagggcaacgaggcccccgggggcuacugccugacccgguggaugcugaucgaggccgagcucaagugcuucgggaacaccgccguggcgaagugcaacgagaagcacgacgaggaguucugcgacaugcugcgccuguucgacuucaacaagcaggccaucaagcggcucaagacggaggcccagauguccauccagcugaucaacaaggccgugaacgcccugaucaacgaccagcucaucaugaagaaccaccuccgcgacaucaugggcauccccuacugcaacuacagccgguacugguaccugaaccacaccgucaccgggaagaccucccugccccgcugcuggcuggugagcaacggcuccuaccugaacgagacgcacuucagcgacgacaucgagcagcaggcggacaacaugaucaccgagaugcuccagaaggaguacauggaccggcagggcaagaccccgcuggggcugguggaccucuucgucuucuccaccagcuucuaccugaucuccaucuuccugcaccuggugaagaucccgacgcaccgccacaucgugggcaagcccugccccaagccccaccggcucaaccacauggggaucugcagcugcggccuguacaagcacccggggguccccgugaaguggaagcgcugaggacuaguaauaaggaaacuguaugaaugucugugggcaggaagugaagagauccuucuguaaagguuuuuggaauuaugucugcugaauaauaaacuuuuuugaaauaauaaaucugguagaaaaaugagaucucaaaggcucuuuucagagccaccaaaaaaaaaaaaaaaaaaaaaaaaaaaaaaaaaaaaaaaaaaaaaaaaaaaaaaaaaaaaaaaaaaaaaaaaaaaaaaaaaaaaaaaaaaaaaaaaaaaaa

SEQ ID NO: 14731 - RNA, 1809 nt, Artificial Sequence
  mRNA product Design b-4 (hSL-A100) comprising derived and/or modified sequence from LASV(GA391;Clade III)__CAA36645__GPC (opt1)
aggagagucccgcagucggcguccagcggcucugcuuguucgugugugugucguugcaggccuuauucaagcuuaccaugggccagaucgugaccuucuuccaggaggucccccacgugaucgaggaggugaugaacaucguccugaucgcccucagcauccuggccauccugaaggggcucuacaacguggcgaccugcggccugaucgggcuggugacguuccuccugcuguccggccgcagcugcucccucaucuacaaggggaccuacgagcugcagacccuggagcucaacauggagacccugaacaugacgaugccgcugagcugcaccaagaacaacucccaccacuacauccgggucggcaacgagaccggccucgagcugacccugacgaacaccagcauccucaaccacaaguucugcaaccuguccgacgcccacaagcgcaaccuguacgaccacagccucauguccaucaucagcaccuuccaccuguccauccccaacuucaaccaguacgaggccaugagcugcgacuucaacgggggcaagaucaccgugcaguacaaccugucccacagcuucgccguggacgccgcggggcacugcggcacgcucgccaacgggguccugcagaccuucaugcggauggccuggggcggcuccuacaucgcccuggacagcgggcgcggcaacugggacugcaucaugaccuccuaccaguaccucaucauccagaacaccacgugggacgaccacugccaguucagccggcccucccccaucggguaccugggccugcucagccagcgcacccgggacaucuacaucagccgccggcugcugggcaccuucaccuggacgcucuccgacagcgaggggaacgagaccccgggcggguacugccugacccgcuggaugcugaucgaggcggagcucaagugcuucggcaacaccgccguggccaagugcaacgagaagcacgacgaggaguucugcgacaugcugcggcuguucgacuucaacaagcaggccauccgccggcucaagacggaggcccagauguccauccagcugaucaacaaggcggugaacgcccugaucaacgaccagcucaucaugaagaaccaccuccgcgacaucauggggauccccuacugcaacuacagccgguacugguaccugaaccacaccuccaccggcaagaccagccugccccgcugcuggcugaucuccaacggcagcuaccugaacgagacgaaguucuccgacgacaucgagcagcaggccgacaacaugaucaccgagaugcuccagaaggaguacaucgaccggcaggggaagacgccccugggccuggucgaccuguucguguucagcaccuccuucuaccucaucagcaucuuccugcaccuggugaagaucccgacccaccgccacaucgucgggaagcccugccccaagccccaccggcucaaccacaugggcaucugcuccugcgggcuguacaagcagccgggcgugcccgugcgcuggaagcggugaggacuaguaauaaggaaacuguaugaaugucugugggcaggaagugaagagauccuucuguaaagguuuuuggaauuaugucugcugaauaauaaacuuuuuugaaauaauaaaucugguagaaaaaugagaucucaaaggcucuuuucagagccaccaaaaaaaaaaaaaaaaaaaaaaaaaaaaaaaaaaaaaaaaaaaaaaaaaaaaaaaaaaaaaaaaaaaaaaaaaaaaaaaaaaaaaaaaaaaaaaaaaaaaa

SEQ ID NO: 14732 - RNA, 1812 nt, Artificial Sequence
  mRNA product Design b-4 (hSL-A100) comprising derived and/or modified sequence from LASV(AV;Clade V)__CCA30314__GPC (opt1)
aggagagucccgcagucggcguccagcggcucugcuuguucgugugugugucguugcaggccuuauucaagcuuaccaugggccagaucgugaccuucuuccaggaggucccccacgugaucgaggaggugaugaacaucguccugaucgcccucagcauccuggccgugcugaaggggcucuacaacaucgcgaccugcggccugaucgggcugaucacguuccuccugcugugcggccgcuccugcagcuccaaccucuacaaggggguguacgagcugcagagccuggaccucaacauggagacccugaacaugaccaugccgcuguccugcaccaagaacaacagccaccacuacauccgggucggcaacgacacgggccucgagcugacccugaccaacaccuccauccucaaccacaaguucugcaaccugagcgacgcccacaagaaggaccuguacgaccacgcccucauguccaucaucagcacguuccaccuguccauccccaacuucaaccaguacgaggccaugagcugcgacuucaacgggggcaagaucuccgugcaguacaaccugagccacuccuacgccaucgacgcggccaaccacugcgggaccguggccaacggcauccuccagaccuucaugcgcauggccuggggcgggagcuacaucgcgcuggacuccggccgggggaacugggacugcaucaugaccagcuaccaguaccugaucauccagaacacgaccugggagaaccacugccaguucucccgccccagccccaucggcuaccucgggcugcugagccagcggacccgcgacaucuacaucucccggcgccuccugggcaccuucacguggacccugagcgacuccgagggcaacgccacccccgggggcuacugccucacccgguggaugcugaucgaggccgagcugaagugcuucgggaacacggccgucgccaagugcaacgagaagcacgacgaggaguucugcgacaugcuccgccuguucgacuucaacaagcaggcgaucagccggcugaaguccgaggcccagaugagcauccagcucaucaacaaggccgugaacgcccugaucaacgaccagcugaucaugaagaaccaccuccgcgacaucaugggcauccccuacugcaacuacuccaaguacugguaccugaaccacaccaucaccgggaagaccagccugcccaagugcuggcucguguccaacggcagcuaccugaacgagacgcacuucuccgacgacaucgagcagcaggccgacaacaugaucaccgagaugcugcagaaggaguacauggagcggcagggcaagaccccgcucgggcuggucgaccuguucguguucagcaccuccuucuaccugaucagcaucuuccuccgccuggugaagaucccgacgcaccggcacaucgucggcaagcccugccccaagccccaccgccugaaccacauggggaucugcuccugcggccucuacaagcagccgggggugcccgugcgguggaagcgcugaggacuaguaauaaggaaacuguaugaaugucugugggcaggaagugaagagauccuucuguaaagguuuuuggaauuaugucugcugaauaauaaacuuuuuugaaauaauaaaucugguagaaaaaugagaucucaaaggcucuuuucagagccaccaaaaaaaaaaaaaaaaaaaaaaaaaaaaaaaaaaaaaaaaaaaaaaaaaaaaaaaaaaaaaaaaaaaaaaaaaaaaaaaaaaaaaaaaaaaaaaaaaaaaa

SEQ ID NO: 14733 - RNA, 1809 nt, Artificial Sequence
  mRNA product Design b-4 (hSL-A100) comprising derived and/or modified sequence from LASV(Togo/2016/7082;Clade VI)__AMR44577__GPC (opt1)
aggagagucccgcagucggcguccagcggcucugcuuguucgugugugugucguugcaggccuuauucaagcuuaccaugggccagaucaucaccuucuuccaggaggugccccacgucaucgaggaggugaugaacaucgugcugaucgcccucagccugcuggccauccucaagggggucuacaacguggcgaccugcggcaucaucgggcuggugacguuccuguuccucugcggccgcuccugcagccugaucuacaagggguccuacgagcugcagacccucgagcugaacauggagacccugaacaugaccaugccgcucagcugcacgaagaacuccagccaccacuacauccgggucggcaacgagaccggccuggagcugacccucaccaacacguccaucaucaaccacaaguucugcaaccugagcgacgcccacaagcgcaaccuguacgaccacgcccucauguccauccugagcaccuuccaccuguccauccccaacuucaaccaguacgaggccaugagcugcgacuucaacgggggcaagaucuccgugcaguacaaccucagccacgccuacgcgguggacgccgccgagcacugcgggaccgucgccaacggcgugcugcagaccuucaugcggauggcguggggcggguccuacaucgcccuggacagcggccgcgggaacugggacugcaucaugacguccuaccaguaccucaucauccagaacaccaccugggaggaccacugccaguucagccggcccucccccaucggcuaccuggggcugcucagccagcgcacccgggacaucuacaucagccgccggcugcugggcacguucaccuggacccucuccgacagcgagggcaacgagacccccgggggcuacugccugacgcgcuggaugcugaucgaggccgagcucaagugcuucgggaacaccgccguggccaagugcaacgagaagcacgacgaggaguucugcgacaugcugcggcuguucgacuucaacaagcaggcgauccagcgccucaaguccgaggcccagaugagcauccagcugaucaacaaggccgucaacgcccugaucaacgaccagcucaucaugaagaaccaccuccgggacaugaugggcauccccuacugcaacuacuccaaguacugguaccugaaccacaccagcuccgggcgcaccagccugcccaagugcuggcugguguccaacggcagcuaccugaacgagacgcacuucuccgacgacaucgagcagcaggccgacaacaugaucaccgagaugcuccagaaggaguacaucgaccggcagggcaagaccccgcuggggcugguggaccucuucgucuucagcaccuccuucuaccugaucagcaucuuccugcaccugaucaagaucccgacgcaccgccacaucgugggcaagcccugccccaagccccaccggcucaaccacauggggaucugcuccugcggccuguacaagcagccgggggugcccacccgcuggaagcggugaggacuaguaauaaggaaacuguaugaaugucugugggcaggaagugaagagauccuucuguaaagguuuuuggaauuaugucugcugaauaauaaacuuuuuugaaauaauaaaucugguagaaaaaugagaucucaaaggcucuuuucagagccaccaaaaaaaaaaaaaaaaaaaaaaaaaaaaaaaaaaaaaaaaaaaaaaaaaaaaaaaaaaaaaaaaaaaaaaaaaaaaaaaaaaaaaaaaaaaaaaaaaaaaa

SEQ ID NO: 14734 - RNA, 1809 nt, Artificial Sequence
  mRNA product Design b-4 (hSL-A100) comprising derived and/or modified sequence from LASV(KAK-428;Clade n.d. (VII))__ANH09740__GPC (opt1)
aggagagucccgcagucggcguccagcggcucugcuuguucgugugugugucguugcaggccuuauucaagcuuaccaugggccagaucgugaccuucuuccaggaggucccccacgugaucgaggaggugaugaacaucguccugaucgcccucagccugcuggccauccucaaggggcuguacaacuucgcgaccugcggcgugaucgggcugaucacguuccuccugcugugcggccgcuccugcagcgccaccuacaaggggcaguacgagcuccagacccuggagcugaacauggagucccucaacaugaccaugccgcugagcugcacgaagaacaacucccaccacuacauccgggccggcaacaacaccggccuggagcucacccugaccaacacgagcaucaucucccacaaguucugcaaccugagcgacgcccacaagaagaaccucuacgaccacacccugauguccaucaucaccaccuuccaccugagcauccccaacuucaaccaguacgaggccauguccugcgacuucaacgggggcaagaucagcauccaguacaaccucucccacagcuacgcgggggacgccgcccagcacugcggcacgguggccaacgggguccugcagaccuucaugcgcauggcguggggcggcuccuaccuggcccucgacagcgggcggcgcggcugggacugcaucaucuccagcuaccaguaccugaucauccagaacaccaccugggacgaccacugccaguucucccggcccagccccaucggguaccugggcuucgugagccagaagacgcgcgacaucuacaucucccggcgccuccugggcaccuucaccuggacccugagcgacuccgaggggcacgacaugccgggcggguacugccucacgcgguggaugcugaucgaggccgaccugaagugcuucggcaacaccgccguggccaagugcaacgagaagcacgacgaggaguucugcgacauguggcgccucuucgacuucaacaagcaggcgauccagcggcugaaggccgaggcccagaugaacauccagcugaucaacaaggccgucaacgcccucaucaacgaccagcugaugaugaagaaccaccuccgcgacaucauggggauccccuacugcaacuacagcaaguucugguaccugaacaacaccaccacgggccggaccucccugccccgcugcuggcugaucagcaacggcuccuaccucaacgagacccacuucagcgacgacaucgagcagcaggcggacaacaugaucaccgagaugcugcagaaggaguacauggaccggcaggggaagacgccccugggccucguggaccuguucguguucuccaccagcuucuaccugaucaccaucuuccuccaccuggucaagaucccgacccaccgccacaucguggggaagcccugccccaagccccaccggcugaaccacaugggcaucugcuccugcgggcuguacaagcagccgggcgugcccguccgcuggaagcggugaggacuaguaauaaggaaacuguaugaaugucugugggcaggaagugaagagauccuucuguaaagguuuuuggaauuaugucugcugaauaauaaacuuuuuugaaauaauaaaucugguagaaaaaugagaucucaaaggcucuuuucagagccaccaaaaaaaaaaaaaaaaaaaaaaaaaaaaaaaaaaaaaaaaaaaaaaaaaaaaaaaaaaaaaaaaaaaaaaaaaaaaaaaaaaaaaaaaaaaaaaaaaaaaa

SEQ ID NO: 14735 - RNA, 1809 nt, Artificial Sequence; identical to SEQ ID NO: 14729
  mRNA product Design b-4 (hSL-A100) comprising derived and/or modified sequence from LASV(Pinneo-NIG-1969;Clade I)__AIT17836__GPC (opt1)

SEQ ID NO: 14736 - RNA, 1809 nt, Artificial Sequence
  mRNA product Design b-4 (hSL-A100) comprising derived and/or modified sequence from LASV(ISTH0009-NIG-2011;Clade II)__AIT17404__GPC (opt1)
aggagagucccgcagucggcguccagcggcucugcuuguucgugugugugucguugcaggccuuauucaagcuuaccaugggccagaucaucaccuucuuccaggaggugccccacgucaucgaggaggugaugaacaucgugcugaucgcccucagccugcuggccauccucaaggggaucuacaacgucgcgaccugcggccuguucgggcugguguccuuccuccugcugugcggccgcagcugcuccacgaccuacaaggggguguacgagcuccagacccuggagcuggacauggccagccucaacaugaccaugccgcuguccugcacgaagaacaacagccaccacuacaucauggucggcaacgagaccggccuggagcucacccugaccaacacguccaucaucaaccacaaguucugcaaccugagcgacgcccacaagaagaaccucuacgaccacgcccugauguccaucaucagcaccuuccaccuguccauccccaacuucaaccaguacgaggccaugagcugcgacuucaacgggggcaagaucuccgugcaguacaaccucagccacgcguacgccguggacgccgccaaccacugcgggaccaucgcgaacggcguccugcagaccuucaugcggauggccuggggcggguccuacaucgcccuggacagcggcaagggguccugggacugcaucaugacgagcuaccaguaccucaucauccagaacaccaccugggaggaccacugccaguucucccgccccagccccaucggcuaccuggggcugcucagccagcggacccgcgacaucuacaucucccggcgccugcugggcacguucaccuggacccucagcgacuccgagggcaacgagacccccgggggcuacugccugacgcgguggaugcugaucgaggccgagcucaagugcuucgggaacaccgccguggcgaagugcaacgagaagcacgacgaggaguucugcgacaugcugcgccuguucgacuucaacaagcaggccauccggcgccucaagaccgaggcccagaugagcauccagcugaucaacaaggccgugaacgcccugaucaacgaccagcucaucaugaagaaccaccuccgggacaucaugggcaucccguacugcaacuacuccaaguacugguaccugaaccacaccgucacggggaagaccagccugccccgcugcuggcugguguccaacggcagcuaccugaacgagacccacuucuccgacgacaucgagcagcaggcggacaacaugaucaccgagcuccugcagaaggaguacauggaccggcagggcaagacgccccuggggcucguggaccuguucgucuucagcaccuccuucuaccugaucagcaucuuccugcaccucaucaagaucccgacccaccgccacaucaccggcaagcccugccccaagccccaccggcugaaccacauggggaucugcuccugcggccuguacaagcacccgggggugcccgugaaguggaagcgcugaggacuaguaauaaggaaacuguaugaaugucugugggcaggaagugaagagauccuucuguaaagguuuuuggaauuaugucugcugaauaauaaacuuuuuugaaauaauaaaucugguagaaaaaugagaucucaaaggcucuuuucagagccaccaaaaaaaaaaaaaaaaaaaaaaaaaaaaaaaaaaaaaaaaaaaaaaaaaaaaaaaaaaaaaaaaaaaaaaaaaaaaaaaaaaaaaaaaaaaaaaaaaaaaa

SEQ ID NO: 14737 - RNA, 1809 nt, Artificial Sequence
  mRNA product Design b-4 (hSL-A100) comprising derived and/or modified sequence from LASV(ISTH2010-NIG-2012;Clade II)__AIT17482__GPC (opt1)
aggagagucccgcagucggcguccagcggcucugcuuguucgugugugugucguugcaggccuuauucaagcuuaccaugggccagaucaucaccuucuuccaggaggugccccacgucaucgaggaggugaugaacaucgugcugaucgcccucagccugcuggccauccucaaggggaucuacaacgucgcgaccugcggccuguucgggcugguguccuuccuccugcugugcggccgcagcugcuccacgaccuacaaggggguguacgagcuccagacccuggagcuggacauggccagccucaacaugaccaugccgcuguccugcacgaagaacaacagccaccacuacaucauggucggcaacgagaccggccuggagcucacccugaccaacacguccaucaucaaccacaaguucugcaaccugagcgacgcccacaagaagaaccucuacgaccacgcccugauguccaucaucagcaccuuccaccuguccauccccaacuucaaccaguacgaggccaugagcugcgacuucaacgggggcaagaucuccgugcaguacaaccucagccacgcguacgccguggacgccgccaaccacugcgggaccaucgcgaacggcguccugcagaccuucaugcggauggccuggggcggguccuacaucgcccuggacagcggcaagggguccugggacugcaucaugacgagcuaccaguaccucaucauccagaacaucaccugggaggaccacugccaguucucccgccccagccccaucggcuaccuggggcugcucagccagcggacccgcgacaucuacaucucccggcgccugcugggcaccuucacguggacccucagcgacuccgagggcaacgagacccccgggggcuacugccugacccgguggaugcugaucgaggccgagcucaagugcuucgggaacacggccguggcgaagugcaacgagaagcacgacgaggaguucugcgacaugcugcgccuguucgacuucaacaagcaggccauccggcgccucaagaccgaggcccagaugagcauccagcugaucaacaaggccgugaacgcccugaucaacgaccagcucaucaugaagaaccaccuccgggacaucaugggcauccccuacugcaacuacuccaaguacugguaccugaaccacaccgucaccgggaagacgagccugccccgcugcuggcugguguccaacggcagcuaccugaacgagacccacuucuccgacgacaucgagcagcaggcggacaacaugaucaccgagcuccugcagaaggaguacaucgaccggcagggcaagaccccgcuggggcucguggaccuguucgucuucagcacguccuucuaccugaucagcaucuuccugcaccucgugaagaucccgacccaccgccacguggucggcaagcccugccccaagccccaccggcugaaccacauggggaucugcuccugcggccuguacaagcacccgggggugcccgugaaguggaagcgcugaggacuaguaauaaggaaacuguaugaaugucugugggcaggaagugaagagauccuucuguaaagguuuuuggaauuaugucugcugaauaauaaacuuuuuugaaauaauaaaucugguagaaaaaugagaucucaaaggcucuuuucagagccaccaaaaaaaaaaaaaaaaaaaaaaaaaaaaaaaaaaaaaaaaaaaaaaaaaaaaaaaaaaaaaaaaaaaaaaaaaaaaaaaaaaaaaaaaaaaaaaaaaaaaa

SEQ ID NO: 14738 - RNA, 1809 nt, Artificial Sequence
  mRNA product Design b-4 (hSL-A100) comprising derived and/or modified sequence from LASV(Lassa virus/H.sapiens-wt/NGA/2015/ISTH_0543;Clade II)__AVO03639__GPC (opt1)
aggagagucccgcagucggcguccagcggcucugcuuguucgugugugugucguugcaggccuuauucaagcuuaccaugggccagaucaucaccuucuuccaggaggugccccacgucaucgaggaggugaugaacaucgugcugaucgcccucagccugcuggccauccucaaggggaucuacaacgucgcgaccugcggccuguucgggcugguguccuuccuccugcugugcggccgcagcugcuccacgaccuacaaggggguguacgagcuccagacccuggagcuggacauggccaaccucaacaugaccaugccgcugagcugcacgaagaacaacucccaccacuacaucauggucggcaacgagaccggccuggagcucacccugaccaacacgagcaucaucaaccacaaguucugcaaccuguccgacgcccacaagaagaaccucuacgaccacgcccugaugagcaucaucuccaccuuccaccugagcauccccaacuucaaccaguacgaggccauguccugcgacuucaacgggggcaagaucagcgugcaguacaaccucucccacaccuacgcgguggacgccgccaaccacugcgggaccaucgccaacggcguccugcagacguucaugcggauggcguggggcgggagcuacaucgcccuggacuccggcaaggggagcugggacugcaucaugaccuccuaccaguaccucgugauccagaacaccaccugggaggaccacugccaguucagccgccccucccccaucggcuaccuggggcugcucagccagcggacgcgcgacaucuacaucagccggcgccugcugggcaccuucaccuggacccucuccgacagcgagggcaacgagacgcccgggggcuacugccugacccgguggaugcugaucgaggccgagcucaagugcuucgggaacaccgccguggccaagugcaacgagaagcacgacgaggaguucugcgacaugcugcgccuguucgacuucaacaagcaggcgauccggcgccucaagaccgaggcccagauguccauccagcugaucaacaaggccgucaacgcccugaucaacgaccagcucaucaugaagaaccaccuccgggacaucaugggcauccccuacugcaacuacagcaaguacugguaccugaaccacacggugaccgggaagaccucccugccccgcugcuggcuggugagcaacggcuccuaccugaacgagacccacuucagcgacgacaucgagcagcaggccgacaacaugaucacggagcuccugcagaaggaguacaucgaccggcagggcaagaccccgcuggggcucgucgaccuguucguguucuccaccagcuucuaccugaucuccaucuuccugcaccucgugaagaucccgacccaccgccacaucacgggcaagcccugccccaagccccaccggcugaaccacauggggaucugcagcugcggccuguacaagcacccggggguccccgugaaguggaagcgcugaggacuaguaauaaggaaacuguaugaaugucugugggcaggaagugaagagauccuucuguaaagguuuuuggaauuaugucugcugaauaauaaacuuuuuugaaauaauaaaucugguagaaaaaugagaucucaaaggcucuuuucagagccaccaaaaaaaaaaaaaaaaaaaaaaaaaaaaaaaaaaaaaaaaaaaaaaaaaaaaaaaaaaaaaaaaaaaaaaaaaaaaaaaaaaaaaaaaaaaaaaaaaaaaa

SEQ ID NO: 14739 - RNA, 1809 nt, Artificial Sequence
  mRNA product Design b-4 (hSL-A100) comprising derived and/or modified sequence from LASV(Lassa virus/H.sapiens-wt/NGA/2016/ISTH_0009;Clade II)__AVO03571__GPC (opt1)
aggagagucccgcagucggcguccagcggcucugcuuguucgugugugugucguugcaggccuuauucaagcuuaccaugggccagaucaucaccuucuuccaggaggugccccacgucaucgaggaggugaugaacaucgugcugaucgcccucagccugcuggccauccucaaggggaucuacaacgucgcgaccugcggccugcuggggcucguguccuuccugcugcucugcggccgcagcugcuccacgaccuacaaggggguguacgagcugcagacccuggagcucgacauggccagccugaacaugaccaugccgcuguccugcacgaagaacaacagccaccacuacaucauggucggcaacgagaccggccucgagcugacccugaccaacacguccaucaucaaccacaaguucugcaaccucagcgacgcccacaagaagaaccuguacgaccacgcccugauguccaucaucagcaccuuccaccucuccauccccaacuucaaccaguacgaggccaugagcugcgacuucaacgggggccggaucuccgugcaguacaaccugagccacuccuacgcgguggacgccgccaaccacugcgggaccaucgccaacggcguccugcagaccuucaugcgcauggcguggggcgggagcuacaucgcccucgacuccggcaaggggagcugggacugcaucaugacguccuaccaguaccugaucauccagaacaccaccugggaggaccacugccaguucagccggcccagccccaucggcuaccuggggcuccugucccagcgcacccgggacaucuacaucagccgccggcugcucggcacguucaccuggacccuguccgacagcgagggcaacgagacccccgggggcuacugccugacgcgcuggaugcucaucgaggccgagcugaagugcuucgggaacaccgccguggccaagugcaacgagaagcacgacgaggaguucugcgacaugcugcggcuguucgacuucaacaagcaggcgauccgccggcugaagaccgaggcccagauguccauccagcugaucaacaaggccgugaacgcccucaucaacgaccagcugaucaugaagaaccaccuccgcgacaucaugggcaucccguacugcaacuacagcaaguacugguaccucaaccacaccgucacggggaagaccucccugccccggugcuggcuggugagcaacggcuccuaccucaacgagacccacuucagcgacgacaucgagcagcaggccgacaacaugaucaccgagcugcugcagaaggaguacaucgaccgccagggcaagacgccccucgggcugguggaccuguucgucuucuccaccagcuucuaccugaucuccaucuuccuccaccuggugaagaucccgacccaccggcacaucaccggcaagcccugccccaagccccaccgccugaaccacauggggaucugcagcugcggccucuacaaccacccgggggugcccgucaaguggaagcggugaggacuaguaauaaggaaacuguaugaaugucugugggcaggaagugaagagauccuucuguaaagguuuuuggaauuaugucugcugaauaauaaacuuuuuugaaauaauaaaucugguagaaaaaugagaucucaaaggcucuuuucagagccaccaaaaaaaaaaaaaaaaaaaaaaaaaaaaaaaaaaaaaaaaaaaaaaaaaaaaaaaaaaaaaaaaaaaaaaaaaaaaaaaaaaaaaaaaaaaaaaaaaaaaa

SEQ ID NO: 14740 - RNA, 1809 nt, Artificial Sequence
  mRNA product Design b-4 (hSL-A100) comprising derived and/or modified sequence from LASV(Lassa virus/H.sapiens-wt/NGA/2016/ISTH_0017;Clade II)__AVO03567__GPC (opt1)
aggagagucccgcagucggcguccagcggcucugcuuguucgugugugugucguugcaggccuuauucaagcuuaccaugggccagaucaucaccuucuuccaggaggugccccacgucaucgaggaggugaugaacaucgugcugaucgcccucagccugcuggccauccucaaggggaucuacaacgucgcgaccugcggccuguucgggcugguguccuuccuccugcugugcggccgcagcugcuccacgaccuacaaggggguguacgagcuccagacccuggagcuggacauggccagccucaacaugaccaugccgcuguccugcacgaagaacaacagccaccacuacaucauggucggcaacgagaccggccuggagcucacccugaccaacacguccaucaucaaccacaaguucugcaaccugagcgacgcccacaagaagaaccucuacgaccacgcccugauguccaucaucagcaccuuccaccuguccauccccaacuucaaccaguacgaggccaugagcugcgacuucaacgggggcaagaucuccgugcaguacaaccucagccacaccuacgcgaucgacgccgccaaccacugcgggaccaucgccaacggcgugcugcagacguucaugcggauggcguggggcggguccuacaucgcccuggacagcggcaagggguccugggacugcaucaugaccagcuaccaguaccucaucauccagaacaccaccugggaggaccacugccaguucucccgccccagccccaucggcuaccuggggcugcucagccagcggacgcgcgacaucuacaucucccggcgccugcugggcaccuucaccuggacccucagcgacuccgagggcaacgagacgcccgggggcuacugccugacccgguggaugcugaucgaggccgagcucaagugcuucgggaacaccgccgucgccaagugcaacgagaagcacgacgaggaguucugcgacaugcugcgccuguucgacuucaacaagcaggcgauccggcgccucaagaccgaggcccagaugagcauccagcugaucaacaaggccgugaacgcccugaucaacgaccagcucaucaugaagaaccaccuccgggacaucaugggcauccccuacugcaacuacuccaaguacugguaccugaaccacacggugaccgggaagaccagccugccccgcugcuggcuggucuccaacggcagcuaccugaacgagacccacuucuccgacgacaucgagcagcaggccgacaacaugaucacggagcuccugcagaaggaguacauggaccggcagggcaagaccccgcuggggcucguggaccuguucguguucagcaccuccuucuaccugaucagcaucuuccugcaccucguccgcaucccgacccaccggcacgugaucggcaagcccugccccaagccccaccgccugaaccacauggggaucugcuccugcggccuguacaagcacccgggggugcccgucaaguggaagcggugaggacuaguaauaaggaaacuguaugaaugucugugggcaggaagugaagagauccuucuguaaagguuuuuggaauuaugucugcugaauaauaaacuuuuuugaaauaauaaaucugguagaaaaaugagaucucaaaggcucuuuucagagccaccaaaaaaaaaaaaaaaaaaaaaaaaaaaaaaaaaaaaaaaaaaaaaaaaaaaaaaaaaaaaaaaaaaaaaaaaaaaaaaaaaaaaaaaaaaaaaaaaaaaaa

SEQ ID NO: 14741 - RNA, 1809 nt, Artificial Sequence
  mRNA product Design b-4 (hSL-A100) comprising derived and/or modified sequence from LASV(Lassa virus/H.sapiens-wt/NGA/2018/ISTH_0959;Clade II)__AVV65099__GPC (opt1)
aggagagucccgcagucggcguccagcggcucugcuuguucgugugugugucguugcaggccuuauucaagcuuaccaugggccagaucaucaccuucuuccaggaggugccccacgucaucgaggaggugaugaacaucgugcugaucgcccucagccugcuggccauccucaaggggaucuacaacgucgugaccugcggccuguucgggcugguguccuuccuccugcugugcggccgcagcugcuccacgaccuacaagggggucuacgagcuccagacccuggagcuggacauggcgagccucaacaugaccaugccgcuguccugcacgaagaacaacagccaccacuacaucauggugggcaacgagaccggccuggagcucacccugaccaacacguccaucaucaaccacaaguucugcaaccugagcgacgcccacaagaagaaccucuacgaccacgcccugauguccaucaucagcaccuuccaccuguccauccccaacuucaaccaguacgaggccaugagcugcgacuucaacgggggcaagaucuccgugcaguacaaccucagccacgccuacgcgaucgacgccgccaaccacugcgggaccaucgccaacggcguccugcagaccuucaugcggauggcguggggcggguccuacaucgcccuggacagcggcaagggguccugggacugcaucaugacgagcuaccaguaccucaucauccagaacaccaccugggaggaccacugccaguucucccgccccagccccaucggcuaccuggggcugcucagccagcggacccgcgacaucuacaucucccggcgccugcugggcacguucaccuggacccucagcgacuccgagggcaacgagacccccgggggcuacugccugacgcgguggaugcugaucgaggccgagcucaagugcuucgggaacaccgccguggccaagugcaacgagaagcacgacgaggaguucugcgacaugcugcgccuguucgacuucaacaagcaggcgauccggcgccucaagaccgaggcccagaugagcauccagcugaucaacaaggccgugaacgcccugaucaacgaccagcucaucaugaagaaccaccuccgggacaucaugggcaucccguacugcaacuacuccaaguacugguaccugaaccacaccgucacggggaagaccagccugccccgcugcuggcugguguccaacggcagcuaccugaacgagacccacuucuccgacgacaucgagcagcaggccgacaacaugaucaccgagcuccugcagaaggaguacaucgaccggcagggcaagacgccccuggggcucguggaccuguucgucuucagcaccuccuucuaccugaucagcaucuuccugcaccucgugaagaucccgacccaccgccacgugaucggcaagcccugccccaagccccaccggcugaaccacauggggaucugcuccugcggccuguacaagcacccggggguccccgugaaguggaagcgcugaggacuaguaauaaggaaacuguaugaaugucugugggcaggaagugaagagauccuucuguaaagguuuuuggaauuaugucugcugaauaauaaacuuuuuugaaauaauaaaucugguagaaaaaugagaucucaaaggcucuuuucagagccaccaaaaaaaaaaaaaaaaaaaaaaaaaaaaaaaaaaaaaaaaaaaaaaaaaaaaaaaaaaaaaaaaaaaaaaaaaaaaaaaaaaaaaaaaaaaaaaaaaaaaa

SEQ ID NO: 14742 - RNA, 1809 nt, Artificial Sequence
  mRNA product Design b-4 (hSL-A100) comprising derived and/or modified sequence from LASV(LASV003-NIG-2008;Clade II)__AIT17580__GPC (opt1)
aggagagucccgcagucggcguccagcggcucugcuuguucgugugugugucguugcaggccuuauucaagcuuaccaugggccagaucaucaccuucuuccaggaggugccccacgucaucgaggaggugaugaacaucgugcugaucgcccucagccugcuggccauccucaaggggaucuacaacgucgcgaccugcggccuguucgggcugguguccuuccuccugcugugcggccgcagcugcuccacgaccuacaaggggguguacgagcuccagacccuggagcuggacauggccagccucaacaugaccaugccgcuguccugcacgaagaacaacagccaccacuacaucauggucggcaacgagaccggccuggagcucacccugaccaacacguccaucaucaaccacaaguucugcaaccugagcgacgcccacaagaagaaccucuacgaccacgcccugauguccaucaucagcaccuuccaccuguccauccccaacuucaaccaguacgaggccaugagcugcgacuucaacgggggcaagaucuccgugcaguacaaccucagccacaccuacgcgguggacgccgccaaccacugcgggaccaucgccaacggcguccugcagacguucaugcggauggcguggggcggguccuacaucgcccuggacagcggcaagggguccugggacugcaucaugaccagcuaccaguaccucaucauccagaacaccaccugggaggaccacugccaguucucccgccccagccccaucggcuaccuggggcugcucagccagcggacgcgcgacaucuacaucucccggcgccugcugggcaccuucaccuggacccucagcgacuccgagagcaacgagacgccgggcggguacugccugacccgguggaugcugaucgaggccgagcucaagugcuucggcaacaccgccguggccaagugcaacgagaagcacgacgaggaguucugcgacaugcugcgccuguucgacuucaacaagcaggcgauccggcgccucaaggccgaggcccagauguccauccagcugaucaacaaggccgugaacgcccugaucaacgaccagcucaucaugaagaaccaccuccgggacaucauggggauccccuacugcaacuacagcaaguacugguaccugaaccacaccgucacgggccgcaccucccugccccggugcuggcuggugagcaacggguccuaccugaacgagacccacuucagcgacgacaucgagcagcaggcggacaacaugaucaccgagcuccugcagaaggaguacauggaccgccagggcaagacgccccugggccucguggaccuguucgucuucuccaccagcuucuaccugaucuccaucuuccugcaccucgugaagaucccgacccaccggcacgugaucgggaagcccugccccaagccccaccgccugaaccacaugggcaucugcagcugcgggcuguacaagcacccgggcguccccgugaaguggaagcggugaggacuaguaauaaggaaacuguaugaaugucugugggcaggaagugaagagauccuucuguaaagguuuuuggaauuaugucugcugaauaauaaacuuuuuugaaauaauaaaucugguagaaaaaugagaucucaaaggcucuuuucagagccaccaaaaaaaaaaaaaaaaaaaaaaaaaaaaaaaaaaaaaaaaaaaaaaaaaaaaaaaaaaaaaaaaaaaaaaaaaaaaaaaaaaaaaaaaaaaaaaaaaaaaa

SEQ ID NO: 14743 - RNA, 1809 nt, Artificial Sequence
  mRNA product Design b-4 (hSL-A100) comprising derived and/or modified sequence from LASV(LASV035-NIG-2009;Clade II)__AIT17588__GPC (opt1)
aggagagucccgcagucggcguccagcggcucugcuuguucgugugugugucguugcaggccuuauucaagcuuaccaugggccagaucaucaccuucuuccaggaggugccccacgucaucgaggaggugaugaacaucgugcugaucgcccucagccugcuggccauccucaaggggaucuacaacgucgcgaccugcggccuguucgggcugguguccuuccuccugcugugcggccgcagcugcuccacgaccuacaaggggguguacgagcuccagacccuggagcuggacauggccagccucaacaugaccaugccgcuguccugcacgaagaacaacagccaccacuacaucauggucggcaacgagaccggccuggagcucacccugaccaacacguccaucaucaaccacaaguucugcaaccugagcgacgcccacaagaagaaccucuacgaccacgcccugauguccaucaucagcaccuuccaccuguccauccccaacuucaaccaguacgaggccaugagcugcgacuucaacgggggcaagaucuccgugcaguacaaccucagccacgcguacgccguggacgccgccaaccacugcgggaccaucgcgaacggcguccugcagaccuucaugcggauggccuggggcggguccuacaucgcccuggacagcggcaagggguccugggacugcaucaugacgagcuaccaguaccucaucauccagaacaccaccugggaggaccacugccaguucucccgccccagccccaucggcuaccuggggcugcucagccagcggacccgcgacaucuacaucucccggcgccugcugggcacguucaccuggacccucagcgacuccgagggcaacgagacccccgggggcuacugccugacgcgguggaugcugaucgaggccgagcucaagugcuucgggaacaccgccguggcgaagugcaacgagaagcacgacgaggaguucugcgacaugcugcgccuguucgacuucaacaagcaggccauccggcgccucaaggccgaggcccagaugagcauccagcugaucaacaaggccgugaacgcgcugaucaacgaccagcucaucaugaagaaccaccuccgggacaucaugggcauccccuacugcaacuacuccaaguacugguaccugaaccacaccgucaccgggaagacgagccugccccgcugcuggcugguguccaacggcagcuaccugaacgagacccacuucuccgacgacaucgagcagcaggccgacaacaugaucaccgagcuccugcagaaggaguacaucgaccggcagggcaagaccccgcuggggcucguggaccuguucgucuucagcacguccuucuaccugaucagcaucuuccugcaccucgugaagaucccgacccaccgccacgugaucggcaagcccugccccaagccccaccggcugaaccacauggggaucugcuccugcggccuguacaagcacccggggguccccgugaaguggaagcgcugaggacuaguaauaaggaaacuguaugaaugucugugggcaggaagugaagagauccuucuguaaagguuuuuggaauuaugucugcugaauaauaaacuuuuuugaaauaauaaaucugguagaaaaaugagaucucaaaggcucuuuucagagccaccaaaaaaaaaaaaaaaaaaaaaaaaaaaaaaaaaaaaaaaaaaaaaaaaaaaaaaaaaaaaaaaaaaaaaaaaaaaaaaaaaaaaaaaaaaaaaaaaaaaaa

SEQ ID NO: 14744 - RNA, 1809 nt, Artificial Sequence
  mRNA product Design b-4 (hSL-A100) comprising derived and/or modified sequence from LASV(LASV1000-NIG-2009;Clade II)__AIT17782__GPC (opt1)
aggagagucccgcagucggcguccagcggcucugcuuguucgugugugugucguugcaggccuuauucaagcuuaccaugggccagaucaucaccuucuuccaggaggugccccacgucaucgaggaggugaugaacaucgugcugaucgcccucagccugcuggccauccucaaggggaucuacaacgucgcgaccugcggccuguucgggcugguguccuuccuccugcugugcggccgcagcugcuccacgaccuacaaggggguguacgagcuccagacccuggagcuggacauggccagccucaacaugaccaugccgcuguccugcacgaagaacaacagccaccacuacaucauggucggcaacgagaccggccuggagcucacccugaccaacacguccaucaucaaccacaaguucugcaaccugagcgacgcccacaagaagaaccucuacgaccacgcccugauguccaucaucagcaccuuccaccuguccauccccaacuucaaccaguacgaggccaugagcugcgacuucaacgggggcaagaucuccgugcaguacaaccucagccacaccuacgcgguggacgccgccaaccacugcgggaccaucgccaacggcguccugcagacguucaugcggauggcguggggcggguccuacaucgcccuggacagcggcaagggguccugggacugcaucaugaccagcuaccaguaccucaucauccagaacaccaccugggaggaccacugccaguucucccgccccagccccaucggcuaccuggggcugcucagccagcggacgcgcgacaucuacaucucccggcgccugcugggcaccuucaccuggacccucagcgacuccgagggcaacgagacgcccgggggcuacugccugacccgguggaugcugaucgaggccgagcucaagugcuucgggaacaccgccguggccaagugcaacgagaagcacgacgaggaguucugcgacaugcugcgccuguucgacuucaacaagcaggcgaucaagcggcucaagaccgaggcccagaugagcauccagcugaucaacaaggccgugaacgcccugaucaacgaccagcucaucaugaagaaccaccuccgcgacaucaugggcauccccuacugcaacuacuccaaguacugguaccugaaccacacggucaccgggaagaccagccugccccggugcuggcugguguccaacggcagcuaccugaacgagacccacuucuccgacgacaucgagcagcaggccgacaacaugaucacggagcuccugcagaaggaguacaucgaccgccagggcaagaccccgcuggggcucguggaccuguucgucuucagcaccuccuucuaccugaucagcaucuuccugcaccucgugaagaucccgacccaccggcacguggucggcaagcccugccccaagccccaccgccugaaccacauggggaucugcuccugcggccuguacaagcacccgggggugcccgugaaguggaagcggugaggacuaguaauaaggaaacuguaugaaugucugugggcaggaagugaagagauccuucuguaaagguuuuuggaauuaugucugcugaauaauaaacuuuuuugaaauaauaaaucugguagaaaaaugagaucucaaaggcucuuuucagagccaccaaaaaaaaaaaaaaaaaaaaaaaaaaaaaaaaaaaaaaaaaaaaaaaaaaaaaaaaaaaaaaaaaaaaaaaaaaaaaaaaaaaaaaaaaaaaaaaaaaaaa

SEQ ID NO: 14745 - RNA, 1809 nt, Artificial Sequence
  mRNA product Design b-4 (hSL-A100) comprising derived and/or modified sequence from LASV(LASV221-NIG-2010;Clade II)__AIT17624__GPC (opt1)
aggagagucccgcagucggcguccagcggcucugcuuguucgugugugugucguugcaggccuuauucaagcuuaccaugggccagaucaucaccuucuuccaggaggugccccacgucaucgaggaggugaugaacaucgugcugaucgcccucagccugcuggccauccucaaggggaucuacaacgucgcgaccugcggccuguucgggcugguguccuuccuccugcugugcggccgcagcugcuccacgaccuacaaggggguguacgagcuccagacccuggagcuggacauggccagccucaacaugaccaugccgcuguccugcacgaagaacaacagccaccacuacaucauggucggcaacgagaccggccuggagcucacccugaccaacacguccaucaucaaccacaaguucugcaaccugagcgacgcccacaagaagaaccucuacgaccacgcccugauguccaucaucagcaccuuccaccuguccauccccaacuucaaccaguacgaggccaugagcugcgacuucaacgggggcaagaucuccgugcaguacaaccucagccacaccuacgcgaucgacgccgccaaccacugcgggaccaucgccaacggcgugcugcagacguucaugcggauggcguggggcggguccuacaucgcccuggacagcggcaagggguccugggacugcaucaugaccagcuaccaguaccucaucauccagaacaccaccugggaggaccacugccaguucucccgccccagccccaucggcuaccuggggcugcucagccagcggacgcgcgacaucuacaucucccggcgccugcugggcaccuucaccuggacccucagcgacuccgagggcaacgagacgcccgggggcuacugccugacccgguggaugcugaucgaggccgagcucaagugcuucgggaacaccgccgucgccaagugcaacgagaagcacgacgaggaguucugcgacaugcugcgccuguucgacuucaacaagcaggcgauccggcgccucaagaccgaggcccagaugagcauccagcugaucaacaaggccgugaacgcccugaucaacgaccagcucaucaugaagaaccaccuccgggacaucaugggcauccccuacugcaacuacuccaaguacugguaccugaaccacacggugaccgggaagaccagccugccccgcugcuggcuggucuccaacggcagcuaccugaacgagacccacuucuccgacgacaucgagcagcaggccgacaacaugaucacggagaugcuccagaaggaguacauggaccggcagggcaagaccccgcuggggcugguggaccucuucguguucagcaccuccuucuaccugaucagcaucuuccugcaccuggucaagaucccgacccaccgccacgugaucggcaagcccugccccaagccccaccggcucaaccacauggggaucugcuccugcggccuguacaagcacccgggggugcccgucaaguggaagcgcugaggacuaguaauaaggaaacuguaugaaugucugugggcaggaagugaagagauccuucuguaaagguuuuuggaauuaugucugcugaauaauaaacuuuuuugaaauaauaaaucugguagaaaaaugagaucucaaaggcucuuuucagagccaccaaaaaaaaaaaaaaaaaaaaaaaaaaaaaaaaaaaaaaaaaaaaaaaaaaaaaaaaaaaaaaaaaaaaaaaaaaaaaaaaaaaaaaaaaaaaaaaaaaaaa

SEQ ID NO: 14746 - RNA, 1809 nt, Artificial Sequence
  mRNA product Design b-4 (hSL-A100) comprising derived and/or modified sequence from LASV(LASV237-NIG-2010;Clade II)__AIT17638__GPC (opt1)
aggagagucccgcagucggcguccagcggcucugcuuguucgugugugugucguugcaggccuuauucaagcuuaccaugggccagaucaucaccuucuuccaggaggugccccacgucaucgaggaggugaugaacaucgugcugaucgcccucagccugcuggccauccucaaggggaucuacaacgucgcgaccugcggccuguucgggcugguguccuuccuccugcugugcggccgcagcugcuccacgaccuacaaggggguguacgagcuccagacccuggagcuggacauggccagccucaacaugaccaugccgcuguccugcacgaagaacaacagccaccacuacaucauggucggcaacgagaccggccuggagcucacccugaccaacacguccaucaucaaccacaaguucugcaaccugagcgacgcccacaagaaggaccucuacgaccacgcccugauguccaucaucagcaccuuccaccuguccauccccaacuucaaccaguacgaggccaugagcugcgacuucaacgggggcaagaucuccgugcaguacaaccucagccacaccuacgcgguggacgccgccaaccacugcgggaccaucgccaacggcguccugcagacguucaugcggauggcguggggcggguccuacaucgcccuggacagcggcaagggguccugggacugcaucaugaccagcuaccaguaccucaucauccagaacaccaccugggaggaccacugccaguucucccgccccagccccaucggcuaccuggggcugcucagccagcggacgcgcgacaucuacaucucccggcgccugcugggcaccuucaccuggacccucagcgacuccgagggcaacgagacgcccgggggcuacugccugacccgguggaugcugaucgaggccgagcucaagugcuucgggaacaccgccguggccaagugcaacgagaagcacgacgaggaguucugcgacaugcugcgccuguucgacuucaacaagcaggcgauccggcgccucaagaccgaggcccagaugagcauccagcugaucaacaaggccgugaacgcccugaucaacgaccagcucaucaugaagaaccaccuccgggacaucaugggcauccccuacugcaacuacuccaaguacugguaccugaaccacacggucaccgggaagaccagccugccccgcugcuggcugguguccaacggcagcuaccugaacgagacccacuucuccgacgacaucgagcagcaggccgacaacaugaucacggagcuccugcagaaggaguacauggaccggcagggcaagaccccgcuggggcucguggaccuguucgucuucagcaccuccuucuaccugaucagcaucuuccugcaccucaucaagaucccgacccaccgccacaucacgggcaagcccugccccaagccccaccggcugaaccacauggggaucugcuccugcggccuguacaagcacccgggggugcccgugaaguggaagcgcugaggacuaguaauaaggaaacuguaugaaugucugugggcaggaagugaagagauccuucuguaaagguuuuuggaauuaugucugcugaauaauaaacuuuuuugaaauaauaaaucugguagaaaaaugagaucucaaaggcucuuuucagagccaccaaaaaaaaaaaaaaaaaaaaaaaaaaaaaaaaaaaaaaaaaaaaaaaaaaaaaaaaaaaaaaaaaaaaaaaaaaaaaaaaaaaaaaaaaaaaaaaaaaaaa

SEQ ID NO: 14747 - RNA, 1809 nt, Artificial Sequence
  mRNA product Design b-4 (hSL-A100) comprising derived and/or modified sequence from LASV(LASV253-NIG-2011;Clade II)__AIT17670__GPC (opt1)
aggagagucccgcagucggcguccagcggcucugcuuguucgugugugugucguugcaggccuuauucaagcuuaccaugggccagaucaucaccuucuuccaggaggugccccacgucaucgaggaggugaugaacaucgugcugaucgcccucagccugcuggccauccucaaggggaucuacaacgucgcgaccugcggccuguucgggcugguguccuuccuccugcugugcggccgcagcugcuccacgaccuacaaggggguguacgagcuccagacccuggagcuggacauggccagccucaacaugaccaugccgcuguccugcacgaagaacaacagccaccacuacaucauggucggcaacgagaccggccuggagcucacccugaccaacacguccaucaucaaccacaaguucugcaaccugagcgacgcccacaagaagaaccucuacgaccacgcccugauguccaucaucagcaccuuccaccuguccauccccaacuucaaccaguacgaggccaugagcugcgacuucaacgggggcaagaucuccgugcaguacaaccucagccacaccuacgcgguggacgccgccaaccacugcgggaccaucgccaacggcguccugcagacguucaugcggauggcguggggcggguccuacaucgcccuggacagcggcaagggguccugggacugcaucaugaccagcuaccaguaccucaucauccagaacaccaccugggaggaccacugccaguucucccgccccagccccaucggcuaccuggggcugcucagccagcggacgcgcgacaucuacaucucccggcgccugcugggcaccuucaccuggacccucagcgacuccgagggcaacgagacgcccgggggcuacugccugacccgguggaugcugaucgaggccgagcucaagugcuucgggaacaccgccguggccaagugcaacgagaagcacgacgaggaguucugcgacaugcugcgccuguucgacuucaacaagcaggcgauccggcgccucaaggccgaggcccagaugagcauccagcugaucaacaaggccgugaacgcccugaucaacgaccagcucaucaugaagaaccaccuccgggacaucaugggcaucccguacugcaacuacuccaaguacugguaccugaaccacaccgucacggggcgcaccagccugccccggugcuggcugguguccaacggcagcuaccugaacgagacccacuucuccgacgacaucgagcagcaggcggacaacaugaucaccgagcuccugcagaaggaguacaucgaccgccagggcaagacgccccuggggcucguggaccuguucgucuucagcaccuccuucuaccugaucagcaucuuccugcaccucgugaagaucccgacccaccggcacaucaucggcaagcccugccccaagccccaccgccugaaccacauggggaucugcuccugcggccuguacaagcacccgggggugcccgucaaguggaagcggugaggacuaguaauaaggaaacuguaugaaugucugugggcaggaagugaagagauccuucuguaaagguuuuuggaauuaugucugcugaauaauaaacuuuuuugaaauaauaaaucugguagaaaaaugagaucucaaaggcucuuuucagagccaccaaaaaaaaaaaaaaaaaaaaaaaaaaaaaaaaaaaaaaaaaaaaaaaaaaaaaaaaaaaaaaaaaaaaaaaaaaaaaaaaaaaaaaaaaaaaaaaaaaaaa

SEQ ID NO: 14748 - RNA, 1809 nt, Artificial Sequence
  mRNA product Design b-4 (hSL-A100) comprising derived and/or modified sequence from LASV(LASV254-NIG-2011;Clade II)__AIT17674__GPC (opt1)
aggagagucccgcagucggcguccagcggcucugcuuguucgugugugugucguugcaggccuuauucaagcuuaccaugggccagaucaucaccuucuuccaggaggugccccacgucaucgaggaggugaugaacaucgugcugaucgcccucagccugcuggccauccucaaggggaucuacaacgucgcgaccugcggccuguucgggcugguguccuuccuccugcugugcggccgcagcugcuccacgaccuacaaggggguguacgagcuccagacccuggagcuggacaugaccaaccucaacaugacgaugccgcugagcugcaccaagaacaacucccaccacuacaucauggucggcaacgagaccggccuggagcucacccugacgaacaccagcaucaucaaccacaaguucugcaaccuguccgacgcccacaagaagaaccucuacaaccacgcccugaugagcaucaucuccaccuuccaccugagcauccccaacuucaaccaguacgaggccauguccugcgacuucaacgggggcaagaucagcgugcaguacaaccucucccacagcuacgccguggacgcggccaaccacugcgggaccaucgccaacggcguccugcagacguucaugcggauggccuggggcggguccuacaucgcgcuggacagcggcaaggggaacugggacugcaucaugaccuccuaccaguaccucaucauccagaacaccaccugggaggaccacugccaguucagccgccccucccccaucggcuaccuggggcugcucagccagcggacgcgcgacaucuacaucagccggcgccugcugggcaccuucaccuggacccucuccgacagcgagggcaacgagacgcccgggggcuacugccugacccgguggaugcugaucgaggccgagcucaagugcuucgggaacaccgccguggccaagugcaacgagaagcacgacgaggaguucugcgacaugcugcgccuguucgacuucaacaagcaggccauccggcgccucaagaccgaggcgcaggccaacauccagcugaucaacaaggccgugaacgcccugaucaacgaccagcucaucaugaagaaccaccuccgggacaucaugggcauccccuacugcaacuacuccaaguacugguaccugaaccacacggucaccgggaagaccagccugccccgcugcuggcugguguccaacggcagcuaccugaacgagacccacuucuccgacgacaucgagcagcaggccgacaacaugaucacggagcuccugcagaaggaguacauggaccggcagggcaagaccccgcuggggcucguggaccuguucgucuucagcaccuccuucuaccugaucagcaucuuccugcaccucgugaagaucccgacccaccgccacgugaucggcaagcccugccccaagccccaccggcugaaccacauggggaucugcuccugcggccuguacaagcacccggggguccccgugaaguggaagcgcugaggacuaguaauaaggaaacuguaugaaugucugugggcaggaagugaagagauccuucuguaaagguuuuuggaauuaugucugcugaauaauaaacuuuuuugaaauaauaaaucugguagaaaaaugagaucucaaaggcucuuuucagagccaccaaaaaaaaaaaaaaaaaaaaaaaaaaaaaaaaaaaaaaaaaaaaaaaaaaaaaaaaaaaaaaaaaaaaaaaaaaaaaaaaaaaaaaaaaaaaaaaaaaaaa

SEQ ID NO: 14749 - RNA, 1809 nt, Artificial Sequence
  mRNA product Design b-4 (hSL-A100) comprising derived and/or modified sequence from LASV(Nig08-A19;Clade III)__ADU56618__GPC (opt1)
aggagagucccgcagucggcguccagcggcucugcuuguucgugugugugucguugcaggccuuauucaagcuuaccaugggccagaucgugaccuucuuccaggaggucccccacgugaucgaggaggugaugaacaucguccugaucgcccucagcauccuggccauccugaaggggcucuacaacaucgcgaccugcggccugaucgggcuggugacguuccuccugcuguccggccgcagcugcuccaugaccuacaaggggguguacgagcuccagacccuggagcugaacaugaacacccucaacaugacgaugccgcugagcugcaccaagaacaacucccaccacuacaucauggucggcaacgagaccggccuggagcucacccugacgaacaccagccugcuccaccacaaguucugcaaccuguccgacgcccacaagaagaaccuguacgaccacacccucaugagcaucaucuccaccuuccaccugagcauccccaacuucaaccaguacgaggccauguccugcgacuucaacgggggcaagaucacggugcaguacaaccugagccacuccuacgccaucgacgccgcgaaccacugcgggaccguggccaacggcguccuccagaccuucaugcggauggccuggggcgggagcuacaucgcccuggacuccggccgcgggaagugggacugcaucaugaccagcuaccaguaccugaucauccagaacacgaccugggaggaccacugccaguucucccggcccagccccaucggcuaccucgggcugcugucccagcgcacccgggacaucuacaucagccgccggcuccugggcaccuucacguggacccugagcgacuccgagggcaacgagacccccgggggcuacugccucacccgcuggaugcugaucgaggcggagcugaagugcuucgggaacacggccguggccaagugcaacgagaagcacgacgaggaguucugcgacaugcuccggcuguucgacuucaacaagcaggccauccgccggcugaaggccgaggcgcagaugagcauccagcucaucaacaaggccgugaacgcccugaucaacgaccagcugaucaugaagaaccaccuccgcgacaucaugggcauccccuacugcaacuacuccaaguacugguaccugaaccacaccagcaccgggcggaccucccugccccgcugcuggcucgucagcaacggcuccuaccugaacgagacgcacuucagcgacgacaucgagcagcaggccgacaacaugaucaccgagaugcugcagaaggaguaccucgaccggcagggcaagaccccgcuggggcugguggaccuguucguguucuccaccagcuucuaccucaucuccaucuuccugcaccuggucaagaucccgacgcaccgccacaucgugggcaagcccugccccaagccccaccggcucaaccacauggggaucugcagcugcggccuguacaagcagccgggggugcccguccgcuggaagcggugaggacuaguaauaaggaaacuguaugaaugucugugggcaggaagugaagagauccuucuguaaagguuuuuggaauuaugucugcugaauaauaaacuuuuuugaaauaauaaaucugguagaaaaaugagaucucaaaggcucuuuucagagccaccaaaaaaaaaaaaaaaaaaaaaaaaaaaaaaaaaaaaaaaaaaaaaaaaaaaaaaaaaaaaaaaaaaaaaaaaaaaaaaaaaaaaaaaaaaaaaaaaaaaaa

SEQ ID NO: 14750 - RNA, 1812 nt, Artificial Sequence
  mRNA product Design b-4 (hSL-A100) comprising derived and/or modified sequence from LASV(G1180-SLE-2010;Clade IV)__AIT17168__GPC (opt1)
aggagagucccgcagucggcguccagcggcucugcuuguucgugugugugucguugcaggccuuauucaagcuuaccaugggccagaucgugaccuucuuccaggaggucccccacgugaucgaggaggugaugaacaucguccugaucgcccucagcauccuggccgugcugaaggggcucuacaacuucgcgaccugcggccugguggggcugcucaccuuccugcugcucugcggccgcuccugcaccgccagccgguacaagggggucuacgagcugcagacccuggagcucaacauggagacccugaacaugacgaugccgcuguccugcaccaagaacaacagccaccacuacaucauggugggcaacgagaccggccucgagcugacccugacgaacaccuccaucaucaaccacaaguucugcaaccucagcgacgcccacaagaagaaccuguacgaccacgcccugauguccaucaucagcaccuuccaccucuccauccccaacuucaaccaguacgaggccaugagcugcgacuucaacgggggcaagaucuccgugcaguacaaccugagccacuccuacgcgggggacgccgccaaccacugcggcaccgucgccaacggggugcugcagacguucaugcgcauggcguggggcggcagcuacaucgcccucgacuccgggcacggcagcugggacugcaucaugaccuccuaccaguaccugaucauccagaacaccaccugggaggaccacugccaguucagccggcccucccccaucggguaccugggccuccugagccagcgcacgcgggacaucuacaucagccgccggcugcucggcaccuucaccuggacccuguccgacagcgaggggaaggacacgccgggcggguacugccugacccgcuggaugcucaucgaggccgagcugaagugcuucggcaacaccgccguggccaagugcaacgagaagcacgacgaggaguucugcgacaugcugcggcuguucgacuucaacaagcaggcgauccagcgccugaaggccgaggcccagauguccauccagcugaucaacaaggccgucaacgcccucaucaacgaccagcugaucaugaagaaccaccuccgggacaucauggggauccccuacugcaacuacagcaaguacugguaccucaaccacaccacgaccggcaagaccucccugcccaagugcuggcuggugagcaacggcuccuaccucaacgagacccacuucagcgacgacaucgagcagcaggcggacaacaugaucacggagaugcugcagaaggaguacauggagcgccaggggaagacgccccugggccucguggaccuguucgucuucuccaccagcuucuaccugaucuccaucuuccugcaccucgugaagaucccgacccaccggcacaucgugggcaagagcugccccaagccccaccgccugaaccacauggggaucugcuccugcgggcuguacaagcagcccggcgucccggugaaguggaagcggugaggacuaguaauaaggaaacuguaugaaugucugugggcaggaagugaagagauccuucuguaaagguuuuuggaauuaugucugcugaauaauaaacuuuuuugaaauaauaaaucugguagaaaaaugagaucucaaaggcucuuuucagagccaccaaaaaaaaaaaaaaaaaaaaaaaaaaaaaaaaaaaaaaaaaaaaaaaaaaaaaaaaaaaaaaaaaaaaaaaaaaaaaaaaaaaaaaaaaaaaaaaaaaaaa

SEQ ID NO: 14751 - RNA, 1812 nt, Artificial Sequence
  mRNA product Design b-4 (hSL-A100) comprising derived and/or modified sequence from LASV(G1442-SLE-2011;Clade IV)__AIT17180__GPC (opt1)
aggagagucccgcagucggcguccagcggcucugcuuguucgugugugugucguugcaggccuuauucaagcuuaccaugggccagaucgugaccuucuuccaggaggucccccacgugaucgaggaggugaugaacaucguccugaucgcccucagcauccuggccgugcugaaggggcucuacaacguggcgaccugcggccugaucgggcuggucacguuccuccugcugugcggccgcuccugcaccaccacccucuacaaggggguguacgagcugcagacgcuggagcucaacauggagacccugaacaugaccaugccgcugagcugcaccaagaacaacucccaccacuacauccgggugggcaacgagacgggccucgagcugacccugaccaacaccagcaucaucaaccacaaguucugcaaccucuccgacgcccacaagaagaaccuguacgaccacgcccugaugagcaucaucuccacguuccaccucagcauccccaacuucaaccaguacgaggccauguccugcgacuucaacgggggcaagaucagcguccaguacaaccugucccacagcuacgccggggacgcggccaaccacugcggcaccguggccaacggggugcugcagaccuucaugcgcauggccuggggcggcuccuacaucgcgcucgacagcgggcggggcaacugggacugcaucaugaccuccuaccaguaccugaucauccagaacacgaccugggacgaccacugccaguucagccgccccucccccaucggguaccugggccuccugagccagcggacccgcgacgucuacaucucccggcgccugcucggcaccuucacguggacccugagcgacagcgaggggaaggacaccccgggcggguacugccugacccgguggaugcucaucgaggccgagcugaagugcuucggcaacacggccguggccaagugcaacgagaagcacgacgaggaguucugcgacaugcugcgccucuucgacuucaacaagcaggccauccagcggcugaaggcggaggcccagauguccauccagcugaucaacaaggccgugaacgcccucaucaacgaccagcugaucaugaagaaccaccuccgcgacaucauggggauccccuacugcaacuacagcaaguacugguaccugaacaacaccgccaccggcaagaccucccugcccaagugcuggcugaucagcaacggcuccuaccucaacgagacgcacuucagcgacgacaucgagcaggaggcggacaacaugaucaccgagaugcugcagaaggaguacauggagcggcaggggaagacgccccugggccucgucgaccuguucguguucuccaccagcuucuaccugaucuccaucuuccugcaccucgugaagaucccgacccaccgccacaucgucggcaagagcugccccaagccccaccggcugaaccacauggggaucugcuccugcgggcuguacaagcagcccggcgugccggugcgcuggaagcggugaggacuaguaauaaggaaacuguaugaaugucugugggcaggaagugaagagauccuucuguaaagguuuuuggaauuaugucugcugaauaauaaacuuuuuugaaauaauaaaucugguagaaaaaugagaucucaaaggcucuuuucagagccaccaaaaaaaaaaaaaaaaaaaaaaaaaaaaaaaaaaaaaaaaaaaaaaaaaaaaaaaaaaaaaaaaaaaaaaaaaaaaaaaaaaaaaaaaaaaaaaaaaaaaa

SEQ ID NO: 14752 - RNA, 1812 nt, Artificial Sequence
  mRNA product Design b-4 (hSL-A100) comprising derived and/or modified sequence from LASV(G3010-SLE-2013;Clade IV)__AIT17344__GPC (opt1)
aggagagucccgcagucggcguccagcggcucugcuuguucgugugugugucguugcaggccuuauucaagcuuaccaugggccagaucgugaccuucuuccaggaggucccccacgugaucgaggaggugaugaacaucguccugaucgcccucagcauccuggccgugcugaaggggcucuacaacuucgcgaccugcggccugguggggcuggucacguuccuccugcugugcggccgcuccugcaccaccagccucuacaaggggguguacgagcugcagacccuggagcucaacauggagacgcugaacaugaccaugccgcuguccugcaccaagaacaacagccaccacuacaucauggugggcaacgagaccggccucgagcugacgcugaccaacaccuccaucaucaaccacaaguucugcaaccucagcgacgcccacaagaagaaccuguacaaccacgcccugauguccaucaucagcaccuuccaccucuccauccccaacuucaaccaguacgaggccaugagcugcgacuucaacgggggcaagaucuccguccaguacaaccugagccacuccuacgccggggacgcggccagccacugcggcacgguggccaacggggugcugcagaccuucaugcggauggccuggggcggcuccuacaucgcgcucgacagcggguacggcaagugggacugcaucaugaccuccuaccaguaccugaucauccagaacaccacgugggaggaccacugccaguucagccgccccucccccaucggguaccugggccuccugagccagcggacccgcgacaucuacaucagccggcgccugcucggcaccuucaccuggacgcuguccgacagcgaggggaaggacaccccgggcggguacugccugacccgguggaugcucaucgaggccgagcugaagugcuucggcaacaccgccgucgccaagugcaacgagaagcacgacgaggaguucugcgacaugcugcgccucuucgacuucaacaagcaggccauccagcggcugaagacggaggcgcagauguccauccagcugaucaacaaggccgugaacgcccucaucaacgaccagcugaucaugaagaaccaccuccgcgacaucauggggauccccuacugcaacuacagcaaguacugguaccugaaccacaccaccaccggcaagacgucccugcccaagugcuggcuggugagcaacggcuccuaccucaacgagacccacuucagcgacgacaucgagcagcaggccgacaacaugaucaccgagaugcugcagaaggaguacauggagcggcaggggaagacgccccugggccucgucgaccuguucguguucuccaccagcuucuaccugaucuccaucuuccugcaccucgugaagaucccgacccaccgccacaucgucggcaagagcugccccaagccccaccggcugaaccacauggggaucugcuccugcgggcuguacaagcagcccggcgugccggugcgcuggaagcggugaggacuaguaauaaggaaacuguaugaaugucugugggcaggaagugaagagauccuucuguaaagguuuuuggaauuaugucugcugaauaauaaacuuuuuugaaauaauaaaucugguagaaaaaugagaucucaaaggcucuuuucagagccaccaaaaaaaaaaaaaaaaaaaaaaaaaaaaaaaaaaaaaaaaaaaaaaaaaaaaaaaaaaaaaaaaaaaaaaaaaaaaaaaaaaaaaaaaaaaaaaaaaaaaa

SEQ ID NO: 14753 - RNA, 1812 nt, Artificial Sequence
  mRNA product Design b-4 (hSL-A100) comprising derived and/or modified sequence from LASV(G502-SLE-2009;Clade IV)__AIT17126__GPC (opt1)
aggagagucccgcagucggcguccagcggcucugcuuguucgugugugugucguugcaggccuuauucaagcuuaccaugggccagaucgugaccuucuuccaggaggucccccacgugaucgaggaggugaugaacaucguccugaucgcccucagcauccuggccgugcugaaggggcucuacaacuucgcgaccugcggccugguggggcugcucacguuccugcugcucugcggccgcuccugcaccaccgggcuguacaagggcgucuacgagcugcagacccucgagcugaacauggagacgcugaacaugaccaugccgcucagcugcaccaagaacaacucccaccacuacaucauggugggcaacgagaccgggcuggagcugacgcucaccaacaccagcaucaucaaccacaaguucugcaaccuguccgacgcccacaagaagaaccuguacgaccacgcccucaugagcaucaucuccaccuuccaccugagcauccccaacuucaaccaguacgaggccauguccugcgacuucaacggcgggaagaucagcgugcaguacaaccugucccacagcuacgccggcgacgcggccgaccacugcgggacggucgccaacggcgugcuccagaccuucaugcggauggccuggggcggguccuacaucgcgcuggacagcggccgcgggcggugggacugcaucaugaccuccuaccaguaccugaucauccagaacaccacgugggaggaccacugccaguucagccgccccucccccaucggcuaccucggccugcugagccagcggacccgcgacaucuacaucucccggcgccuccuggggaccuucaccuggacgcugagcgacagcgagggcaaggacacccccgggggcuacugccucacccgguggaugcugaucgaggccgagcugaagugcuucgggaacaccgccguggccaagugcaacgagaagcacgacgaggaguucugcgacaugcuccgccuguucgacuucaacaagcaggccauccagcggcugaaggcggaggcccagauguccauccagcucaucaacaaggccgucaacgcccugaucaacgaccagcuggugaugaagaaccaccuccgcgacaucaugggcauccccuacugcaacuacagccgguacugguaccugaaccacacgaccaccggccgcaccucccugcccaagugcuggcucgugagcaacggguccuaccugaacgagacgcacuucagcgacgacaucgagcagcaggccgacaacaugaucaccgagaugcugcagaaggaguacauggagcggcagggcaagaccccgcucgggcuggucgaccuguucguguucuccaccagcuucuaccugaucuccaucuuccuccaccuggugaagaucccgacgcaccgccacaucgucggcaagagcugccccaagccccaccggcugaaccacauggggaucugcuccugcggccucuacaagcagcccggcgugccggugaaguggaagcgcugaggacuaguaauaaggaaacuguaugaaugucugugggcaggaagugaagagauccuucuguaaagguuuuuggaauuaugucugcugaauaauaaacuuuuuugaaauaauaaaucugguagaaaaaugagaucucaaaggcucuuuucagagccaccaaaaaaaaaaaaaaaaaaaaaaaaaaaaaaaaaaaaaaaaaaaaaaaaaaaaaaaaaaaaaaaaaaaaaaaaaaaaaaaaaaaaaaaaaaaaaaaaaaaaa

SEQ ID NO: 14754 - RNA, 1812 nt, Artificial Sequence
  mRNA product Design b-4 (hSL-A100) comprising derived and/or modified sequence from LASV(G733-SLE-2010;Clade IV)__AIT17154__GPC (opt1)
aggagagucccgcagucggcguccagcggcucugcuuguucgugugugugucguugcaggccuuauucaagcuuaccaugggccagaucgugaccuucuuccaggaggucccccacgugaucgaggaggugaugaacaucguccugaucgcccucagcauccuggccgugcugaaggggcucuacaacuucgcgaccugcggcaucguggggcuggucuccuuccugcuccugugcggccgcagcugcacgaccucccuguacaaggggguguacgagcuccagacccuggagcugaacauggagacccucaacaugacgaugccgcugagcugcaccaagaacaacucccaccacuacaucauggugggcaacgagaccggccuggagcucacccugacgaacaccagcaucaucaaccacaaguucugcaaccuguccgacgcccacaagaagaaccucuacgaccacgcccugaugagcaucaucuccaccuuccaccugagcauccccaacuucaaccaguacgaggccauguccugcgacuucaacgggggcaagaucagcguccaguacaaccucucccacagcuacgccggggacgcggccaaccacugcggcaccaucgccaacggggugcugcagacguucaugcggauggccuggggcggcuccuacaucgcgcuggacagcgggcgcgaccggugggacugcaucaugaccuccuaccaguaccucaucauccagaacaccaccugggaggaccacugccaguucagccgccccucccccaucggcuaccuggggcugcucagccagcggacgcgcgacaucuacaucagccggcgccugcugggcaccuucaccuggacccucuccgacagcgagggcaaggacacgcccgggggcuacugccugacccgguggaugcugaucgaggccgagcucaagugcuucgggaacaccgccguggccaagugcaacgagaagcacgacgaggaguucugcgacaugcugcgccuguucgacuucaacaagcaggccauccagcggcucaaggcggaggcccagauguccauccagcugaucaacaaggccgucaacgcccugaucaacgaccagcucaucaugaagaaccaccuccgcgacaucaugggcauccccuacugcaacuacagcaaguacugguaccugaaccacaccacgaccgggaagaccucccugcccaagugcuggcuggugagcaacggcuccuaccugaacgagacccacuucagcgacgacaucgagcagcaggccgacaacaugaucacggagaugcuccagaaggaguacauggagcggcagggcaagaccccgcuggggcugguggaccucuucgucuucuccaccagcuucuaccugaucuccaucuuccugcaccuggugaagaucccgacccaccgccacguggucggcaagagcugccccaagccccaccggcucaaccacauggggaucugcuccugcggccuguacgggcagcccggcgugccggugaaguggaagcgcugaggacuaguaauaaggaaacuguaugaaugucugugggcaggaagugaagagauccuucuguaaagguuuuuggaauuaugucugcugaauaauaaacuuuuuugaaauaauaaaucugguagaaaaaugagaucucaaaggcucuuuucagagccaccaaaaaaaaaaaaaaaaaaaaaaaaaaaaaaaaaaaaaaaaaaaaaaaaaaaaaaaaaaaaaaaaaaaaaaaaaaaaaaaaaaaaaaaaaaaaaaaaaaaaa

SEQ ID NO: 14755 - RNA, 1812 nt, Artificial Sequence
  mRNA product Design b-4 (hSL-A100) comprising derived and/or modified sequence from MOPV/LASV reassortant(IGS-1;Clade IV)__AFY05576__GPC (opt1)
aggagagucccgcagucggcguccagcggcucugcuuguucgugugugugucguugcaggccuuauucaagcuuaccaugggccagaucgugaccuucuuccaggaggucccccacgugaucgaggaggugaugaacaucguccugaucgcccucagcgugcuggccgugcugaaggggcucuacaacuucgcgaccugcggccuggucgggcuggugacguuccuccugcugugcggccgcuccugcaccaccagccucuacaaggggguguacgagcugcagacccuggagcucaacauggagacgcugaacaugaccaugccgcuguccugcaccaagaacaacagccaccacuacaucauggucggcaacgagaccggccucgagcugacgcugaccaacaccuccaucaucaaccacaaguucugcaaccucagcgacgcccacaagaagaaccuguacgaccacgcccugauguccaucaucagcaccuuccaccucuccauccccaacuucaaccaguacgaggccaugagcugcgacuucaacgggggcaagaucuccgugcaguacaaccugagccacuccuacgccggggacgcggccaaccacugcggcacgguggccaacgggguccugcagaccuucaugcggauggccuggggcggcagcuacaucgcgcucgacuccgggcgcggcaacugggacugcaucaugaccagcuaccaguaccugaucauccagaacaccacgugggaggaccacugccaguucucccggcccagccccaucggguaccugggccuccugucccagcgcacccgggacaucuacaucagccgccggcugcucggcaccuucaccuggacgcugagcgacuccgagggggaggacaccccgggcggguacugccugacccgcuggaugcucaucgaggccgagcugaagugcuucggcaacaccgccguggccaagugcaacgagaagcacgacgaggaguucugcgacaugcugcggcuguucgacuucaacaagcaggccauccagcgccugaaggcggaggcccagaugagcauccagcugaucaacaaggccgugaacgcccucaucaacgaccagcugaucaugaagaaccaccuccgggacaucauggggauccccuacugcaacuacuccaaguacugguaccucaaccacacgaccaccggccgcaccagccugcccaagugcuggcuggucuccaacggcagcuaccucaacgagacgcacuucuccgacgacaucgagcagcaggccgacaacaugaucaccgagaugcugcagaaggaguacauggagcggcaggggaagacgccccugggccucguggaccuguucguguucagcaccuccuucuaccugaucagcaucuuccugcaccucgucaagaucccgacccaccgccacaucguggggaaguccugccccaagccccaccggcugaaccacaugggcaucugcagcugcgggcuguacaagcagcccggcgugccggucaaguggaagcgcugaggacuaguaauaaggaaacuguaugaaugucugugggcaggaagugaagagauccuucuguaaagguuuuuggaauuaugucugcugaauaauaaacuuuuuugaaauaauaaaucugguagaaaaaugagaucucaaaggcucuuuucagagccaccaaaaaaaaaaaaaaaaaaaaaaaaaaaaaaaaaaaaaaaaaaaaaaaaaaaaaaaaaaaaaaaaaaaaaaaaaaaaaaaaaaaaaaaaaaaaaaaaaaaaa

SEQ ID NO: 14756 - RNA, 1812 nt, Artificial Sequence
  mRNA product Design b-4 (hSL-A100) comprising derived and/or modified sequence from LASV(LM765-SLE-2012;Clade IV)__AIT17814__GPC (opt1)
aggagagucccgcagucggcguccagcggcucugcuuguucgugugugugucguugcaggccuuauucaagcuuaccaugggccagaucgugaccuucuuccaggaggucccccacgugaucgaggaggugaugaacaucguccugaucgcccucagcauccuggccgugcugaaggggcucuacaacuucgcgaccugcggccugguggggcuggucacguuccuccugcugugcggccgcuccugcaccaccagccucuacaaggggguguacgagcugcagacccuggagcucaacauggagacgcugaacaugaccaugccgcuguccugcaccaagaacaacagccaccacuacaucauggugggcaacgagaccggccucgagcugacgcugaccaacaccuccaucaucgaccacaaguucugcaaccucagcgacgcccaccggaagaaccuguacgaccacgcccugauguccaucaucagcaccuuccaccucuccauccccaacuucaaccaguacgaggccaugagcugcgacuucaacgggggcaagaucuccguccaguacaaccugagccacuccuacgccaaggacgcggccgaccacugcgggacgguggccaacggcgugcugcagaccuucaugcgcauggccuggggcgggagcuacaucgcgcucgacuccggccgggggcgcugggacugcaucaugaccagcuaccaguaccugaucauccagaacaccacgugggaggaccacugccaguucucccggcccagccccaucggcuaccuggggcuccugucccagcgcacccgggacaucuacaucagccgccggcugcucggcaccuucaccuggacgcugagcgacuccgagggcaaggacacccccgggggcuacugccugacccgcuggaugcucaucgaggccgagcugaagugcuucgggaacaccgccgucgccaagugcaacgagaagcacgacgaggaguucugcgacaugcugcggcuguucgacuucaacaagcaggccauccagcgccugaaggcggaggcccagaugagcauccagcugaucaacaaggccgugaacgcccucaucaacgaccagcugaucaugaagaaccaccuccgggacaucaugggcauccccuacugcaacuacuccaaguacugguaccucaaccacacgaccaccgggaagaccagccugcccaagugcuggcugguguccaacggcagcuaccucaacgagacgcacuucuccgacgacaucgagcagcaggccgacaacaugaucaccgagaugcugcagaaggaguacauggagcgccagggcaagaccccgcuggggcucgucgaccuguucguguucagcaccuccuucuaccugaucagcaucuuccugcaccucgugaagaucccgacgcaccggcacaucgucggcaagcccugccccaagccccaccgccugaaccacauggggaucugcuccugcggccuguacaagcagccgggggugcccgugaaguggaagcggugaggacuaguaauaaggaaacuguaugaaugucugugggcaggaagugaagagauccuucuguaaagguuuuuggaauuaugucugcugaauaauaaacuuuuuugaaauaauaaaucugguagaaaaaugagaucucaaaggcucuuuucagagccaccaaaaaaaaaaaaaaaaaaaaaaaaaaaaaaaaaaaaaaaaaaaaaaaaaaaaaaaaaaaaaaaaaaaaaaaaaaaaaaaaaaaaaaaaaaaaaaaaaaaaa

SEQ ID NO: 14757 - RNA, 1812 nt, Artificial Sequence
  mRNA product Design b-4 (hSL-A100) comprising derived and/or modified sequence from LASV(LM776-SLE-2012;Clade IV)__AIT17824__GPC (opt1)
aggagagucccgcagucggcguccagcggcucugcuuguucgugugugugucguugcaggccuuauucaagcuuaccaugggccagaucgugaccuucuuccaggaggucccccacgugaucgaggaggugaugaacaucguccugaucgcccucagcauccuggccgugcugaaggggcucuacaacuucgcgaccugcggccugguggggcuggucacguuccuccugcugugcggccgcuccugcaccaccagcguguacaaggggguguacgagcuccagacccuggagcugaacauggagacgcucaacaugaccaugccgcuguccugcaccaagaacaacagccaccacuacaucauggucggcaacgagaccggccuggagcucacgcugaccaacaccuccaucaucaaccacaaguucugcaaccugagcgacgcccacaagaagaaccucuacgaccacgcccugauguccaucaucagcaccuuccaccuguccauccccaacuucaaccaguacgaggccaugagcugcgacuucaacgggggcaagaucuccgugcaguacaaccucagccacuccuacgccggggacgcggccaaccacugcggcacgguggccaacgggguccugcagaccuucaugcggauggccuggggcggcagcuacaucgcgcuggacuccgggcacggcaagugggacugcaucaugaccagcuaccaguaccucaucauccagaacaccacgugggaggaccacugccaguucucccgccccagccccaucggguaccugggccugcucucccagcggacccgcgacaucuacaucagccggcgccugcugggcaccuucaccuggacgcucagcgacuccgaggggaaggacaccccgggcggguacugccugacccgguggaugcugaucgaggccgagcucaagugcuucggcaacaccgccguggccaagugcaacgagaagcacgacgaggaguucugcgacaugcugcgccuguucgacuucaacaagcaggccauccagcggcucaaggcggaggcccagaugagcauccagcugaucaacaaggccgugaacgcccugaucaacgaccagcucaucaugaagaaccaccuccgcgacaucauggggauccccuacugcaacuacuccaaguacugguaccugaaccacacgaccaccggcaagaccagccugcccaagugcuggcuggucuccaacggcagcuaccugaacgagacgcacuucuccgacgacaucgagcagcaggccgacaacaugaucaccgagaugcuccagaaggaguacauggagcggcaggggaagacgccccugggccugguggaccucuucguguucagcaccuccuucuaccugaucagcaucuuccugcaccuggucaagaucccgacccaccgccacaucguggggaaguccugccccaagccccaccggcucaaccacaugggcaucugcagcugcgggcuguacaagcagcccggcgugccgguccgcuggaagcggugaggacuaguaauaaggaaacuguaugaaugucugugggcaggaagugaagagauccuucuguaaagguuuuuggaauuaugucugcugaauaauaaacuuuuuugaaauaauaaaucugguagaaaaaugagaucucaaaggcucuuuucagagccaccaaaaaaaaaaaaaaaaaaaaaaaaaaaaaaaaaaaaaaaaaaaaaaaaaaaaaaaaaaaaaaaaaaaaaaaaaaaaaaaaaaaaaaaaaaaaaaaaaaaaa

SEQ ID NO: 14758 - RNA, 1812 nt, Artificial Sequence
  mRNA product Design b-4 (hSL-A100) comprising derived and/or modified sequence from LASV(Mad39;Clade IV)__ANH09722__GPC (opt1)
aggagagucccgcagucggcguccagcggcucugcuuguucgugugugugucguugcaggccuuauucaagcuuaccaugggccagaucgugaccuucuuccaggaggucccccacgugaucgaggaggugaugaacaucguccugaucgcccucagcauccuggccgugcugaaggggcucuacaacguggcgaccugcggccugaucgggcuggucacguuccuccugcugugcggccgcuccugcaccaccacccucuacaaggggguguacgagcugcaggcccuggagcucaacauggagacgcugaacaugaccaugccgcugagcugcaccaagaacaacucccaccacuacauccgggugggcaacgagaccggccucgagcugacgcugaccaacaccagccucaucaaccacaaguucugcaaccuguccgacgcccacaagaagaaccuguacgaccacgcccucaugagcaucaucuccaccuuccaccugagcauccccaacuucaaccaguacgaggccauguccugcgacuucaacgacgggaagaucagcguccaguacaaccugucccacacguacgcgggcgacaccgccaaccacugcgggaccguggccaacggcgugcuccagaccuucaugcgcauggccuggggcgggagcuacaucgcgcuggacuccggccgcgggggcugggacugcaucaugacgagcuaccaguaccugaucauccagaacaccaccugggaggaccacugccaguucucccggcccagccccaucggguaccucggccugcugucccagcggacccgcgacaucuacaucagccggcgccuccugggcacguucaccuggacccuguccgacagcgaggggaaggacaccccgggcggguacugccucacgcgguggaugcugaucgaggccgagcugaagugcuucggcaacaccgccgucgccaagugcaacgagaagcacgacgaggaguucugcgacaugcuccgccuguucgacuucaacaagcaggccauccagcggcugaaggcggaggcccagaugagcauccagcucaucaacaaggccgugaacgcccugaucaacgaccagcugaucaugaagaaccaccuccgcgacaucauggggauccccuacugcaacuacuccaaguacugguaccugaaccacaccgugaccggcaagacgagccugcccaagugcuggcucgucuccaacggcagcuaccugaacgagacccacuucuccgacgacaucgagcagcaggccgacaacaugaucaccgagaugcugcagaaggaguacauggagcggcaggggaagacgccccucggccugguggaccuguucguguucagcaccuccuucuaccugaucagcaucuuccuccaccuggucaagaucccgacccaccgccacgugguggggaagcccugccccaagccccaccggcugaaccacaugggcaucugcuccugcggguucuacaagcagccgggcguccccgugcgcuggaagcggugaggacuaguaauaaggaaacuguaugaaugucugugggcaggaagugaagagauccuucuguaaagguuuuuggaauuaugucugcugaauaauaaacuuuuuugaaauaauaaaucugguagaaaaaugagaucucaaaggcucuuuucagagccaccaaaaaaaaaaaaaaaaaaaaaaaaaaaaaaaaaaaaaaaaaaaaaaaaaaaaaaaaaaaaaaaaaaaaaaaaaaaaaaaaaaaaaaaaaaaaaaaaaaaaa

SEQ ID NO: 14759 - RNA, 1812 nt, Artificial Sequence
  mRNA product Design b-4 (hSL-A100) comprising derived and/or modified sequence from LASV(Z0947-SLE-2011;Clade IV)__AIT17840__GPC (opt1)
aggagagucccgcagucggcguccagcggcucugcuuguucgugugugugucguugcaggccuuauucaagcuuaccaugggccagaucgugaccuucuuccaggaggucccccacgugaucgaggaggugaugaacaucguccugaucgcccucagcauccuggccgugcugaaggggcucuacaacuucgcgaccugcggccugguggggcuggucacguuccuccugcugugcggccgcuccugcaccaucagccucuacaaggggguguacgagcugcagacccuggagcucaacauggagacccugaacaugacgaugccgcuguccugcaccaagaacaacagccaccacuacaucauggugggcaacgagaccggccucgagcugacccugacgaacaccuccaucaucaaccacaaguucugcaaccucagcgacgcccacaagaagaaccuguacgaccacgcccugauguccaucaucagcaccuuccaccucuccauccccaacuucaaccaguacgaggccaugagcugcgacuucaacgggggcaagaucuccguccaguacaaccugagccacuccuacgccggggacgcggccaaccacugcggcaccguggccaacggggugcugcagacguucaugcggauggccuggggcggcagcuacaucgcgcucgacuccgggcgcgaccggugggacugcaucaugaccagcuaccaguaccugaucauccagaacaccaccugggaggaccacugccaguucucccgccccagccccaucggcuaccuggggcuccugucccagcggacgcgcgacaucuacaucagccggcgccugcucggcaccuucaccuggacccugagcgacuccgagggcaaggacacgcccgggggcuacugccugacccgguggaugcucaucgaggccgagcugaagugcuucgggaacaccgccgucgccaagugcaacgagaagcacgacgaggaguucugcgacaugcugcgccucuucgacuucaacaagcaggccauccagcggcugaaggcggaggcccagaugagcauccagcugaucaacaaggccgugaacgcccucaucaacgaccagcugaucaugaagaaccaccuccgcgacaucaugggcauccccuacugcaacuacuccaaguacugguaccugaaccacaccacgaccgggaagaccagccugcccaagugcuggcugguguccaacggcagcuaccucaacgagacccacuucuccgacgacaucgagcagcaggccgacaacaugaucacggagaugcugcagaaggaguacauggagcggcagggcaagaccccgcuggggcucgucgaccuguucguguucagcaccuccuucuaccugaucagcaucuuccugcaccucgugaagaucccgacccaccgccacaucgucggcaagcccugccccaagccccaccggcugaaccacauggggaucugcuccugcggccuguacaagcagccgggggugcccgugaaguggaagcgcugaggacuaguaauaaggaaacuguaugaaugucugugggcaggaagugaagagauccuucuguaaagguuuuuggaauuaugucugcugaauaauaaacuuuuuugaaauaauaaaucugguagaaaaaugagaucucaaaggcucuuuucagagccaccaaaaaaaaaaaaaaaaaaaaaaaaaaaaaaaaaaaaaaaaaaaaaaaaaaaaaaaaaaaaaaaaaaaaaaaaaaaaaaaaaaaaaaaaaaaaaaaaaaaaa

SEQ ID NO: 14760 - RNA, 1812 nt, Artificial Sequence
  mRNA product Design b-4 (hSL-A100) comprising derived and/or modified sequence from LASV(Josiah;Clade IV)__NP_694870__GPC (opt4)
aggagagucccgcagucggcguccagcggcucugcuuguucgugugugugucguugcaggccuuauucaagcuuaccaugggccagaucgugaccuucuuccaggaggugccccacgugaucgaggaggugaugaacaucgugcugaucgcccugagcgugcuggccgugcugaagggccuguacaacuucgccaccugcggccuggugggccuggugaccuuccugcugcugugcggcagaagcugcaccaccagccuguacaagggcguguacgagcugcagacccuggagcugaacauggagacccugaacaugaccaugccccugagcugcaccaagaacaacagccaccacuacaucauggugggcaacgagaccggccuggagcugacccugaccaacaccagcaucaucaaccacaaguucugcaaccugagcgacgcccacaagaagaaccuguacgaccacgcccugaugagcaucaucagcaccuuccaccugagcauccccaacuucaaccaguacgaggccaugagcugcgacuucaacggcggcaagaucagcgugcaguacaaccugagccacagcuacgccggcgacgccgccaaccacugcggcaccguggccaacggcgugcugcagaccuucaugagaauggccuggggcggcagcuacaucgcccuggacagcggcagaggcaacugggacugcaucaugaccagcuaccaguaccugaucauccagaacaccaccugggaggaccacugccaguucagcagacccagccccaucggcuaccugggccugcugagccagagaaccagagacaucuacaucagcagaagacugcugggcaccuucaccuggacccugagcgacagcgagggcaaggacacccccggcggcuacugccugaccagauggaugcugaucgaggccgagcugaagugcuucggcaacaccgccguggccaagugcaacgagaagcacgacgaggaguucugcgacaugcugagacuguucgacuucaacaagcaggccauccagagacugaaggccgaggcccagaugagcauccagcugaucaacaaggccgugaacgcccugaucaacgaccagcugaucaugaagaaccaccugagagacaucaugggcauccccuacugcaacuacagcaaguacugguaccugaaccacaccaccaccggcagaaccagccugcccaagugcuggcuggugagcaacggcagcuaccugaacgagacccacuucagcgacgacaucgagcagcaggccgacaacaugaucaccgagaugcugcagaaggaguacauggagagacagggcaagaccccccugggccugguggaccuguucguguucagcaccagcuucuaccugaucagcaucuuccugcaccuggugaagauccccacccacagacacaucgugggcaagagcugccccaagccccacagacugaaccacaugggcaucugcagcugcggccuguacaagcagcccggcgugcccgugaaguggaagagaugaggacuaguaauaaggaaacuguaugaaugucugugggcaggaagugaagagauccuucuguaaagguuuuuggaauuaugucugcugaauaauaaacuuuuuugaaauaauaaaucugguagaaaaaugagaucucaaaggcucuuuucagagccaccaaaaaaaaaaaaaaaaaaaaaaaaaaaaaaaaaaaaaaaaaaaaaaaaaaaaaaaaaaaaaaaaaaaaaaaaaaaaaaaaaaaaaaaaaaaaaaaaaaaaa

SEQ ID NO: 14761 - RNA, 1809 nt, Artificial Sequence
  mRNA product Design b-4 (hSL-A100) comprising derived and/or modified sequence from LASV(LP;Clade I)__AAF86701__GPC (opt4)
aggagagucccgcagucggcguccagcggcucugcuuguucgugugugugucguugcaggccuuauucaagcuuaccaugggccagaucaucaccuucuuccaggaggugccccacgugaucgaggaggugaugaacaucgugcugaucgcccugagccugcuggccauccugaagggccuguacaacaucgccaccugcggcaucaucggccugguggccuuccuguuccugugcggcaagagcugcagccugacccugaagggcggcuacgagcugcagacccuggagcugaacauggagacccugaacaugaccaugccccugagcugcaccaagaacagcagccaccacuacaucagagugggcaacgagaccggccuggagcugacccugaccaacaccagcaucaucaaccacaaguucugcaaccugagcgacgcccacaagaagaaccuguacgaccacgcccugaugagcaucaucagcaccuuccaccugagcauccccaacuucaaccaguacgaggccaugagcugcgacuucaacggcggcaagaucagcgugcaguacaaccugagccacagcuacgccggcgacgccgccgagcacugcggcaccguggccaacggcgugcugcagaccuucaugagaauggccuggggcggcagauacaucgcccuggacagcggcaagggcaacugggacugcaucaugaccagcuaccaguaccugaucauccagaacaccaccugggaggaccacugccaguucagcagacccagccccaucggcuaccugggccugcugagccagagaaccagagacaucuacaucagcagaagacugcugggcaccuucaccuggacccugagcgacagcgagggcaacgagacccccggcggcuacugccugaccagauggaugcugaucgaggccgagcugaagugcuucggcaacaccgccguggccaagugcaacgagaagcacgacgaggaguucugcgacaugcugagacuguucgacuucaacaagcaggccaucagaagacugaaggccgaggcccagaugagcauccagcugaucaacaaggccgugaacgcccugaucaacgaccagcugaucaugaagaaccaccugagagacaucaugggcauccccuacugcaacuacagcaaguacugguaccugaaccacaccagcagcggcagaaccagccugcccaagugcuggcugaucagcaacggcagcuaccugaacgagacccaguucagcgacgacaucgagcagcaggccgacaacaugaucaccgagaugcugcagaaggaguacaucgagagacagggcaagaccccccugggccugguggacaucuucaucuucagcaccagcuucuaccugaucagcaucuuccugcaccugaucaagauccccacccacagacacaucgugggcaagcccugccccaagccccacagacugaaccacaugggcgugugcagcugcggccuguacaagcaccccggcgugcccaccaaguggaagagaugaggacuaguaauaaggaaacuguaugaaugucugugggcaggaagugaagagauccuucuguaaagguuuuuggaauuaugucugcugaauaauaaacuuuuuugaaauaauaaaucugguagaaaaaugagaucucaaaggcucuuuucagagccaccaaaaaaaaaaaaaaaaaaaaaaaaaaaaaaaaaaaaaaaaaaaaaaaaaaaaaaaaaaaaaaaaaaaaaaaaaaaaaaaaaaaaaaaaaaaaaaaaaaaaa

SEQ ID NO: 14762 - RNA, 1809 nt, Artificial Sequence
  mRNA product Design b-4 (hSL-A100) comprising derived and/or modified sequence from LASV(803213;Clade II)__AAF86703__GPC (opt4)
aggagagucccgcagucggcguccagcggcucugcuuguucgugugugugucguugcaggccuuauucaagcuuaccaugggccagaucaucaccuucuuccaggaggugccccacgugaucgaggaggugaugaacaucgugcugaucgcccugagccugcuggccauccugaagggcaucuacaacguggccaccugcggccuguucggccugaucagcuuccugcugcugugcggcagaagcugcagcgugaccuacaagggcguguacgagcugcagacccuggagcugaacauggccaaccugaacaugaccaugccccugagcugcaccaagaacaacagccaccacuacaucauggugggcaacgagaccggccuggagcugacccugaccaacaccagcaucaucaaccacaaguucugcaaccugagcgacgcccacaagaagaaccuguacgaccacgcccugaugagcaucaucagcaccuuccaccugagcauccccaacuucaaccaguacgaggccaugagcugcgacuucaacggcggcaagaucagcgugcaguacaaccugagccacagcuucgccguggacgccgccaaccacugcggcaccaucgccaacggcgugcugcagaccuucaugagaauggccuggggcggcagcuacaucgcccuggacagcggcaagggcaacugggacugcaucaugaccagcuaccaguaccugaucauccagaacaccaccugggaggaccacugccaguucagcagacccagccccaucggcuaccugggccugcugagccagagaaccagagacaucuacaucagcagaagacugcugggcaccuucaccuggacccugagcgacagcgagggcaacgaggcccccggcggcuacugccugaccagauggaugcugaucgaggccgagcugaagugcuucggcaacaccgccguggccaagugcaacgagaagcacgacgaggaguucugcgacaugcugagacuguucgacuucaacaagcaggccaucaagagacugaagaccgaggcccagaugagcauccagcugaucaacaaggccgugaacgcccugaucaacgaccagcugaucaugaagaaccaccugagagacaucaugggcauccccuacugcaacuacagcagauacugguaccugaaccacaccgugaccggcaagaccagccugcccagaugcuggcuggugagcaacggcagcuaccugaacgagacccacuucagcgacgacaucgagcagcaggccgacaacaugaucaccgagaugcugcagaaggaguacauggacagacagggcaagaccccccugggccugguggaccuguucguguucagcaccagcuucuaccugaucagcaucuuccugcaccuggugaagauccccacccacagacacaucgugggcaagcccugccccaagccccacagacugaaccacaugggcaucugcagcugcggccuguacaagcaccccggcgugcccgugaaguggaagagaugaggacuaguaauaaggaaacuguaugaaugucugugggcaggaagugaagagauccuucuguaaagguuuuuggaauuaugucugcugaauaauaaacuuuuuugaaauaauaaaucugguagaaaaaugagaucucaaaggcucuuuucagagccaccaaaaaaaaaaaaaaaaaaaaaaaaaaaaaaaaaaaaaaaaaaaaaaaaaaaaaaaaaaaaaaaaaaaaaaaaaaaaaaaaaaaaaaaaaaaaaaaaaaaaa

SEQ ID NO: 14763 - RNA, 1809 nt, Artificial Sequence
  mRNA product Design b-4 (hSL-A100) comprising derived and/or modified sequence from LASV(GA391;Clade III)__CAA36645__GPC (opt4)
aggagagucccgcagucggcguccagcggcucugcuuguucgugugugugucguugcaggccuuauucaagcuuaccaugggccagaucgugaccuucuuccaggaggugccccacgugaucgaggaggugaugaacaucgugcugaucgcccugagcauccuggccauccugaagggccuguacaacguggccaccugcggccugaucggccuggugaccuuccugcugcugagcggcagaagcugcagccugaucuacaagggcaccuacgagcugcagacccuggagcugaacauggagacccugaacaugaccaugccccugagcugcaccaagaacaacagccaccacuacaucagagugggcaacgagaccggccuggagcugacccugaccaacaccagcauccugaaccacaaguucugcaaccugagcgacgcccacaagagaaaccuguacgaccacagccugaugagcaucaucagcaccuuccaccugagcauccccaacuucaaccaguacgaggccaugagcugcgacuucaacggcggcaagaucaccgugcaguacaaccugagccacagcuucgccguggacgccgccggccacugcggcacccuggccaacggcgugcugcagaccuucaugagaauggccuggggcggcagcuacaucgcccuggacagcggcagaggcaacugggacugcaucaugaccagcuaccaguaccugaucauccagaacaccaccugggacgaccacugccaguucagcagacccagccccaucggcuaccugggccugcugagccagagaaccagagacaucuacaucagcagaagacugcugggcaccuucaccuggacccugagcgacagcgagggcaacgagacccccggcggcuacugccugaccagauggaugcugaucgaggccgagcugaagugcuucggcaacaccgccguggccaagugcaacgagaagcacgacgaggaguucugcgacaugcugagacuguucgacuucaacaagcaggccaucagaagacugaagaccgaggcccagaugagcauccagcugaucaacaaggccgugaacgcccugaucaacgaccagcugaucaugaagaaccaccugagagacaucaugggcauccccuacugcaacuacagcagauacugguaccugaaccacaccagcaccggcaagaccagccugcccagaugcuggcugaucagcaacggcagcuaccugaacgagaccaaguucagcgacgacaucgagcagcaggccgacaacaugaucaccgagaugcugcagaaggaguacaucgacagacagggcaagaccccccugggccugguggaccuguucguguucagcaccagcuucuaccugaucagcaucuuccugcaccuggugaagauccccacccacagacacaucgugggcaagcccugccccaagccccacagacugaaccacaugggcaucugcagcugcggccuguacaagcagcccggcgugcccgugagauggaagagaugaggacuaguaauaaggaaacuguaugaaugucugugggcaggaagugaagagauccuucuguaaagguuuuuggaauuaugucugcugaauaauaaacuuuuuugaaauaauaaaucugguagaaaaaugagaucucaaaggcucuuuucagagccaccaaaaaaaaaaaaaaaaaaaaaaaaaaaaaaaaaaaaaaaaaaaaaaaaaaaaaaaaaaaaaaaaaaaaaaaaaaaaaaaaaaaaaaaaaaaaaaaaaaaaa

SEQ ID NO: 14764 - RNA, 1812 nt, Artificial Sequence
  mRNA product Design b-4 (hSL-A100) comprising derived and/or modified sequence from LASV(AV;Clade V)__CCA30314__GPC (opt4)
aggagagucccgcagucggcguccagcggcucugcuuguucgugugugugucguugcaggccuuauucaagcuuaccaugggccagaucgugaccuucuuccaggaggugccccacgugaucgaggaggugaugaacaucgugcugaucgcccugagcauccuggccgugcugaagggccuguacaacaucgccaccugcggccugaucggccugaucaccuuccugcugcugugcggcagaagcugcagcagcaaccuguacaagggcguguacgagcugcagagccuggaccugaacauggagacccugaacaugaccaugccccugagcugcaccaagaacaacagccaccacuacaucagagugggcaacgacaccggccuggagcugacccugaccaacaccagcauccugaaccacaaguucugcaaccugagcgacgcccacaagaaggaccuguacgaccacgcccugaugagcaucaucagcaccuuccaccugagcauccccaacuucaaccaguacgaggccaugagcugcgacuucaacggcggcaagaucagcgugcaguacaaccugagccacagcuacgccaucgacgccgccaaccacugcggcaccguggccaacggcauccugcagaccuucaugagaauggccuggggcggcagcuacaucgcccuggacagcggcagaggcaacugggacugcaucaugaccagcuaccaguaccugaucauccagaacaccaccugggagaaccacugccaguucagcagacccagccccaucggcuaccugggccugcugagccagagaaccagagacaucuacaucagcagaagacugcugggcaccuucaccuggacccugagcgacagcgagggcaacgccacccccggcggcuacugccugaccagauggaugcugaucgaggccgagcugaagugcuucggcaacaccgccguggccaagugcaacgagaagcacgacgaggaguucugcgacaugcugagacuguucgacuucaacaagcaggccaucagcagacugaagagcgaggcccagaugagcauccagcugaucaacaaggccgugaacgcccugaucaacgaccagcugaucaugaagaaccaccugagagacaucaugggcauccccuacugcaacuacagcaaguacugguaccugaaccacaccaucaccggcaagaccagccugcccaagugcuggcuggugagcaacggcagcuaccugaacgagacccacuucagcgacgacaucgagcagcaggccgacaacaugaucaccgagaugcugcagaaggaguacauggagagacagggcaagaccccccugggccugguggaccuguucguguucagcaccagcuucuaccugaucagcaucuuccugagacuggugaagauccccacccacagacacaucgugggcaagcccugccccaagccccacagacugaaccacaugggcaucugcagcugcggccuguacaagcagcccggcgugcccgugagauggaagagaugaggacuaguaauaaggaaacuguaugaaugucugugggcaggaagugaagagauccuucuguaaagguuuuuggaauuaugucugcugaauaauaaacuuuuuugaaauaauaaaucugguagaaaaaugagaucucaaaggcucuuuucagagccaccaaaaaaaaaaaaaaaaaaaaaaaaaaaaaaaaaaaaaaaaaaaaaaaaaaaaaaaaaaaaaaaaaaaaaaaaaaaaaaaaaaaaaaaaaaaaaaaaaaaaa

SEQ ID NO: 14765 - RNA, 1809 nt, Artificial Sequence
  mRNA product Design b-4 (hSL-A100) comprising derived and/or modified sequence from LASV(Togo/2016/7082;Clade VI)__AMR44577__GPC (opt4)
aggagagucccgcagucggcguccagcggcucugcuuguucgugugugugucguugcaggccuuauucaagcuuaccaugggccagaucaucaccuucuuccaggaggugccccacgugaucgaggaggugaugaacaucgugcugaucgcccugagccugcuggccauccugaagggcguguacaacguggccaccugcggcaucaucggccuggugaccuuccuguuccugugcggcagaagcugcagccugaucuacaagggcagcuacgagcugcagacccuggagcugaacauggagacccugaacaugaccaugccccugagcugcaccaagaacagcagccaccacuacaucagagugggcaacgagaccggccuggagcugacccugaccaacaccagcaucaucaaccacaaguucugcaaccugagcgacgcccacaagagaaaccuguacgaccacgcccugaugagcauccugagcaccuuccaccugagcauccccaacuucaaccaguacgaggccaugagcugcgacuucaacggcggcaagaucagcgugcaguacaaccugagccacgccuacgccguggacgccgccgagcacugcggcaccguggccaacggcgugcugcagaccuucaugagaauggccuggggcggcagcuacaucgcccuggacagcggcagaggcaacugggacugcaucaugaccagcuaccaguaccugaucauccagaacaccaccugggaggaccacugccaguucagcagacccagccccaucggcuaccugggccugcugagccagagaaccagagacaucuacaucagcagaagacugcugggcaccuucaccuggacccugagcgacagcgagggcaacgagacccccggcggcuacugccugaccagauggaugcugaucgaggccgagcugaagugcuucggcaacaccgccguggccaagugcaacgagaagcacgacgaggaguucugcgacaugcugagacuguucgacuucaacaagcaggccauccagagacugaagagcgaggcccagaugagcauccagcugaucaacaaggccgugaacgcccugaucaacgaccagcugaucaugaagaaccaccugagagacaugaugggcauccccuacugcaacuacagcaaguacugguaccugaaccacaccagcagcggcagaaccagccugcccaagugcuggcuggugagcaacggcagcuaccugaacgagacccacuucagcgacgacaucgagcagcaggccgacaacaugaucaccgagaugcugcagaaggaguacaucgacagacagggcaagaccccccugggccugguggaccuguucguguucagcaccagcuucuaccugaucagcaucuuccugcaccugaucaagauccccacccacagacacaucgugggcaagcccugccccaagccccacagacugaaccacaugggcaucugcagcugcggccuguacaagcagcccggcgugcccaccagauggaagagaugaggacuaguaauaaggaaacuguaugaaugucugugggcaggaagugaagagauccuucuguaaagguuuuuggaauuaugucugcugaauaauaaacuuuuuugaaauaauaaaucugguagaaaaaugagaucucaaaggcucuuuucagagccaccaaaaaaaaaaaaaaaaaaaaaaaaaaaaaaaaaaaaaaaaaaaaaaaaaaaaaaaaaaaaaaaaaaaaaaaaaaaaaaaaaaaaaaaaaaaaaaaaaaaaa

SEQ ID NO: 14766 - RNA, 1809 nt, Artificial Sequence
  mRNA product Design b-4 (hSL-A100) comprising derived and/or modified sequence from LASV(KAK-428;Clade n.d. (VII))__ANH09740__GPC (opt4)
aggagagucccgcagucggcguccagcggcucugcuuguucgugugugugucguugcaggccuuauucaagcuuaccaugggccagaucgugaccuucuuccaggaggugccccacgugaucgaggaggugaugaacaucgugcugaucgcccugagccugcuggccauccugaagggccuguacaacuucgccaccugcggcgugaucggccugaucaccuuccugcugcugugcggcagaagcugcagcgccaccuacaagggccaguacgagcugcagacccuggagcugaacauggagagccugaacaugaccaugccccugagcugcaccaagaacaacagccaccacuacaucagagccggcaacaacaccggccuggagcugacccugaccaacaccagcaucaucagccacaaguucugcaaccugagcgacgcccacaagaagaaccuguacgaccacacccugaugagcaucaucaccaccuuccaccugagcauccccaacuucaaccaguacgaggccaugagcugcgacuucaacggcggcaagaucagcauccaguacaaccugagccacagcuacgccggcgacgccgcccagcacugcggcaccguggccaacggcgugcugcagaccuucaugagaauggccuggggcggcagcuaccuggcccuggacagcggcagaagaggcugggacugcaucaucagcagcuaccaguaccugaucauccagaacaccaccugggacgaccacugccaguucagcagacccagccccaucggcuaccugggcuucgugagccagaagaccagagacaucuacaucagcagaagacugcugggcaccuucaccuggacccugagcgacagcgagggccacgacaugcccggcggcuacugccugaccagauggaugcugaucgaggccgaccugaagugcuucggcaacaccgccguggccaagugcaacgagaagcacgacgaggaguucugcgacauguggagacuguucgacuucaacaagcaggccauccagagacugaaggccgaggcccagaugaacauccagcugaucaacaaggccgugaacgcccugaucaacgaccagcugaugaugaagaaccaccugagagacaucaugggcauccccuacugcaacuacagcaaguucugguaccugaacaacaccaccaccggcagaaccagccugcccagaugcuggcugaucagcaacggcagcuaccugaacgagacccacuucagcgacgacaucgagcagcaggccgacaacaugaucaccgagaugcugcagaaggaguacauggacagacagggcaagaccccccugggccugguggaccuguucguguucagcaccagcuucuaccugaucaccaucuuccugcaccuggugaagauccccacccacagacacaucgugggcaagcccugccccaagccccacagacugaaccacaugggcaucugcagcugcggccuguacaagcagcccggcgugcccgugagauggaagagaugaggacuaguaauaaggaaacuguaugaaugucugugggcaggaagugaagagauccuucuguaaagguuuuuggaauuaugucugcugaauaauaaacuuuuuugaaauaauaaaucugguagaaaaaugagaucucaaaggcucuuuucagagccaccaaaaaaaaaaaaaaaaaaaaaaaaaaaaaaaaaaaaaaaaaaaaaaaaaaaaaaaaaaaaaaaaaaaaaaaaaaaaaaaaaaaaaaaaaaaaaaaaaaaaa

SEQ ID NO: 14767 - RNA, 1809 nt, Artificial Sequence; identical to SEQ ID NO: 14761
  mRNA product Design b-4 (hSL-A100) comprising derived and/or modified sequence from LASV(Pinneo-NIG-1969;Clade I)__AIT17836__GPC (opt4)

SEQ ID NO: 14768 - RNA, 1809 nt, Artificial Sequence
  mRNA product Design b-4 (hSL-A100) comprising derived and/or modified sequence from LASV(ISTH0009-NIG-2011;Clade II)__AIT17404__GPC (opt4)
aggagagucccgcagucggcguccagcggcucugcuuguucgugugugugucguugcaggccuuauucaagcuuaccaugggccagaucaucaccuucuuccaggaggugccccacgugaucgaggaggugaugaacaucgugcugaucgcccugagccugcuggccauccugaagggcaucuacaacguggccaccugcggccuguucggccuggugagcuuccugcugcugugcggcagaagcugcagcaccaccuacaagggcguguacgagcugcagacccuggagcuggacauggccagccugaacaugaccaugccccugagcugcaccaagaacaacagccaccacuacaucauggugggcaacgagaccggccuggagcugacccugaccaacaccagcaucaucaaccacaaguucugcaaccugagcgacgcccacaagaagaaccuguacgaccacgcccugaugagcaucaucagcaccuuccaccugagcauccccaacuucaaccaguacgaggccaugagcugcgacuucaacggcggcaagaucagcgugcaguacaaccugagccacgccuacgccguggacgccgccaaccacugcggcaccaucgccaacggcgugcugcagaccuucaugagaauggccuggggcggcagcuacaucgcccuggacagcggcaagggcagcugggacugcaucaugaccagcuaccaguaccugaucauccagaacaccaccugggaggaccacugccaguucagcagacccagccccaucggcuaccugggccugcugagccagagaaccagagacaucuacaucagcagaagacugcugggcaccuucaccuggacccugagcgacagcgagggcaacgagacccccggcggcuacugccugaccagauggaugcugaucgaggccgagcugaagugcuucggcaacaccgccguggccaagugcaacgagaagcacgacgaggaguucugcgacaugcugagacuguucgacuucaacaagcaggccaucagaagacugaagaccgaggcccagaugagcauccagcugaucaacaaggccgugaacgcccugaucaacgaccagcugaucaugaagaaccaccugagagacaucaugggcauccccuacugcaacuacagcaaguacugguaccugaaccacaccgugaccggcaagaccagccugcccagaugcuggcuggugagcaacggcagcuaccugaacgagacccacuucagcgacgacaucgagcagcaggccgacaacaugaucaccgagcugcugcagaaggaguacauggacagacagggcaagaccccccugggccugguggaccuguucguguucagcaccagcuucuaccugaucagcaucuuccugcaccugaucaagauccccacccacagacacaucaccggcaagcccugccccaagccccacagacugaaccacaugggcaucugcagcugcggccuguacaagcaccccggcgugcccgugaaguggaagagaugaggacuaguaauaaggaaacuguaugaaugucugugggcaggaagugaagagauccuucuguaaagguuuuuggaauuaugucugcugaauaauaaacuuuuuugaaauaauaaaucugguagaaaaaugagaucucaaaggcucuuuucagagccaccaaaaaaaaaaaaaaaaaaaaaaaaaaaaaaaaaaaaaaaaaaaaaaaaaaaaaaaaaaaaaaaaaaaaaaaaaaaaaaaaaaaaaaaaaaaaaaaaaaaaa

SEQ ID NO: 14769 - RNA, 1809 nt, Artificial Sequence
  mRNA product Design b-4 (hSL-A100) comprising derived and/or modified sequence from LASV(ISTH2010-NIG-2012;Clade II)__AIT17482__GPC (opt4)
aggagagucccgcagucggcguccagcggcucugcuuguucgugugugugucguugcaggccuuauucaagcuuaccaugggccagaucaucaccuucuuccaggaggugccccacgugaucgaggaggugaugaacaucgugcugaucgcccugagccugcuggccauccugaagggcaucuacaacguggccaccugcggccuguucggccuggugagcuuccugcugcugugcggcagaagcugcagcaccaccuacaagggcguguacgagcugcagacccuggagcuggacauggccagccugaacaugaccaugccccugagcugcaccaagaacaacagccaccacuacaucauggugggcaacgagaccggccuggagcugacccugaccaacaccagcaucaucaaccacaaguucugcaaccugagcgacgcccacaagaagaaccuguacgaccacgcccugaugagcaucaucagcaccuuccaccugagcauccccaacuucaaccaguacgaggccaugagcugcgacuucaacggcggcaagaucagcgugcaguacaaccugagccacgccuacgccguggacgccgccaaccacugcggcaccaucgccaacggcgugcugcagaccuucaugagaauggccuggggcggcagcuacaucgcccuggacagcggcaagggcagcugggacugcaucaugaccagcuaccaguaccugaucauccagaacaucaccugggaggaccacugccaguucagcagacccagccccaucggcuaccugggccugcugagccagagaaccagagacaucuacaucagcagaagacugcugggcaccuucaccuggacccugagcgacagcgagggcaacgagacccccggcggcuacugccugaccagauggaugcugaucgaggccgagcugaagugcuucggcaacaccgccguggccaagugcaacgagaagcacgacgaggaguucugcgacaugcugagacuguucgacuucaacaagcaggccaucagaagacugaagaccgaggcccagaugagcauccagcugaucaacaaggccgugaacgcccugaucaacgaccagcugaucaugaagaaccaccugagagacaucaugggcauccccuacugcaacuacagcaaguacugguaccugaaccacaccgugaccggcaagaccagccugcccagaugcuggcuggugagcaacggcagcuaccugaacgagacccacuucagcgacgacaucgagcagcaggccgacaacaugaucaccgagcugcugcagaaggaguacaucgacagacagggcaagaccccccugggccugguggaccuguucguguucagcaccagcuucuaccugaucagcaucuuccugcaccuggugaagauccccacccacagacacguggugggcaagcccugccccaagccccacagacugaaccacaugggcaucugcagcugcggccuguacaagcaccccggcgugcccgugaaguggaagagaugaggacuaguaauaaggaaacuguaugaaugucugugggcaggaagugaagagauccuucuguaaagguuuuuggaauuaugucugcugaauaauaaacuuuuuugaaauaauaaaucugguagaaaaaugagaucucaaaggcucuuuucagagccaccaaaaaaaaaaaaaaaaaaaaaaaaaaaaaaaaaaaaaaaaaaaaaaaaaaaaaaaaaaaaaaaaaaaaaaaaaaaaaaaaaaaaaaaaaaaaaaaaaaaaa

SEQ ID NO: 14770 - RNA, 1809 nt, Artificial Sequence
  mRNA product Design b-4 (hSL-A100) comprising derived and/or modified sequence from LASV(Lassa virus/H.sapiens-wt/NGA/2015/ISTH_0543;Clade II)__AVO03639__GPC (opt4)
aggagagucccgcagucggcguccagcggcucugcuuguucgugugugugucguugcaggccuuauucaagcuuaccaugggccagaucaucaccuucuuccaggaggugccccacgugaucgaggaggugaugaacaucgugcugaucgcccugagccugcuggccauccugaagggcaucuacaacguggccaccugcggccuguucggccuggugagcuuccugcugcugugcggcagaagcugcagcaccaccuacaagggcguguacgagcugcagacccuggagcuggacauggccaaccugaacaugaccaugccccugagcugcaccaagaacaacagccaccacuacaucauggugggcaacgagaccggccuggagcugacccugaccaacaccagcaucaucaaccacaaguucugcaaccugagcgacgcccacaagaagaaccuguacgaccacgcccugaugagcaucaucagcaccuuccaccugagcauccccaacuucaaccaguacgaggccaugagcugcgacuucaacggcggcaagaucagcgugcaguacaaccugagccacaccuacgccguggacgccgccaaccacugcggcaccaucgccaacggcgugcugcagaccuucaugagaauggccuggggcggcagcuacaucgcccuggacagcggcaagggcagcugggacugcaucaugaccagcuaccaguaccuggugauccagaacaccaccugggaggaccacugccaguucagcagacccagccccaucggcuaccugggccugcugagccagagaaccagagacaucuacaucagcagaagacugcugggcaccuucaccuggacccugagcgacagcgagggcaacgagacccccggcggcuacugccugaccagauggaugcugaucgaggccgagcugaagugcuucggcaacaccgccguggccaagugcaacgagaagcacgacgaggaguucugcgacaugcugagacuguucgacuucaacaagcaggccaucagaagacugaagaccgaggcccagaugagcauccagcugaucaacaaggccgugaacgcccugaucaacgaccagcugaucaugaagaaccaccugagagacaucaugggcauccccuacugcaacuacagcaaguacugguaccugaaccacaccgugaccggcaagaccagccugcccagaugcuggcuggugagcaacggcagcuaccugaacgagacccacuucagcgacgacaucgagcagcaggccgacaacaugaucaccgagcugcugcagaaggaguacaucgacagacagggcaagaccccccugggccugguggaccuguucguguucagcaccagcuucuaccugaucagcaucuuccugcaccuggugaagauccccacccacagacacaucaccggcaagcccugccccaagccccacagacugaaccacaugggcaucugcagcugcggccuguacaagcaccccggcgugcccgugaaguggaagagaugaggacuaguaauaaggaaacuguaugaaugucugugggcaggaagugaagagauccuucuguaaagguuuuuggaauuaugucugcugaauaauaaacuuuuuugaaauaauaaaucugguagaaaaaugagaucucaaaggcucuuuucagagccaccaaaaaaaaaaaaaaaaaaaaaaaaaaaaaaaaaaaaaaaaaaaaaaaaaaaaaaaaaaaaaaaaaaaaaaaaaaaaaaaaaaaaaaaaaaaaaaaaaaaaa

SEQ ID NO: 14771 - RNA, 1809 nt, Artificial Sequence
  mRNA product Design b-4 (hSL-A100) comprising derived and/or modified sequence from LASV(Lassa virus/H.sapiens-wt/NGA/2016/ISTH_0009;Clade II)__AVO03571__GPC (opt4)
aggagagucccgcagucggcguccagcggcucugcuuguucgugugugugucguugcaggccuuauucaagcuuaccaugggccagaucaucaccuucuuccaggaggugccccacgugaucgaggaggugaugaacaucgugcugaucgcccugagccugcuggccauccugaagggcaucuacaacguggccaccugcggccugcugggccuggugagcuuccugcugcugugcggcagaagcugcagcaccaccuacaagggcguguacgagcugcagacccuggagcuggacauggccagccugaacaugaccaugccccugagcugcaccaagaacaacagccaccacuacaucauggugggcaacgagaccggccuggagcugacccugaccaacaccagcaucaucaaccacaaguucugcaaccugagcgacgcccacaagaagaaccuguacgaccacgcccugaugagcaucaucagcaccuuccaccugagcauccccaacuucaaccaguacgaggccaugagcugcgacuucaacggcggcagaaucagcgugcaguacaaccugagccacagcuacgccguggacgccgccaaccacugcggcaccaucgccaacggcgugcugcagaccuucaugagaauggccuggggcggcagcuacaucgcccuggacagcggcaagggcagcugggacugcaucaugaccagcuaccaguaccugaucauccagaacaccaccugggaggaccacugccaguucagcagacccagccccaucggcuaccugggccugcugagccagagaaccagagacaucuacaucagcagaagacugcugggcaccuucaccuggacccugagcgacagcgagggcaacgagacccccggcggcuacugccugaccagauggaugcugaucgaggccgagcugaagugcuucggcaacaccgccguggccaagugcaacgagaagcacgacgaggaguucugcgacaugcugagacuguucgacuucaacaagcaggccaucagaagacugaagaccgaggcccagaugagcauccagcugaucaacaaggccgugaacgcccugaucaacgaccagcugaucaugaagaaccaccugagagacaucaugggcauccccuacugcaacuacagcaaguacugguaccugaaccacaccgugaccggcaagaccagccugcccagaugcuggcuggugagcaacggcagcuaccugaacgagacccacuucagcgacgacaucgagcagcaggccgacaacaugaucaccgagcugcugcagaaggaguacaucgacagacagggcaagaccccccugggccugguggaccuguucguguucagcaccagcuucuaccugaucagcaucuuccugcaccuggugaagauccccacccacagacacaucaccggcaagcccugccccaagccccacagacugaaccacaugggcaucugcagcugcggccuguacaaccaccccggcgugcccgugaaguggaagagaugaggacuaguaauaaggaaacuguaugaaugucugugggcaggaagugaagagauccuucuguaaagguuuuuggaauuaugucugcugaauaauaaacuuuuuugaaauaauaaaucugguagaaaaaugagaucucaaaggcucuuuucagagccaccaaaaaaaaaaaaaaaaaaaaaaaaaaaaaaaaaaaaaaaaaaaaaaaaaaaaaaaaaaaaaaaaaaaaaaaaaaaaaaaaaaaaaaaaaaaaaaaaaaaaa

SEQ ID NO: 14772 - RNA, 1809 nt, Artificial Sequence
  mRNA product Design b-4 (hSL-A100) comprising derived and/or modified sequence from LASV(Lassa virus/H.sapiens-wt/NGA/2016/ISTH_0017;Clade II)__AVO03567__GPC (opt4)
aggagagucccgcagucggcguccagcggcucugcuuguucgugugugugucguugcaggccuuauucaagcuuaccaugggccagaucaucaccuucuuccaggaggugccccacgugaucgaggaggugaugaacaucgugcugaucgcccugagccugcuggccauccugaagggcaucuacaacguggccaccugcggccuguucggccuggugagcuuccugcugcugugcggcagaagcugcagcaccaccuacaagggcguguacgagcugcagacccuggagcuggacauggccagccugaacaugaccaugccccugagcugcaccaagaacaacagccaccacuacaucauggugggcaacgagaccggccuggagcugacccugaccaacaccagcaucaucaaccacaaguucugcaaccugagcgacgcccacaagaagaaccuguacgaccacgcccugaugagcaucaucagcaccuuccaccugagcauccccaacuucaaccaguacgaggccaugagcugcgacuucaacggcggcaagaucagcgugcaguacaaccugagccacaccuacgccaucgacgccgccaaccacugcggcaccaucgccaacggcgugcugcagaccuucaugagaauggccuggggcggcagcuacaucgcccuggacagcggcaagggcagcugggacugcaucaugaccagcuaccaguaccugaucauccagaacaccaccugggaggaccacugccaguucagcagacccagccccaucggcuaccugggccugcugagccagagaaccagagacaucuacaucagcagaagacugcugggcaccuucaccuggacccugagcgacagcgagggcaacgagacccccggcggcuacugccugaccagauggaugcugaucgaggccgagcugaagugcuucggcaacaccgccguggccaagugcaacgagaagcacgacgaggaguucugcgacaugcugagacuguucgacuucaacaagcaggccaucagaagacugaagaccgaggcccagaugagcauccagcugaucaacaaggccgugaacgcccugaucaacgaccagcugaucaugaagaaccaccugagagacaucaugggcauccccuacugcaacuacagcaaguacugguaccugaaccacaccgugaccggcaagaccagccugcccagaugcuggcuggugagcaacggcagcuaccugaacgagacccacuucagcgacgacaucgagcagcaggccgacaacaugaucaccgagcugcugcagaaggaguacauggacagacagggcaagaccccccugggccugguggaccuguucguguucagcaccagcuucuaccugaucagcaucuuccugcaccuggugagaauccccacccacagacacgugaucggcaagcccugccccaagccccacagacugaaccacaugggcaucugcagcugcggccuguacaagcaccccggcgugcccgugaaguggaagagaugaggacuaguaauaaggaaacuguaugaaugucugugggcaggaagugaagagauccuucuguaaagguuuuuggaauuaugucugcugaauaauaaacuuuuuugaaauaauaaaucugguagaaaaaugagaucucaaaggcucuuuucagagccaccaaaaaaaaaaaaaaaaaaaaaaaaaaaaaaaaaaaaaaaaaaaaaaaaaaaaaaaaaaaaaaaaaaaaaaaaaaaaaaaaaaaaaaaaaaaaaaaaaaaaa

SEQ ID NO: 14773 - RNA, 1809 nt, Artificial Sequence
  mRNA product Design b-4 (hSL-A100) comprising derived and/or modified sequence from LASV(Lassa virus/H.sapiens-wt/NGA/2018/ISTH_0959;Clade II)__AVV65099__GPC (opt4)
aggagagucccgcagucggcguccagcggcucugcuuguucgugugugugucguugcaggccuuauucaagcuuaccaugggccagaucaucaccuucuuccaggaggugccccacgugaucgaggaggugaugaacaucgugcugaucgcccugagccugcuggccauccugaagggcaucuacaacguggugaccugcggccuguucggccuggugagcuuccugcugcugugcggcagaagcugcagcaccaccuacaagggcguguacgagcugcagacccuggagcuggacauggccagccugaacaugaccaugccccugagcugcaccaagaacaacagccaccacuacaucauggugggcaacgagaccggccuggagcugacccugaccaacaccagcaucaucaaccacaaguucugcaaccugagcgacgcccacaagaagaaccuguacgaccacgcccugaugagcaucaucagcaccuuccaccugagcauccccaacuucaaccaguacgaggccaugagcugcgacuucaacggcggcaagaucagcgugcaguacaaccugagccacgccuacgccaucgacgccgccaaccacugcggcaccaucgccaacggcgugcugcagaccuucaugagaauggccuggggcggcagcuacaucgcccuggacagcggcaagggcagcugggacugcaucaugaccagcuaccaguaccugaucauccagaacaccaccugggaggaccacugccaguucagcagacccagccccaucggcuaccugggccugcugagccagagaaccagagacaucuacaucagcagaagacugcugggcaccuucaccuggacccugagcgacagcgagggcaacgagacccccggcggcuacugccugaccagauggaugcugaucgaggccgagcugaagugcuucggcaacaccgccguggccaagugcaacgagaagcacgacgaggaguucugcgacaugcugagacuguucgacuucaacaagcaggccaucagaagacugaagaccgaggcccagaugagcauccagcugaucaacaaggccgugaacgcccugaucaacgaccagcugaucaugaagaaccaccugagagacaucaugggcauccccuacugcaacuacagcaaguacugguaccugaaccacaccgugaccggcaagaccagccugcccagaugcuggcuggugagcaacggcagcuaccugaacgagacccacuucagcgacgacaucgagcagcaggccgacaacaugaucaccgagcugcugcagaaggaguacaucgacagacagggcaagaccccccugggccugguggaccuguucguguucagcaccagcuucuaccugaucagcaucuuccugcaccuggugaagauccccacccacagacacgugaucggcaagcccugccccaagccccacagacugaaccacaugggcaucugcagcugcggccuguacaagcaccccggcgugcccgugaaguggaagagaugaggacuaguaauaaggaaacuguaugaaugucugugggcaggaagugaagagauccuucuguaaagguuuuuggaauuaugucugcugaauaauaaacuuuuuugaaauaauaaaucugguagaaaaaugagaucucaaaggcucuuuucagagccaccaaaaaaaaaaaaaaaaaaaaaaaaaaaaaaaaaaaaaaaaaaaaaaaaaaaaaaaaaaaaaaaaaaaaaaaaaaaaaaaaaaaaaaaaaaaaaaaaaaaaa

SEQ ID NO: 14774 - RNA, 1809 nt, Artificial Sequence
  mRNA product Design b-4 (hSL-A100) comprising derived and/or modified sequence from LASV(LASV003-NIG-2008;Clade II)__AIT17580__GPC (opt4)
aggagagucccgcagucggcguccagcggcucugcuuguucgugugugugucguugcaggccuuauucaagcuuaccaugggccagaucaucaccuucuuccaggaggugccccacgugaucgaggaggugaugaacaucgugcugaucgcccugagccugcuggccauccugaagggcaucuacaacguggccaccugcggccuguucggccuggugagcuuccugcugcugugcggcagaagcugcagcaccaccuacaagggcguguacgagcugcagacccuggagcuggacauggccagccugaacaugaccaugccccugagcugcaccaagaacaacagccaccacuacaucauggugggcaacgagaccggccuggagcugacccugaccaacaccagcaucaucaaccacaaguucugcaaccugagcgacgcccacaagaagaaccuguacgaccacgcccugaugagcaucaucagcaccuuccaccugagcauccccaacuucaaccaguacgaggccaugagcugcgacuucaacggcggcaagaucagcgugcaguacaaccugagccacaccuacgccguggacgccgccaaccacugcggcaccaucgccaacggcgugcugcagaccuucaugagaauggccuggggcggcagcuacaucgcccuggacagcggcaagggcagcugggacugcaucaugaccagcuaccaguaccugaucauccagaacaccaccugggaggaccacugccaguucagcagacccagccccaucggcuaccugggccugcugagccagagaaccagagacaucuacaucagcagaagacugcugggcaccuucaccuggacccugagcgacagcgagagcaacgagacccccggcggcuacugccugaccagauggaugcugaucgaggccgagcugaagugcuucggcaacaccgccguggccaagugcaacgagaagcacgacgaggaguucugcgacaugcugagacuguucgacuucaacaagcaggccaucagaagacugaaggccgaggcccagaugagcauccagcugaucaacaaggccgugaacgcccugaucaacgaccagcugaucaugaagaaccaccugagagacaucaugggcauccccuacugcaacuacagcaaguacugguaccugaaccacaccgugaccggcagaaccagccugcccagaugcuggcuggugagcaacggcagcuaccugaacgagacccacuucagcgacgacaucgagcagcaggccgacaacaugaucaccgagcugcugcagaaggaguacauggacagacagggcaagaccccccugggccugguggaccuguucguguucagcaccagcuucuaccugaucagcaucuuccugcaccuggugaagauccccacccacagacacgugaucggcaagcccugccccaagccccacagacugaaccacaugggcaucugcagcugcggccuguacaagcaccccggcgugcccgugaaguggaagagaugaggacuaguaauaaggaaacuguaugaaugucugugggcaggaagugaagagauccuucuguaaagguuuuuggaauuaugucugcugaauaauaaacuuuuuugaaauaauaaaucugguagaaaaaugagaucucaaaggcucuuuucagagccaccaaaaaaaaaaaaaaaaaaaaaaaaaaaaaaaaaaaaaaaaaaaaaaaaaaaaaaaaaaaaaaaaaaaaaaaaaaaaaaaaaaaaaaaaaaaaaaaaaaaaa

SEQ ID NO: 14775 - RNA, 1809 nt, Artificial Sequence
  mRNA product Design b-4 (hSL-A100) comprising derived and/or modified sequence from LASV(LASV035-NIG-2009;Clade II)__AIT17588__GPC (opt4)
aggagagucccgcagucggcguccagcggcucugcuuguucgugugugugucguugcaggccuuauucaagcuuaccaugggccagaucaucaccuucuuccaggaggugccccacgugaucgaggaggugaugaacaucgugcugaucgcccugagccugcuggccauccugaagggcaucuacaacguggccaccugcggccuguucggccuggugagcuuccugcugcugugcggcagaagcugcagcaccaccuacaagggcguguacgagcugcagacccuggagcuggacauggccagccugaacaugaccaugccccugagcugcaccaagaacaacagccaccacuacaucauggugggcaacgagaccggccuggagcugacccugaccaacaccagcaucaucaaccacaaguucugcaaccugagcgacgcccacaagaagaaccuguacgaccacgcccugaugagcaucaucagcaccuuccaccugagcauccccaacuucaaccaguacgaggccaugagcugcgacuucaacggcggcaagaucagcgugcaguacaaccugagccacgccuacgccguggacgccgccaaccacugcggcaccaucgccaacggcgugcugcagaccuucaugagaauggccuggggcggcagcuacaucgcccuggacagcggcaagggcagcugggacugcaucaugaccagcuaccaguaccugaucauccagaacaccaccugggaggaccacugccaguucagcagacccagccccaucggcuaccugggccugcugagccagagaaccagagacaucuacaucagcagaagacugcugggcaccuucaccuggacccugagcgacagcgagggcaacgagacccccggcggcuacugccugaccagauggaugcugaucgaggccgagcugaagugcuucggcaacaccgccguggccaagugcaacgagaagcacgacgaggaguucugcgacaugcugagacuguucgacuucaacaagcaggccaucagaagacugaaggccgaggcccagaugagcauccagcugaucaacaaggccgugaacgcccugaucaacgaccagcugaucaugaagaaccaccugagagacaucaugggcauccccuacugcaacuacagcaaguacugguaccugaaccacaccgugaccggcaagaccagccugcccagaugcuggcuggugagcaacggcagcuaccugaacgagacccacuucagcgacgacaucgagcagcaggccgacaacaugaucaccgagcugcugcagaaggaguacaucgacagacagggcaagaccccccugggccugguggaccuguucguguucagcaccagcuucuaccugaucagcaucuuccugcaccuggugaagauccccacccacagacacgugaucggcaagcccugccccaagccccacagacugaaccacaugggcaucugcagcugcggccuguacaagcaccccggcgugcccgugaaguggaagagaugaggacuaguaauaaggaaacuguaugaaugucugugggcaggaagugaagagauccuucuguaaagguuuuuggaauuaugucugcugaauaauaaacuuuuuugaaauaauaaaucugguagaaaaaugagaucucaaaggcucuuuucagagccaccaaaaaaaaaaaaaaaaaaaaaaaaaaaaaaaaaaaaaaaaaaaaaaaaaaaaaaaaaaaaaaaaaaaaaaaaaaaaaaaaaaaaaaaaaaaaaaaaaaaaa

SEQ ID NO: 14776 - RNA, 1809 nt, Artificial Sequence
  mRNA product Design b-4 (hSL-A100) comprising derived and/or modified sequence from LASV(LASV1000-NIG-2009;Clade II)__AIT17782__GPC (opt4)
aggagagucccgcagucggcguccagcggcucugcuuguucgugugugugucguugcaggccuuauucaagcuuaccaugggccagaucaucaccuucuuccaggaggugccccacgugaucgaggaggugaugaacaucgugcugaucgcccugagccugcuggccauccugaagggcaucuacaacguggccaccugcggccuguucggccuggugagcuuccugcugcugugcggcagaagcugcagcaccaccuacaagggcguguacgagcugcagacccuggagcuggacauggccagccugaacaugaccaugccccugagcugcaccaagaacaacagccaccacuacaucauggugggcaacgagaccggccuggagcugacccugaccaacaccagcaucaucaaccacaaguucugcaaccugagcgacgcccacaagaagaaccuguacgaccacgcccugaugagcaucaucagcaccuuccaccugagcauccccaacuucaaccaguacgaggccaugagcugcgacuucaacggcggcaagaucagcgugcaguacaaccugagccacaccuacgccguggacgccgccaaccacugcggcaccaucgccaacggcgugcugcagaccuucaugagaauggccuggggcggcagcuacaucgcccuggacagcggcaagggcagcugggacugcaucaugaccagcuaccaguaccugaucauccagaacaccaccugggaggaccacugccaguucagcagacccagccccaucggcuaccugggccugcugagccagagaaccagagacaucuacaucagcagaagacugcugggcaccuucaccuggacccugagcgacagcgagggcaacgagacccccggcggcuacugccugaccagauggaugcugaucgaggccgagcugaagugcuucggcaacaccgccguggccaagugcaacgagaagcacgacgaggaguucugcgacaugcugagacuguucgacuucaacaagcaggccaucaagagacugaagaccgaggcccagaugagcauccagcugaucaacaaggccgugaacgcccugaucaacgaccagcugaucaugaagaaccaccugagagacaucaugggcauccccuacugcaacuacagcaaguacugguaccugaaccacaccgugaccggcaagaccagccugcccagaugcuggcuggugagcaacggcagcuaccugaacgagacccacuucagcgacgacaucgagcagcaggccgacaacaugaucaccgagcugcugcagaaggaguacaucgacagacagggcaagaccccccugggccugguggaccuguucguguucagcaccagcuucuaccugaucagcaucuuccugcaccuggugaagauccccacccacagacacguggugggcaagcccugccccaagccccacagacugaaccacaugggcaucugcagcugcggccuguacaagcaccccggcgugcccgugaaguggaagagaugaggacuaguaauaaggaaacuguaugaaugucugugggcaggaagugaagagauccuucuguaaagguuuuuggaauuaugucugcugaauaauaaacuuuuuugaaauaauaaaucugguagaaaaaugagaucucaaaggcucuuuucagagccaccaaaaaaaaaaaaaaaaaaaaaaaaaaaaaaaaaaaaaaaaaaaaaaaaaaaaaaaaaaaaaaaaaaaaaaaaaaaaaaaaaaaaaaaaaaaaaaaaaaaaa

SEQ ID NO: 14777 - RNA, 1809 nt, Artificial Sequence
  mRNA product Design b-4 (hSL-A100) comprising derived and/or modified sequence from LASV(LASV221-NIG-2010;Clade II)__AIT17624__GPC (opt4)
aggagagucccgcagucggcguccagcggcucugcuuguucgugugugugucguugcaggccuuauucaagcuuaccaugggccagaucaucaccuucuuccaggaggugccccacgugaucgaggaggugaugaacaucgugcugaucgcccugagccugcuggccauccugaagggcaucuacaacguggccaccugcggccuguucggccuggugagcuuccugcugcugugcggcagaagcugcagcaccaccuacaagggcguguacgagcugcagacccuggagcuggacauggccagccugaacaugaccaugccccugagcugcaccaagaacaacagccaccacuacaucauggugggcaacgagaccggccuggagcugacccugaccaacaccagcaucaucaaccacaaguucugcaaccugagcgacgcccacaagaagaaccuguacgaccacgcccugaugagcaucaucagcaccuuccaccugagcauccccaacuucaaccaguacgaggccaugagcugcgacuucaacggcggcaagaucagcgugcaguacaaccugagccacaccuacgccaucgacgccgccaaccacugcggcaccaucgccaacggcgugcugcagaccuucaugagaauggccuggggcggcagcuacaucgcccuggacagcggcaagggcagcugggacugcaucaugaccagcuaccaguaccugaucauccagaacaccaccugggaggaccacugccaguucagcagacccagccccaucggcuaccugggccugcugagccagagaaccagagacaucuacaucagcagaagacugcugggcaccuucaccuggacccugagcgacagcgagggcaacgagacccccggcggcuacugccugaccagauggaugcugaucgaggccgagcugaagugcuucggcaacaccgccguggccaagugcaacgagaagcacgacgaggaguucugcgacaugcugagacuguucgacuucaacaagcaggccaucagaagacugaagaccgaggcccagaugagcauccagcugaucaacaaggccgugaacgcccugaucaacgaccagcugaucaugaagaaccaccugagagacaucaugggcauccccuacugcaacuacagcaaguacugguaccugaaccacaccgugaccggcaagaccagccugcccagaugcuggcuggugagcaacggcagcuaccugaacgagacccacuucagcgacgacaucgagcagcaggccgacaacaugaucaccgagaugcugcagaaggaguacauggacagacagggcaagaccccccugggccugguggaccuguucguguucagcaccagcuucuaccugaucagcaucuuccugcaccuggugaagauccccacccacagacacgugaucggcaagcccugccccaagccccacagacugaaccacaugggcaucugcagcugcggccuguacaagcaccccggcgugcccgugaaguggaagagaugaggacuaguaauaaggaaacuguaugaaugucugugggcaggaagugaagagauccuucuguaaagguuuuuggaauuaugucugcugaauaauaaacuuuuuugaaauaauaaaucugguagaaaaaugagaucucaaaggcucuuuucagagccaccaaaaaaaaaaaaaaaaaaaaaaaaaaaaaaaaaaaaaaaaaaaaaaaaaaaaaaaaaaaaaaaaaaaaaaaaaaaaaaaaaaaaaaaaaaaaaaaaaaaaa

SEQ ID NO: 14778 - RNA, 1809 nt, Artificial Sequence
  mRNA product Design b-4 (hSL-A100) comprising derived and/or modified sequence from LASV(LASV237-NIG-2010;Clade II)__AIT17638__GPC (opt4)
aggagagucccgcagucggcguccagcggcucugcuuguucgugugugugucguugcaggccuuauucaagcuuaccaugggccagaucaucaccuucuuccaggaggugccccacgugaucgaggaggugaugaacaucgugcugaucgcccugagccugcuggccauccugaagggcaucuacaacguggccaccugcggccuguucggccuggugagcuuccugcugcugugcggcagaagcugcagcaccaccuacaagggcguguacgagcugcagacccuggagcuggacauggccagccugaacaugaccaugccccugagcugcaccaagaacaacagccaccacuacaucauggugggcaacgagaccggccuggagcugacccugaccaacaccagcaucaucaaccacaaguucugcaaccugagcgacgcccacaagaaggaccuguacgaccacgcccugaugagcaucaucagcaccuuccaccugagcauccccaacuucaaccaguacgaggccaugagcugcgacuucaacggcggcaagaucagcgugcaguacaaccugagccacaccuacgccguggacgccgccaaccacugcggcaccaucgccaacggcgugcugcagaccuucaugagaauggccuggggcggcagcuacaucgcccuggacagcggcaagggcagcugggacugcaucaugaccagcuaccaguaccugaucauccagaacaccaccugggaggaccacugccaguucagcagacccagccccaucggcuaccugggccugcugagccagagaaccagagacaucuacaucagcagaagacugcugggcaccuucaccuggacccugagcgacagcgagggcaacgagacccccggcggcuacugccugaccagauggaugcugaucgaggccgagcugaagugcuucggcaacaccgccguggccaagugcaacgagaagcacgacgaggaguucugcgacaugcugagacuguucgacuucaacaagcaggccaucagaagacugaagaccgaggcccagaugagcauccagcugaucaacaaggccgugaacgcccugaucaacgaccagcugaucaugaagaaccaccugagagacaucaugggcauccccuacugcaacuacagcaaguacugguaccugaaccacaccgugaccggcaagaccagccugcccagaugcuggcuggugagcaacggcagcuaccugaacgagacccacuucagcgacgacaucgagcagcaggccgacaacaugaucaccgagcugcugcagaaggaguacauggacagacagggcaagaccccccugggccugguggaccuguucguguucagcaccagcuucuaccugaucagcaucuuccugcaccugaucaagauccccacccacagacacaucaccggcaagcccugccccaagccccacagacugaaccacaugggcaucugcagcugcggccuguacaagcaccccggcgugcccgugaaguggaagagaugaggacuaguaauaaggaaacuguaugaaugucugugggcaggaagugaagagauccuucuguaaagguuuuuggaauuaugucugcugaauaauaaacuuuuuugaaauaauaaaucugguagaaaaaugagaucucaaaggcucuuuucagagccaccaaaaaaaaaaaaaaaaaaaaaaaaaaaaaaaaaaaaaaaaaaaaaaaaaaaaaaaaaaaaaaaaaaaaaaaaaaaaaaaaaaaaaaaaaaaaaaaaaaaaa

SEQ ID NO: 14779 - RNA, 1809 nt, Artificial Sequence
  mRNA product Design b-4 (hSL-A100) comprising derived and/or modified sequence from LASV(LASV253-NIG-2011;Clade II)__AIT17670__GPC (opt4)
aggagagucccgcagucggcguccagcggcucugcuuguucgugugugugucguugcaggccuuauucaagcuuaccaugggccagaucaucaccuucuuccaggaggugccccacgugaucgaggaggugaugaacaucgugcugaucgcccugagccugcuggccauccugaagggcaucuacaacguggccaccugcggccuguucggccuggugagcuuccugcugcugugcggcagaagcugcagcaccaccuacaagggcguguacgagcugcagacccuggagcuggacauggccagccugaacaugaccaugccccugagcugcaccaagaacaacagccaccacuacaucauggugggcaacgagaccggccuggagcugacccugaccaacaccagcaucaucaaccacaaguucugcaaccugagcgacgcccacaagaagaaccuguacgaccacgcccugaugagcaucaucagcaccuuccaccugagcauccccaacuucaaccaguacgaggccaugagcugcgacuucaacggcggcaagaucagcgugcaguacaaccugagccacaccuacgccguggacgccgccaaccacugcggcaccaucgccaacggcgugcugcagaccuucaugagaauggccuggggcggcagcuacaucgcccuggacagcggcaagggcagcugggacugcaucaugaccagcuaccaguaccugaucauccagaacaccaccugggaggaccacugccaguucagcagacccagccccaucggcuaccugggccugcugagccagagaaccagagacaucuacaucagcagaagacugcugggcaccuucaccuggacccugagcgacagcgagggcaacgagacccccggcggcuacugccugaccagauggaugcugaucgaggccgagcugaagugcuucggcaacaccgccguggccaagugcaacgagaagcacgacgaggaguucugcgacaugcugagacuguucgacuucaacaagcaggccaucagaagacugaaggccgaggcccagaugagcauccagcugaucaacaaggccgugaacgcccugaucaacgaccagcugaucaugaagaaccaccugagagacaucaugggcauccccuacugcaacuacagcaaguacugguaccugaaccacaccgugaccggcagaaccagccugcccagaugcuggcuggugagcaacggcagcuaccugaacgagacccacuucagcgacgacaucgagcagcaggccgacaacaugaucaccgagcugcugcagaaggaguacaucgacagacagggcaagaccccccugggccugguggaccuguucguguucagcaccagcuucuaccugaucagcaucuuccugcaccuggugaagauccccacccacagacacaucaucggcaagcccugccccaagccccacagacugaaccacaugggcaucugcagcugcggccuguacaagcaccccggcgugcccgugaaguggaagagaugaggacuaguaauaaggaaacuguaugaaugucugugggcaggaagugaagagauccuucuguaaagguuuuuggaauuaugucugcugaauaauaaacuuuuuugaaauaauaaaucugguagaaaaaugagaucucaaaggcucuuuucagagccaccaaaaaaaaaaaaaaaaaaaaaaaaaaaaaaaaaaaaaaaaaaaaaaaaaaaaaaaaaaaaaaaaaaaaaaaaaaaaaaaaaaaaaaaaaaaaaaaaaaaaa

SEQ ID NO: 14780 - RNA, 1809 nt, Artificial Sequence
  mRNA product Design b-4 (hSL-A100) comprising derived and/or modified sequence from LASV(LASV254-NIG-2011;Clade II)__AIT17674__GPC (opt4)
aggagagucccgcagucggcguccagcggcucugcuuguucgugugugugucguugcaggccuuauucaagcuuaccaugggccagaucaucaccuucuuccaggaggugccccacgugaucgaggaggugaugaacaucgugcugaucgcccugagccugcuggccauccugaagggcaucuacaacguggccaccugcggccuguucggccuggugagcuuccugcugcugugcggcagaagcugcagcaccaccuacaagggcguguacgagcugcagacccuggagcuggacaugaccaaccugaacaugaccaugccccugagcugcaccaagaacaacagccaccacuacaucauggugggcaacgagaccggccuggagcugacccugaccaacaccagcaucaucaaccacaaguucugcaaccugagcgacgcccacaagaagaaccuguacaaccacgcccugaugagcaucaucagcaccuuccaccugagcauccccaacuucaaccaguacgaggccaugagcugcgacuucaacggcggcaagaucagcgugcaguacaaccugagccacagcuacgccguggacgccgccaaccacugcggcaccaucgccaacggcgugcugcagaccuucaugagaauggccuggggcggcagcuacaucgcccuggacagcggcaagggcaacugggacugcaucaugaccagcuaccaguaccugaucauccagaacaccaccugggaggaccacugccaguucagcagacccagccccaucggcuaccugggccugcugagccagagaaccagagacaucuacaucagcagaagacugcugggcaccuucaccuggacccugagcgacagcgagggcaacgagacccccggcggcuacugccugaccagauggaugcugaucgaggccgagcugaagugcuucggcaacaccgccguggccaagugcaacgagaagcacgacgaggaguucugcgacaugcugagacuguucgacuucaacaagcaggccaucagaagacugaagaccgaggcccaggccaacauccagcugaucaacaaggccgugaacgcccugaucaacgaccagcugaucaugaagaaccaccugagagacaucaugggcauccccuacugcaacuacagcaaguacugguaccugaaccacaccgugaccggcaagaccagccugcccagaugcuggcuggugagcaacggcagcuaccugaacgagacccacuucagcgacgacaucgagcagcaggccgacaacaugaucaccgagcugcugcagaaggaguacauggacagacagggcaagaccccccugggccugguggaccuguucguguucagcaccagcuucuaccugaucagcaucuuccugcaccuggugaagauccccacccacagacacgugaucggcaagcccugccccaagccccacagacugaaccacaugggcaucugcagcugcggccuguacaagcaccccggcgugcccgugaaguggaagagaugaggacuaguaauaaggaaacuguaugaaugucugugggcaggaagugaagagauccuucuguaaagguuuuuggaauuaugucugcugaauaauaaacuuuuuugaaauaauaaaucugguagaaaaaugagaucucaaaggcucuuuucagagccaccaaaaaaaaaaaaaaaaaaaaaaaaaaaaaaaaaaaaaaaaaaaaaaaaaaaaaaaaaaaaaaaaaaaaaaaaaaaaaaaaaaaaaaaaaaaaaaaaaaaaa

SEQ ID NO: 14781 - RNA, 1809 nt, Artificial Sequence
  mRNA product Design b-4 (hSL-A100) comprising derived and/or modified sequence from LASV(Nig08-A19;Clade III)__ADU56618__GPC (opt4)
aggagagucccgcagucggcguccagcggcucugcuuguucgugugugugucguugcaggccuuauucaagcuuaccaugggccagaucgugaccuucuuccaggaggugccccacgugaucgaggaggugaugaacaucgugcugaucgcccugagcauccuggccauccugaagggccuguacaacaucgccaccugcggccugaucggccuggugaccuuccugcugcugagcggcagaagcugcagcaugaccuacaagggcguguacgagcugcagacccuggagcugaacaugaacacccugaacaugaccaugccccugagcugcaccaagaacaacagccaccacuacaucauggugggcaacgagaccggccuggagcugacccugaccaacaccagccugcugcaccacaaguucugcaaccugagcgacgcccacaagaagaaccuguacgaccacacccugaugagcaucaucagcaccuuccaccugagcauccccaacuucaaccaguacgaggccaugagcugcgacuucaacggcggcaagaucaccgugcaguacaaccugagccacagcuacgccaucgacgccgccaaccacugcggcaccguggccaacggcgugcugcagaccuucaugagaauggccuggggcggcagcuacaucgcccuggacagcggcagaggcaagugggacugcaucaugaccagcuaccaguaccugaucauccagaacaccaccugggaggaccacugccaguucagcagacccagccccaucggcuaccugggccugcugagccagagaaccagagacaucuacaucagcagaagacugcugggcaccuucaccuggacccugagcgacagcgagggcaacgagacccccggcggcuacugccugaccagauggaugcugaucgaggccgagcugaagugcuucggcaacaccgccguggccaagugcaacgagaagcacgacgaggaguucugcgacaugcugagacuguucgacuucaacaagcaggccaucagaagacugaaggccgaggcccagaugagcauccagcugaucaacaaggccgugaacgcccugaucaacgaccagcugaucaugaagaaccaccugagagacaucaugggcauccccuacugcaacuacagcaaguacugguaccugaaccacaccagcaccggcagaaccagccugcccagaugcuggcuggugagcaacggcagcuaccugaacgagacccacuucagcgacgacaucgagcagcaggccgacaacaugaucaccgagaugcugcagaaggaguaccuggacagacagggcaagaccccccugggccugguggaccuguucguguucagcaccagcuucuaccugaucagcaucuuccugcaccuggugaagauccccacccacagacacaucgugggcaagcccugccccaagccccacagacugaaccacaugggcaucugcagcugcggccuguacaagcagcccggcgugcccgugagauggaagagaugaggacuaguaauaaggaaacuguaugaaugucugugggcaggaagugaagagauccuucuguaaagguuuuuggaauuaugucugcugaauaauaaacuuuuuugaaauaauaaaucugguagaaaaaugagaucucaaaggcucuuuucagagccaccaaaaaaaaaaaaaaaaaaaaaaaaaaaaaaaaaaaaaaaaaaaaaaaaaaaaaaaaaaaaaaaaaaaaaaaaaaaaaaaaaaaaaaaaaaaaaaaaaaaaa

SEQ ID NO: 14782 - RNA, 1812 nt, Artificial Sequence
  mRNA product Design b-4 (hSL-A100) comprising derived and/or modified sequence from LASV(G1180-SLE-2010;Clade IV)__AIT17168__GPC (opt4)
aggagagucccgcagucggcguccagcggcucugcuuguucgugugugugucguugcaggccuuauucaagcuuaccaugggccagaucgugaccuucuuccaggaggugccccacgugaucgaggaggugaugaacaucgugcugaucgcccugagcauccuggccgugcugaagggccuguacaacuucgccaccugcggccuggugggccugcugaccuuccugcugcugugcggcagaagcugcaccgccagcagauacaagggcguguacgagcugcagacccuggagcugaacauggagacccugaacaugaccaugccccugagcugcaccaagaacaacagccaccacuacaucauggugggcaacgagaccggccuggagcugacccugaccaacaccagcaucaucaaccacaaguucugcaaccugagcgacgcccacaagaagaaccuguacgaccacgcccugaugagcaucaucagcaccuuccaccugagcauccccaacuucaaccaguacgaggccaugagcugcgacuucaacggcggcaagaucagcgugcaguacaaccugagccacagcuacgccggcgacgccgccaaccacugcggcaccguggccaacggcgugcugcagaccuucaugagaauggccuggggcggcagcuacaucgcccuggacagcggccacggcagcugggacugcaucaugaccagcuaccaguaccugaucauccagaacaccaccugggaggaccacugccaguucagcagacccagccccaucggcuaccugggccugcugagccagagaaccagagacaucuacaucagcagaagacugcugggcaccuucaccuggacccugagcgacagcgagggcaaggacacccccggcggcuacugccugaccagauggaugcugaucgaggccgagcugaagugcuucggcaacaccgccguggccaagugcaacgagaagcacgacgaggaguucugcgacaugcugagacuguucgacuucaacaagcaggccauccagagacugaaggccgaggcccagaugagcauccagcugaucaacaaggccgugaacgcccugaucaacgaccagcugaucaugaagaaccaccugagagacaucaugggcauccccuacugcaacuacagcaaguacugguaccugaaccacaccaccaccggcaagaccagccugcccaagugcuggcuggugagcaacggcagcuaccugaacgagacccacuucagcgacgacaucgagcagcaggccgacaacaugaucaccgagaugcugcagaaggaguacauggagagacagggcaagaccccccugggccugguggaccuguucguguucagcaccagcuucuaccugaucagcaucuuccugcaccuggugaagauccccacccacagacacaucgugggcaagagcugccccaagccccacagacugaaccacaugggcaucugcagcugcggccuguacaagcagcccggcgugcccgugaaguggaagagaugaggacuaguaauaaggaaacuguaugaaugucugugggcaggaagugaagagauccuucuguaaagguuuuuggaauuaugucugcugaauaauaaacuuuuuugaaauaauaaaucugguagaaaaaugagaucucaaaggcucuuuucagagccaccaaaaaaaaaaaaaaaaaaaaaaaaaaaaaaaaaaaaaaaaaaaaaaaaaaaaaaaaaaaaaaaaaaaaaaaaaaaaaaaaaaaaaaaaaaaaaaaaaaaaa

SEQ ID NO: 14783 - RNA, 1812 nt, Artificial Sequence
  mRNA product Design b-4 (hSL-A100) comprising derived and/or modified sequence from LASV(G1442-SLE-2011;Clade IV)__AIT17180__GPC (opt4)
aggagagucccgcagucggcguccagcggcucugcuuguucgugugugugucguugcaggccuuauucaagcuuaccaugggccagaucgugaccuucuuccaggaggugccccacgugaucgaggaggugaugaacaucgugcugaucgcccugagcauccuggccgugcugaagggccuguacaacguggccaccugcggccugaucggccuggugaccuuccugcugcugugcggcagaagcugcaccaccacccuguacaagggcguguacgagcugcagacccuggagcugaacauggagacccugaacaugaccaugccccugagcugcaccaagaacaacagccaccacuacaucagagugggcaacgagaccggccuggagcugacccugaccaacaccagcaucaucaaccacaaguucugcaaccugagcgacgcccacaagaagaaccuguacgaccacgcccugaugagcaucaucagcaccuuccaccugagcauccccaacuucaaccaguacgaggccaugagcugcgacuucaacggcggcaagaucagcgugcaguacaaccugagccacagcuacgccggcgacgccgccaaccacugcggcaccguggccaacggcgugcugcagaccuucaugagaauggccuggggcggcagcuacaucgcccuggacagcggcagaggcaacugggacugcaucaugaccagcuaccaguaccugaucauccagaacaccaccugggacgaccacugccaguucagcagacccagccccaucggcuaccugggccugcugagccagagaaccagagacguguacaucagcagaagacugcugggcaccuucaccuggacccugagcgacagcgagggcaaggacacccccggcggcuacugccugaccagauggaugcugaucgaggccgagcugaagugcuucggcaacaccgccguggccaagugcaacgagaagcacgacgaggaguucugcgacaugcugagacuguucgacuucaacaagcaggccauccagagacugaaggccgaggcccagaugagcauccagcugaucaacaaggccgugaacgcccugaucaacgaccagcugaucaugaagaaccaccugagagacaucaugggcauccccuacugcaacuacagcaaguacugguaccugaacaacaccgccaccggcaagaccagccugcccaagugcuggcugaucagcaacggcagcuaccugaacgagacccacuucagcgacgacaucgagcaggaggccgacaacaugaucaccgagaugcugcagaaggaguacauggagagacagggcaagaccccccugggccugguggaccuguucguguucagcaccagcuucuaccugaucagcaucuuccugcaccuggugaagauccccacccacagacacaucgugggcaagagcugccccaagccccacagacugaaccacaugggcaucugcagcugcggccuguacaagcagcccggcgugcccgugagauggaagagaugaggacuaguaauaaggaaacuguaugaaugucugugggcaggaagugaagagauccuucuguaaagguuuuuggaauuaugucugcugaauaauaaacuuuuuugaaauaauaaaucugguagaaaaaugagaucucaaaggcucuuuucagagccaccaaaaaaaaaaaaaaaaaaaaaaaaaaaaaaaaaaaaaaaaaaaaaaaaaaaaaaaaaaaaaaaaaaaaaaaaaaaaaaaaaaaaaaaaaaaaaaaaaaaaa

SEQ ID NO: 14784 - RNA, 1812 nt, Artificial Sequence
  mRNA product Design b-4 (hSL-A100) comprising derived and/or modified sequence from LASV(G3010-SLE-2013;Clade IV)__AIT17344__GPC (opt4)
aggagagucccgcagucggcguccagcggcucugcuuguucgugugugugucguugcaggccuuauucaagcuuaccaugggccagaucgugaccuucuuccaggaggugccccacgugaucgaggaggugaugaacaucgugcugaucgcccugagcauccuggccgugcugaagggccuguacaacuucgccaccugcggccuggugggccuggugaccuuccugcugcugugcggcagaagcugcaccaccagccuguacaagggcguguacgagcugcagacccuggagcugaacauggagacccugaacaugaccaugccccugagcugcaccaagaacaacagccaccacuacaucauggugggcaacgagaccggccuggagcugacccugaccaacaccagcaucaucaaccacaaguucugcaaccugagcgacgcccacaagaagaaccuguacaaccacgcccugaugagcaucaucagcaccuuccaccugagcauccccaacuucaaccaguacgaggccaugagcugcgacuucaacggcggcaagaucagcgugcaguacaaccugagccacagcuacgccggcgacgccgccagccacugcggcaccguggccaacggcgugcugcagaccuucaugagaauggccuggggcggcagcuacaucgcccuggacagcggcuacggcaagugggacugcaucaugaccagcuaccaguaccugaucauccagaacaccaccugggaggaccacugccaguucagcagacccagccccaucggcuaccugggccugcugagccagagaaccagagacaucuacaucagcagaagacugcugggcaccuucaccuggacccugagcgacagcgagggcaaggacacccccggcggcuacugccugaccagauggaugcugaucgaggccgagcugaagugcuucggcaacaccgccguggccaagugcaacgagaagcacgacgaggaguucugcgacaugcugagacuguucgacuucaacaagcaggccauccagagacugaagaccgaggcccagaugagcauccagcugaucaacaaggccgugaacgcccugaucaacgaccagcugaucaugaagaaccaccugagagacaucaugggcauccccuacugcaacuacagcaaguacugguaccugaaccacaccaccaccggcaagaccagccugcccaagugcuggcuggugagcaacggcagcuaccugaacgagacccacuucagcgacgacaucgagcagcaggccgacaacaugaucaccgagaugcugcagaaggaguacauggagagacagggcaagaccccccugggccugguggaccuguucguguucagcaccagcuucuaccugaucagcaucuuccugcaccuggugaagauccccacccacagacacaucgugggcaagagcugccccaagccccacagacugaaccacaugggcaucugcagcugcggccuguacaagcagcccggcgugcccgugagauggaagagaugaggacuaguaauaaggaaacuguaugaaugucugugggcaggaagugaagagauccuucuguaaagguuuuuggaauuaugucugcugaauaauaaacuuuuuugaaauaauaaaucugguagaaaaaugagaucucaaaggcucuuuucagagccaccaaaaaaaaaaaaaaaaaaaaaaaaaaaaaaaaaaaaaaaaaaaaaaaaaaaaaaaaaaaaaaaaaaaaaaaaaaaaaaaaaaaaaaaaaaaaaaaaaaaaa

SEQ ID NO: 14785 - RNA, 1812 nt, Artificial Sequence
  mRNA product Design b-4 (hSL-A100) comprising derived and/or modified sequence from LASV(G502-SLE-2009;Clade IV)__AIT17126__GPC (opt4)
aggagagucccgcagucggcguccagcggcucugcuuguucgugugugugucguugcaggccuuauucaagcuuaccaugggccagaucgugaccuucuuccaggaggugccccacgugaucgaggaggugaugaacaucgugcugaucgcccugagcauccuggccgugcugaagggccuguacaacuucgccaccugcggccuggugggccugcugaccuuccugcugcugugcggcagaagcugcaccaccggccuguacaagggcguguacgagcugcagacccuggagcugaacauggagacccugaacaugaccaugccccugagcugcaccaagaacaacagccaccacuacaucauggugggcaacgagaccggccuggagcugacccugaccaacaccagcaucaucaaccacaaguucugcaaccugagcgacgcccacaagaagaaccuguacgaccacgcccugaugagcaucaucagcaccuuccaccugagcauccccaacuucaaccaguacgaggccaugagcugcgacuucaacggcggcaagaucagcgugcaguacaaccugagccacagcuacgccggcgacgccgccgaccacugcggcaccguggccaacggcgugcugcagaccuucaugagaauggccuggggcggcagcuacaucgcccuggacagcggcagaggcagaugggacugcaucaugaccagcuaccaguaccugaucauccagaacaccaccugggaggaccacugccaguucagcagacccagccccaucggcuaccugggccugcugagccagagaaccagagacaucuacaucagcagaagacugcugggcaccuucaccuggacccugagcgacagcgagggcaaggacacccccggcggcuacugccugaccagauggaugcugaucgaggccgagcugaagugcuucggcaacaccgccguggccaagugcaacgagaagcacgacgaggaguucugcgacaugcugagacuguucgacuucaacaagcaggccauccagagacugaaggccgaggcccagaugagcauccagcugaucaacaaggccgugaacgcccugaucaacgaccagcuggugaugaagaaccaccugagagacaucaugggcauccccuacugcaacuacagcagauacugguaccugaaccacaccaccaccggcagaaccagccugcccaagugcuggcuggugagcaacggcagcuaccugaacgagacccacuucagcgacgacaucgagcagcaggccgacaacaugaucaccgagaugcugcagaaggaguacauggagagacagggcaagaccccccugggccugguggaccuguucguguucagcaccagcuucuaccugaucagcaucuuccugcaccuggugaagauccccacccacagacacaucgugggcaagagcugccccaagccccacagacugaaccacaugggcaucugcagcugcggccuguacaagcagcccggcgugcccgugaaguggaagagaugaggacuaguaauaaggaaacuguaugaaugucugugggcaggaagugaagagauccuucuguaaagguuuuuggaauuaugucugcugaauaauaaacuuuuuugaaauaauaaaucugguagaaaaaugagaucucaaaggcucuuuucagagccaccaaaaaaaaaaaaaaaaaaaaaaaaaaaaaaaaaaaaaaaaaaaaaaaaaaaaaaaaaaaaaaaaaaaaaaaaaaaaaaaaaaaaaaaaaaaaaaaaaaaaa

SEQ ID NO: 14786 - RNA, 1812 nt, Artificial Sequence
  mRNA product Design b-4 (hSL-A100) comprising derived and/or modified sequence from LASV(G733-SLE-2010;Clade IV)__AIT17154__GPC (opt4)
aggagagucccgcagucggcguccagcggcucugcuuguucgugugugugucguugcaggccuuauucaagcuuaccaugggccagaucgugaccuucuuccaggaggugccccacgugaucgaggaggugaugaacaucgugcugaucgcccugagcauccuggccgugcugaagggccuguacaacuucgccaccugcggcaucgugggccuggugagcuuccugcugcugugcggcagaagcugcaccaccagccuguacaagggcguguacgagcugcagacccuggagcugaacauggagacccugaacaugaccaugccccugagcugcaccaagaacaacagccaccacuacaucauggugggcaacgagaccggccuggagcugacccugaccaacaccagcaucaucaaccacaaguucugcaaccugagcgacgcccacaagaagaaccuguacgaccacgcccugaugagcaucaucagcaccuuccaccugagcauccccaacuucaaccaguacgaggccaugagcugcgacuucaacggcggcaagaucagcgugcaguacaaccugagccacagcuacgccggcgacgccgccaaccacugcggcaccaucgccaacggcgugcugcagaccuucaugagaauggccuggggcggcagcuacaucgcccuggacagcggcagagacagaugggacugcaucaugaccagcuaccaguaccugaucauccagaacaccaccugggaggaccacugccaguucagcagacccagccccaucggcuaccugggccugcugagccagagaaccagagacaucuacaucagcagaagacugcugggcaccuucaccuggacccugagcgacagcgagggcaaggacacccccggcggcuacugccugaccagauggaugcugaucgaggccgagcugaagugcuucggcaacaccgccguggccaagugcaacgagaagcacgacgaggaguucugcgacaugcugagacuguucgacuucaacaagcaggccauccagagacugaaggccgaggcccagaugagcauccagcugaucaacaaggccgugaacgcccugaucaacgaccagcugaucaugaagaaccaccugagagacaucaugggcauccccuacugcaacuacagcaaguacugguaccugaaccacaccaccaccggcaagaccagccugcccaagugcuggcuggugagcaacggcagcuaccugaacgagacccacuucagcgacgacaucgagcagcaggccgacaacaugaucaccgagaugcugcagaaggaguacauggagagacagggcaagaccccccugggccugguggaccuguucguguucagcaccagcuucuaccugaucagcaucuuccugcaccuggugaagauccccacccacagacacguggugggcaagagcugccccaagccccacagacugaaccacaugggcaucugcagcugcggccuguacggccagcccggcgugcccgugaaguggaagagaugaggacuaguaauaaggaaacuguaugaaugucugugggcaggaagugaagagauccuucuguaaagguuuuuggaauuaugucugcugaauaauaaacuuuuuugaaauaauaaaucugguagaaaaaugagaucucaaaggcucuuuucagagccaccaaaaaaaaaaaaaaaaaaaaaaaaaaaaaaaaaaaaaaaaaaaaaaaaaaaaaaaaaaaaaaaaaaaaaaaaaaaaaaaaaaaaaaaaaaaaaaaaaaaaa

SEQ ID NO: 14787 - RNA, 1812 nt, Artificial Sequence
  mRNA product Design b-4 (hSL-A100) comprising derived and/or modified sequence from MOPV/LASV reassortant(IGS-1;Clade IV)__AFY05576__GPC (opt4)
aggagagucccgcagucggcguccagcggcucugcuuguucgugugugugucguugcaggccuuauucaagcuuaccaugggccagaucgugaccuucuuccaggaggugccccacgugaucgaggaggugaugaacaucgugcugaucgcccugagcgugcuggccgugcugaagggccuguacaacuucgccaccugcggccuggugggccuggugaccuuccugcugcugugcggcagaagcugcaccaccagccuguacaagggcguguacgagcugcagacccuggagcugaacauggagacccugaacaugaccaugccccugagcugcaccaagaacaacagccaccacuacaucauggugggcaacgagaccggccuggagcugacccugaccaacaccagcaucaucaaccacaaguucugcaaccugagcgacgcccacaagaagaaccuguacgaccacgcccugaugagcaucaucagcaccuuccaccugagcauccccaacuucaaccaguacgaggccaugagcugcgacuucaacggcggcaagaucagcgugcaguacaaccugagccacagcuacgccggcgacgccgccaaccacugcggcaccguggccaacggcgugcugcagaccuucaugagaauggccuggggcggcagcuacaucgcccuggacagcggcagaggcaacugggacugcaucaugaccagcuaccaguaccugaucauccagaacaccaccugggaggaccacugccaguucagcagacccagccccaucggcuaccugggccugcugagccagagaaccagagacaucuacaucagcagaagacugcugggcaccuucaccuggacccugagcgacagcgagggcgaggacacccccggcggcuacugccugaccagauggaugcugaucgaggccgagcugaagugcuucggcaacaccgccguggccaagugcaacgagaagcacgacgaggaguucugcgacaugcugagacuguucgacuucaacaagcaggccauccagagacugaaggccgaggcccagaugagcauccagcugaucaacaaggccgugaacgcccugaucaacgaccagcugaucaugaagaaccaccugagagacaucaugggcauccccuacugcaacuacagcaaguacugguaccugaaccacaccaccaccggcagaaccagccugcccaagugcuggcuggugagcaacggcagcuaccugaacgagacccacuucagcgacgacaucgagcagcaggccgacaacaugaucaccgagaugcugcagaaggaguacauggagagacagggcaagaccccccugggccugguggaccuguucguguucagcaccagcuucuaccugaucagcaucuuccugcaccuggugaagauccccacccacagacacaucgugggcaagagcugccccaagccccacagacugaaccacaugggcaucugcagcugcggccuguacaagcagcccggcgugcccgugaaguggaagagaugaggacuaguaauaaggaaacuguaugaaugucugugggcaggaagugaagagauccuucuguaaagguuuuuggaauuaugucugcugaauaauaaacuuuuuugaaauaauaaaucugguagaaaaaugagaucucaaaggcucuuuucagagccaccaaaaaaaaaaaaaaaaaaaaaaaaaaaaaaaaaaaaaaaaaaaaaaaaaaaaaaaaaaaaaaaaaaaaaaaaaaaaaaaaaaaaaaaaaaaaaaaaaaaaa

SEQ ID NO: 14788 - RNA, 1812 nt, Artificial Sequence
  mRNA product Design b-4 (hSL-A100) comprising derived and/or modified sequence from LASV(LM765-SLE-2012;Clade IV)__AIT17814__GPC (opt4)
aggagagucccgcagucggcguccagcggcucugcuuguucgugugugugucguugcaggccuuauucaagcuuaccaugggccagaucgugaccuucuuccaggaggugccccacgugaucgaggaggugaugaacaucgugcugaucgcccugagcauccuggccgugcugaagggccuguacaacuucgccaccugcggccuggugggccuggugaccuuccugcugcugugcggcagaagcugcaccaccagccuguacaagggcguguacgagcugcagacccuggagcugaacauggagacccugaacaugaccaugccccugagcugcaccaagaacaacagccaccacuacaucauggugggcaacgagaccggccuggagcugacccugaccaacaccagcaucaucgaccacaaguucugcaaccugagcgacgcccacagaaagaaccuguacgaccacgcccugaugagcaucaucagcaccuuccaccugagcauccccaacuucaaccaguacgaggccaugagcugcgacuucaacggcggcaagaucagcgugcaguacaaccugagccacagcuacgccaaggacgccgccgaccacugcggcaccguggccaacggcgugcugcagaccuucaugagaauggccuggggcggcagcuacaucgcccuggacagcggcagaggcagaugggacugcaucaugaccagcuaccaguaccugaucauccagaacaccaccugggaggaccacugccaguucagcagacccagccccaucggcuaccugggccugcugagccagagaaccagagacaucuacaucagcagaagacugcugggcaccuucaccuggacccugagcgacagcgagggcaaggacacccccggcggcuacugccugaccagauggaugcugaucgaggccgagcugaagugcuucggcaacaccgccguggccaagugcaacgagaagcacgacgaggaguucugcgacaugcugagacuguucgacuucaacaagcaggccauccagagacugaaggccgaggcccagaugagcauccagcugaucaacaaggccgugaacgcccugaucaacgaccagcugaucaugaagaaccaccugagagacaucaugggcauccccuacugcaacuacagcaaguacugguaccugaaccacaccaccaccggcaagaccagccugcccaagugcuggcuggugagcaacggcagcuaccugaacgagacccacuucagcgacgacaucgagcagcaggccgacaacaugaucaccgagaugcugcagaaggaguacauggagagacagggcaagaccccccugggccugguggaccuguucguguucagcaccagcuucuaccugaucagcaucuuccugcaccuggugaagauccccacccacagacacaucgugggcaagcccugccccaagccccacagacugaaccacaugggcaucugcagcugcggccuguacaagcagcccggcgugcccgugaaguggaagagaugaggacuaguaauaaggaaacuguaugaaugucugugggcaggaagugaagagauccuucuguaaagguuuuuggaauuaugucugcugaauaauaaacuuuuuugaaauaauaaaucugguagaaaaaugagaucucaaaggcucuuuucagagccaccaaaaaaaaaaaaaaaaaaaaaaaaaaaaaaaaaaaaaaaaaaaaaaaaaaaaaaaaaaaaaaaaaaaaaaaaaaaaaaaaaaaaaaaaaaaaaaaaaaaaa

SEQ ID NO: 14789 - RNA, 1812 nt, Artificial Sequence
  mRNA product Design b-4 (hSL-A100) comprising derived and/or modified sequence from LASV(LM776-SLE-2012;Clade IV)__AIT17824__GPC (opt4)
aggagagucccgcagucggcguccagcggcucugcuuguucgugugugugucguugcaggccuuauucaagcuuaccaugggccagaucgugaccuucuuccaggaggugccccacgugaucgaggaggugaugaacaucgugcugaucgcccugagcauccuggccgugcugaagggccuguacaacuucgccaccugcggccuggugggccuggugaccuuccugcugcugugcggcagaagcugcaccaccagcguguacaagggcguguacgagcugcagacccuggagcugaacauggagacccugaacaugaccaugccccugagcugcaccaagaacaacagccaccacuacaucauggugggcaacgagaccggccuggagcugacccugaccaacaccagcaucaucaaccacaaguucugcaaccugagcgacgcccacaagaagaaccuguacgaccacgcccugaugagcaucaucagcaccuuccaccugagcauccccaacuucaaccaguacgaggccaugagcugcgacuucaacggcggcaagaucagcgugcaguacaaccugagccacagcuacgccggcgacgccgccaaccacugcggcaccguggccaacggcgugcugcagaccuucaugagaauggccuggggcggcagcuacaucgcccuggacagcggccacggcaagugggacugcaucaugaccagcuaccaguaccugaucauccagaacaccaccugggaggaccacugccaguucagcagacccagccccaucggcuaccugggccugcugagccagagaaccagagacaucuacaucagcagaagacugcugggcaccuucaccuggacccugagcgacagcgagggcaaggacacccccggcggcuacugccugaccagauggaugcugaucgaggccgagcugaagugcuucggcaacaccgccguggccaagugcaacgagaagcacgacgaggaguucugcgacaugcugagacuguucgacuucaacaagcaggccauccagagacugaaggccgaggcccagaugagcauccagcugaucaacaaggccgugaacgcccugaucaacgaccagcugaucaugaagaaccaccugagagacaucaugggcauccccuacugcaacuacagcaaguacugguaccugaaccacaccaccaccggcaagaccagccugcccaagugcuggcuggugagcaacggcagcuaccugaacgagacccacuucagcgacgacaucgagcagcaggccgacaacaugaucaccgagaugcugcagaaggaguacauggagagacagggcaagaccccccugggccugguggaccuguucguguucagcaccagcuucuaccugaucagcaucuuccugcaccuggugaagauccccacccacagacacaucgugggcaagagcugccccaagccccacagacugaaccacaugggcaucugcagcugcggccuguacaagcagcccggcgugcccgugagauggaagagaugaggacuaguaauaaggaaacuguaugaaugucugugggcaggaagugaagagauccuucuguaaagguuuuuggaauuaugucugcugaauaauaaacuuuuuugaaauaauaaaucugguagaaaaaugagaucucaaaggcucuuuucagagccaccaaaaaaaaaaaaaaaaaaaaaaaaaaaaaaaaaaaaaaaaaaaaaaaaaaaaaaaaaaaaaaaaaaaaaaaaaaaaaaaaaaaaaaaaaaaaaaaaaaaaa

SEQ ID NO: 14790 - RNA, 1812 nt, Artificial Sequence
  mRNA product Design b-4 (hSL-A100) comprising derived and/or modified sequence from LASV(Mad39;Clade IV)__ANH09722__GPC (opt4)
aggagagucccgcagucggcguccagcggcucugcuuguucgugugugugucguugcaggccuuauucaagcuuaccaugggccagaucgugaccuucuuccaggaggugccccacgugaucgaggaggugaugaacaucgugcugaucgcccugagcauccuggccgugcugaagggccuguacaacguggccaccugcggccugaucggccuggugaccuuccugcugcugugcggcagaagcugcaccaccacccuguacaagggcguguacgagcugcaggcccuggagcugaacauggagacccugaacaugaccaugccccugagcugcaccaagaacaacagccaccacuacaucagagugggcaacgagaccggccuggagcugacccugaccaacaccagccugaucaaccacaaguucugcaaccugagcgacgcccacaagaagaaccuguacgaccacgcccugaugagcaucaucagcaccuuccaccugagcauccccaacuucaaccaguacgaggccaugagcugcgacuucaacgacggcaagaucagcgugcaguacaaccugagccacaccuacgccggcgacaccgccaaccacugcggcaccguggccaacggcgugcugcagaccuucaugagaauggccuggggcggcagcuacaucgcccuggacagcggcagaggcggcugggacugcaucaugaccagcuaccaguaccugaucauccagaacaccaccugggaggaccacugccaguucagcagacccagccccaucggcuaccugggccugcugagccagagaaccagagacaucuacaucagcagaagacugcugggcaccuucaccuggacccugagcgacagcgagggcaaggacacccccggcggcuacugccugaccagauggaugcugaucgaggccgagcugaagugcuucggcaacaccgccguggccaagugcaacgagaagcacgacgaggaguucugcgacaugcugagacuguucgacuucaacaagcaggccauccagagacugaaggccgaggcccagaugagcauccagcugaucaacaaggccgugaacgcccugaucaacgaccagcugaucaugaagaaccaccugagagacaucaugggcauccccuacugcaacuacagcaaguacugguaccugaaccacaccgugaccggcaagaccagccugcccaagugcuggcuggugagcaacggcagcuaccugaacgagacccacuucagcgacgacaucgagcagcaggccgacaacaugaucaccgagaugcugcagaaggaguacauggagagacagggcaagaccccccugggccugguggaccuguucguguucagcaccagcuucuaccugaucagcaucuuccugcaccuggugaagauccccacccacagacacguggugggcaagcccugccccaagccccacagacugaaccacaugggcaucugcagcugcggcuucuacaagcagcccggcgugcccgugagauggaagagaugaggacuaguaauaaggaaacuguaugaaugucugugggcaggaagugaagagauccuucuguaaagguuuuuggaauuaugucugcugaauaauaaacuuuuuugaaauaauaaaucugguagaaaaaugagaucucaaaggcucuuuucagagccaccaaaaaaaaaaaaaaaaaaaaaaaaaaaaaaaaaaaaaaaaaaaaaaaaaaaaaaaaaaaaaaaaaaaaaaaaaaaaaaaaaaaaaaaaaaaaaaaaaaaaa

SEQ ID NO: 14791 - RNA, 1812 nt, Artificial Sequence
  mRNA product Design b-4 (hSL-A100) comprising derived and/or modified sequence from LASV(Z0947-SLE-2011;Clade IV)__AIT17840__GPC (opt4)
aggagagucccgcagucggcguccagcggcucugcuuguucgugugugugucguugcaggccuuauucaagcuuaccaugggccagaucgugaccuucuuccaggaggugccccacgugaucgaggaggugaugaacaucgugcugaucgcccugagcauccuggccgugcugaagggccuguacaacuucgccaccugcggccuggugggccuggugaccuuccugcugcugugcggcagaagcugcaccaucagccuguacaagggcguguacgagcugcagacccuggagcugaacauggagacccugaacaugaccaugccccugagcugcaccaagaacaacagccaccacuacaucauggugggcaacgagaccggccuggagcugacccugaccaacaccagcaucaucaaccacaaguucugcaaccugagcgacgcccacaagaagaaccuguacgaccacgcccugaugagcaucaucagcaccuuccaccugagcauccccaacuucaaccaguacgaggccaugagcugcgacuucaacggcggcaagaucagcgugcaguacaaccugagccacagcuacgccggcgacgccgccaaccacugcggcaccguggccaacggcgugcugcagaccuucaugagaauggccuggggcggcagcuacaucgcccuggacagcggcagagacagaugggacugcaucaugaccagcuaccaguaccugaucauccagaacaccaccugggaggaccacugccaguucagcagacccagccccaucggcuaccugggccugcugagccagagaaccagagacaucuacaucagcagaagacugcugggcaccuucaccuggacccugagcgacagcgagggcaaggacacccccggcggcuacugccugaccagauggaugcugaucgaggccgagcugaagugcuucggcaacaccgccguggccaagugcaacgagaagcacgacgaggaguucugcgacaugcugagacuguucgacuucaacaagcaggccauccagagacugaaggccgaggcccagaugagcauccagcugaucaacaaggccgugaacgcccugaucaacgaccagcugaucaugaagaaccaccugagagacaucaugggcauccccuacugcaacuacagcaaguacugguaccugaaccacaccaccaccggcaagaccagccugcccaagugcuggcuggugagcaacggcagcuaccugaacgagacccacuucagcgacgacaucgagcagcaggccgacaacaugaucaccgagaugcugcagaaggaguacauggagagacagggcaagaccccccugggccugguggaccuguucguguucagcaccagcuucuaccugaucagcaucuuccugcaccuggugaagauccccacccacagacacaucgugggcaagcccugccccaagccccacagacugaaccacaugggcaucugcagcugcggccuguacaagcagcccggcgugcccgugaaguggaagagaugaggacuaguaauaaggaaacuguaugaaugucugugggcaggaagugaagagauccuucuguaaagguuuuuggaauuaugucugcugaauaauaaacuuuuuugaaauaauaaaucugguagaaaaaugagaucucaaaggcucuuuucagagccaccaaaaaaaaaaaaaaaaaaaaaaaaaaaaaaaaaaaaaaaaaaaaaaaaaaaaaaaaaaaaaaaaaaaaaaaaaaaaaaaaaaaaaaaaaaaaaaaaaaaaa

SEQ ID NO: 14792 - RNA, 1812 nt, Artificial Sequence
  mRNA product Design b-4 (hSL-A100) comprising derived and/or modified sequence from LASV(Josiah;Clade IV)__NP_694870__GPC (opt5)
aggagagucccgcagucggcguccagcggcucugcuuguucgugugugugucguugcaggccuuauucaagcuuaccaugggccagaucgugaccuucuuucaagaggucccccacguuauugaagaggugaugaacaucgugcugauugcccucagcguccuggcugugcuuaaggggcuguacaauuucgccacaugcggacucguuggccuggugacguuucuucugcucugugggagauccugcaccacaucucuguauaaaggagucuacgaacugcagacccucgagcugaacauggaaacacuuaauaugaccaugccucugagcuguacaaagaacaauucccaucacuauaucauggugggcaacgagaccgggcucgagcugacgcuuaccaauacaucuauuaucaaccauaaauucugcaaucugagcgacgcgcacaagaaaaaccucuacgaucaugcucugauguccaucauuucuaccuuucaccugagcaucccgaauuucaaccaguaugaagccauguccugugacuuuaauggaggcaagauuagcguucaguacaaccucucucacuccuaugccggcgaugcugccaaucauugcgggacaguggcuaacggaguccugcaaaccuucaugcggauggccuggggcgggagcuacaucgcgcuugacucuggacgcggcaacugggauuguauuaugacguccuaccaguaucugaucauucagaauacaaccugggaggaccacugccaguuuagcagacccucuccuaucggguaccucggacugcuuucccaacggacacgcgauaucuauauuagcagacggcugcucggcaccuucaccuggacacuguccgacucugaaggcaaggauacgcccgggggauacugucugacccgcuggaugcucaucgaggccgagcugaaaugcuuuggcaacacagcuguggccaaguguaaugaaaaacaugacgaggaguucugcgauaugcuuagacuguuugacuucaacaagcaggcuauucagcggcucaaagccgaagcgcagaugagcauccaacugauuaauaaggccgugaacgcucuuaucaaugaucagcugaucaugaagaaccaccuccgcgacauuauggggaucccuuauugcaauuacuccaaauauugguaccugaaccacaccacaaccggaagaacgagccugcccaaguguuggcucgucucuaauggcuccuaccugaacgaaacacauuucagcgacgauauugagcagcaagccgacaauaugaucaccgagaugcuucagaaagaauauauggagcggcaggggaagaccccucugggacucguugaucuguuuguguucucuaccagcuuuuaccugauuuccaucuuccuucaccucgugaaaaucccgacacaucgccacauugucggcaagucuugccccaaaccucauagacugaaccacaugggcaucuguagcugcgggcuguauaagcagcccggagugccuguuaaguggaaacggugaggacuaguaauaaggaaacuguaugaaugucugugggcaggaagugaagagauccuucuguaaagguuuuuggaauuaugucugcugaauaauaaacuuuuuugaaauaauaaaucugguagaaaaaugagaucucaaaggcucuuuucagagccaccaaaaaaaaaaaaaaaaaaaaaaaaaaaaaaaaaaaaaaaaaaaaaaaaaaaaaaaaaaaaaaaaaaaaaaaaaaaaaaaaaaaaaaaaaaaaaaaaaaaaa

SEQ ID NO: 14793 - RNA, 1809 nt, Artificial Sequence
  mRNA product Design b-4 (hSL-A100) comprising derived and/or modified sequence from LASV(LP;Clade I)__AAF86701__GPC (opt5)
aggagagucccgcagucggcguccagcggcucugcuuguucgugugugugucguugcaggccuuauucaagcuuaccaugggccagaucauuaccuucuuucaagaggugccccacgucaucgaagagguuaugaacauugugcugaucgcccucagccugcuugcuauucugaaggggcucuacaauaucgccacaugcggaaucauuggccugguggcguuccuuuuucugugugggaaauccugcucucucacgcugaagggaggcuaugaacugcagacccucgagcugaacauggaaacacuuaauaugaccaugccucugagcuguaccaaaaacuccucucaucacuacaucagagucgggaaugagacaggacucgagcugacacuuaccaacacgagcauuaucaaucauaaguucugcaaccuguccgacgcucacaaaaagaaucucuaugaucaugcccugaugucuauuaucagcaccuuucaccuguccauuccgaacuucaaucaguacgaagccaugagcugugacuuuaacggcggcaagaucucugugcaguauaaucucucccacagcuacgcuggggaugccgcugagcauugcggaacaguugccaacggcgugcugcaaaccuucaugcggauggcguggggagggcgcuauaucgcccuugacucuggcaaagggaauugggauuguauuaugacauccuaccaguaccugaucauucagaacaccacgugggaagaccacugccaguuuagcagacccucuccuaucggauaucucggccugcuuucccaacggacacgcgauauuuacaucagcagacggcugcucggcaccuucacauggacccuguccgacucugaggggaacgagacccccggaggcuauugucugacacgcuggaugcucaucgaagcugagcugaagugcuuugggaauacggccgucgcuaaauguaacgaaaagcaugaugaggaguucugcgacaugcuuagacuguuugauuucaauaaacaggccauucggcgccucaaggcggaagcccagaugagcauccagcugauuaacaaggcugugaaugcccuuaucaacgaccaacugauuaugaaaaaucaccucagagauaucaugggaaucccuuacugcaacuauuccaaguacugguaucugaaucacaccagcucuggccggacaucccugcccaaauguuggcucauuagcaacgggucuuaccugaaugagacccaguucagcgacgacaucgaacagcaagcugauaacaugauuacagagaugcuucagaaggaauacaucgagcgccagggaaaaaccccucugggccucguugacauuuuuaucuucuccacgucuuuuuaucugauuagcaucuuccugcaucuuaucaagauuccgacacacagacauaucgugggcaaacccugcccuaagccccaccggcucaaucauaugggggucuguuccugcggacuguacaagcacccuggcgugcccaccaaauggaagcgcugaggacuaguaauaaggaaacuguaugaaugucugugggcaggaagugaagagauccuucuguaaagguuuuuggaauuaugucugcugaauaauaaacuuuuuugaaauaauaaaucugguagaaaaaugagaucucaaaggcucuuuucagagccaccaaaaaaaaaaaaaaaaaaaaaaaaaaaaaaaaaaaaaaaaaaaaaaaaaaaaaaaaaaaaaaaaaaaaaaaaaaaaaaaaaaaaaaaaaaaaaaaaaaaaa

SEQ ID NO: 14794 - RNA, 1809 nt, Artificial Sequence
  mRNA product Design b-4 (hSL-A100) comprising derived and/or modified sequence from LASV(803213;Clade II)__AAF86703__GPC (opt5)
aggagagucccgcagucggcguccagcggcucugcuuguucgugugugugucguugcaggccuuauucaagcuuaccaugggccagaucauuaccuucuuucaagaggugccccacgucaucgaagagguuaugaacauugugcugaucgcccucagccugcuugcuauucugaaggggaucuacaauguggccacaugcggacucuucggccugaucuccuuucuucugcucugugggagaucuugcagcgucacguauaaaggaguguacgaacugcagacccuggagcucaacauggcgaaucugaacaugacaaugccucuuuccuguaccaagaauaacucucaucacuauauuaugguuggcaaugaaacagggcuggagcucacccugacaaacaccagcaucauuaaucauaaauucugcaaccuuuccgacgcucacaagaaaaaucuguacgaucaugcccucaugucuaucauuagcacguuucaccuguccaucccgaacuucaaucaguaugaggccaugagcugugacuuuaacggaggcaagauuucugugcaguacaaucugucccacagcuucgcugucgaugccgcuaaccauugcggcaccaucgccaacggggugcuccaaacauuuaugcggauggcguggggaggcucuuauaucgcccuggacuccgggaagggaaauugggauuguauuaugaccagcuaccaguaccuuaucauucagaacacaaccugggaagaccacugccaguucucucgccccuccccuaucggcuaucuggggcuccugagccaaagaacgcgggauauuuacaucucccgcagacuucugggaacauuuaccuggacacucucugacagcgagggcaaugaagcucccggcggguauugucugacccgguggaugcugaucgaggccgagcucaaaugcuucggaaacaccgcuguugccaaguguaaugaaaaacaugaugaggaauuuugcgacaugcugcgccuuuucgauuucaacaagcaggcgauuaaaagacugaagacagaggcccagauguccauccagcucauuaauaaggcugugaacgcccugaucaaugaccaacuuauuaugaaaaaccaucugcgggauaucaugggcaucccuuacugcaauuauagccgcuacugguaucucaaccacacggucaccgggaagacaucucugcccagauguuggcugguguccaauggaagcuaccucaacgaaacccacuuuucugacgacauugagcagcaggcugauaauaugaucacagagaugcugcaaaaagaauacauggaccggcagggcaagaccccucuugggcugguggaucucuucgucuuuagcacguccuucuaucugauuucuaucuuucugcaccuuguuaaaauuccgacacaucgccacaucgugggaaagcccugcccuaaaccccauagacucaaccacaugggcauuuguagcugcggccuguacaagcacccuggggugcccgucaaguggaaacggugaggacuaguaauaaggaaacuguaugaaugucugugggcaggaagugaagagauccuucuguaaagguuuuuggaauuaugucugcugaauaauaaacuuuuuugaaauaauaaaucugguagaaaaaugagaucucaaaggcucuuuucagagccaccaaaaaaaaaaaaaaaaaaaaaaaaaaaaaaaaaaaaaaaaaaaaaaaaaaaaaaaaaaaaaaaaaaaaaaaaaaaaaaaaaaaaaaaaaaaaaaaaaaaaa

SEQ ID NO: 14795 - RNA, 1809 nt, Artificial Sequence
  mRNA product Design b-4 (hSL-A100) comprising derived and/or modified sequence from LASV(GA391;Clade III)__CAA36645__GPC (opt5)
aggagagucccgcagucggcguccagcggcucugcuuguucgugugugugucguugcaggccuuauucaagcuuaccaugggccagaucgugaccuucuuucaagaggucccccacguuauugaagaggugaugaacaucgugcugauugcccucagcauccuggcuauucuuaaggggcuguacaaugucgccacaugcggacucaucggccuggugacguuccuucugcucuccgggagaucuuguagccugaucuauaaaggaaccuacgaacugcagacacucgagcugaacauggaaacccuuaauaugacaaugccucuguccugcaccaagaacaauucucaucacuauauucggguuggcaacgagacagggcucgagcugacccuuacgaauaccagcauccugaaccauaaauuuuguaaucucuccgacgcgcacaagcgcaaccuguacgaucauucucugaugagcauuaucuccacauuccaccucagcauuccgaauuuuaaccaguaugaagcuaugucuugcgacuucaauggaggcaaaaucaccgugcaguacaaccugucccacagcuuugccgucgaugccgcuggccauugugggacacuugccaauggagugcugcaaaccuucaugagaauggcuuggggcgggucuuauauugcccucgacuccggacggggcaacugggauugcaucaugacgagcuaccaguaccugaucauucagaacacaaccugggacgaucacugucaguuuucucgccccuccccuaucggguaucuuggacugcucagccaaagaacacgggacauuuacaucucccgcagacugcugggcaccuucaccuggacacucucugauagcgagggcaaugaaacgcccgggggauauugccugacccgguggaugcuuauugaggcggagcugaaguguuuuggcaacacagccguugcuaagugcaaugaaaaacaugacgaggaguucugugauaugcuccgccuguuugacuucaacaagcaggccaucagacggcuuaaaaccgaagcucagauguccauccagcugauuaauaaggccgugaacgcgcucaucaaugaucaacugauuaugaaaaaccaucugcgcgacaucauggggauuccuuacugcaauuauagcagauacugguaucucaaccacacaucuaccggaaagacgucccugccccggugcuggcuuaucagcaauggcucuuaccugaacgaaacaaaguucagcgacgauaucgagcagcaggccgacaauaugauuaccgagaugcuccaaaaagaauacaucgaucgccaggggaagaccccucugggacuggucgaccuuuuuguguucuccacaucuuuuuaucucauuagcaucuuccugcaccuggugaaaauuccgacccacagacauaucgucggcaagcccuguccuaaaccccaccggcucaaccauaugggcauuugcuccugugggcuguacaagcagccuggaguucccgugagauggaaacgcugaggacuaguaauaaggaaacuguaugaaugucugugggcaggaagugaagagauccuucuguaaagguuuuuggaauuaugucugcugaauaauaaacuuuuuugaaauaauaaaucugguagaaaaaugagaucucaaaggcucuuuucagagccaccaaaaaaaaaaaaaaaaaaaaaaaaaaaaaaaaaaaaaaaaaaaaaaaaaaaaaaaaaaaaaaaaaaaaaaaaaaaaaaaaaaaaaaaaaaaaaaaaaaaaa

SEQ ID NO: 14796 - RNA, 1812 nt, Artificial Sequence
  mRNA product Design b-4 (hSL-A100) comprising derived and/or modified sequence from LASV(AV;Clade V)__CCA30314__GPC (opt5)
aggagagucccgcagucggcguccagcggcucugcuuguucgugugugugucguugcaggccuuauucaagcuuaccaugggccagaucgugaccuucuuucaagaggucccccacguuauugaagaggugaugaacaucgugcugauugcccucagcauccuggcuguccuuaaggggcuguacaauauugccacaugcggacucaucggccugaucacguuccuucugcucugugggagauccugcucuagcaaccuguauaaaggaguguacgaacugcagucccucgaccugaauauggagacccuuaacaugacaaugccucugucuuguaccaagaauaacagccaucacuauauucggguuggcaaugauacagggcucgaacugacccuuacaaacaccuccauccugaaucauaaauuuugcaaccucucugacgcgcacaagaaagaucuguacgaccaugcucugaugagcauuaucuccacguuccaccucagcauuccgaauuuuaaccaguaugaggccaugucuugugauuucaauggaggcaagaucuccgugcaguacaaccugagccacucuuaugccauugacgcugccaaucauugcggcaccgucgcuaacgggauccuucaaacauuuaugcgcauggccuggggaggcuccuacaucgcgcuggauagcgggagaggaaacugggacuguauuaugaccucuuaccaguaucucaucauucagaauacaaccugggagaaccacugccaguucucccggcccagcccuaucggcuaccuggggcuucugucccaacgcacgagagauauuuauaucucucggcgccuccugggaacauuuaccuggacacugagcgacuccgaaggcaaugccacccccggcggguacugucucaccagauggaugcugaucgaggcugaacuuaagugcuucggaaacacagccguggcuaaauguaaugagaagcaugaugaggaauuuugcgacaugcugcgccucuucgauuuuaacaaacaggccauuagccggcugaagucugaggcgcagauguccauccagcuuauuaauaaagccguuaacgcucugaucaaugaccaacucauuaugaagaaccaccugagagacaucaugggcaucccuuauugcaauuacagcaaguauugguaccugaaccacacgauuaccgggaaaacaucucuccccaaguguuggcuggugagcaauggauccuaccuuaacgaaacccauuucucugaugacaucgagcagcaggccgauaauaugauuacagaaaugcugcaaaaagaguauauggagcggcagggcaagaccccucucgggcuggucgaccuguucguguuuagcacguccuucuaccuuaucagcauuuuucuccgccuggugaaaaucccgacacacagacauauugucggaaagcccugcccuaaaccccaccggcugaaccauaugggcaucuguucuugcggccucuauaagcagccugggguucccgugcgcuggaagagaugaggacuaguaauaaggaaacuguaugaaugucugugggcaggaagugaagagauccuucuguaaagguuuuuggaauuaugucugcugaauaauaaacuuuuuugaaauaauaaaucugguagaaaaaugagaucucaaaggcucuuuucagagccaccaaaaaaaaaaaaaaaaaaaaaaaaaaaaaaaaaaaaaaaaaaaaaaaaaaaaaaaaaaaaaaaaaaaaaaaaaaaaaaaaaaaaaaaaaaaaaaaaaaaaa

SEQ ID NO: 14797 - RNA, 1809 nt, Artificial Sequence
  mRNA product Design b-4 (hSL-A100) comprising derived and/or modified sequence from LASV(Togo/2016/7082;Clade VI)__AMR44577__GPC (opt5)
aggagagucccgcagucggcguccagcggcucugcuuguucgugugugugucguugcaggccuuauucaagcuuaccaugggccagaucauuaccuucuuucaagaggugccccacgucaucgaagagguuaugaacauugugcugaucgcccucagccugcuugcuauucugaaggggguguacaaugucgccacaugcggaaucaucggccucgugacguuccuguuucuuugugggagauccugcucucugauuuauaaaggaagcuacgaacuccagacccuggagcugaacauggaaacacucaauaugaccaugccucuguccuguacaaagaacucuagccaucacuauauccggguuggcaaugagaccgggcuugagcugacacucaccaacacguccauuaucaaucauaaauucugcaaccugucugacgcgcacaagcgcaaucuuuacgaucaugcucugaugagcauucucuccaccuuucaccugagcaucccgaacuucaaucaguaugaagccaugucuugugacuuuaacggaggcaaaauuuccgugcaguacaaucugagccacgccuaugcugucgaugccgcugagcauugcggcacaguggccaacgggguucuccaaaccuucaugagaauggcguggggaggcucuuacaucgcccuggacuccgggcggggaaauugggauuguaucaugacaagcuaccaguaucuuauuauccagaacaccacgugggaagaccacugccaguuuucucgccccuccccuauuggcuaccuggggcuccugagccaaagaacacgggauaucuauauuucccgcagacuucugggaaccuucacauggacccucucugacagcgagggcaacgagacccccggcggguacugucugacacgguggaugcugaucgaagcugagcucaagugcuuuggaaauacggccguggcuaaguguaacgaaaaacaugaugaggaguucugcgacaugcugcgccuuuuugauuucaauaagcaggccauccagagacugaaauccgaagcgcagaugagcauucaacucaucaacaaggccgucaaugcucugauuaacgaccagcuuaucaugaaaaaucaucugcgggauaugaugggcauuccuuauugcaacuacucuaaguauugguaccucaaucacaccuccagcgggcgcacaucucugcccaaguguuggcuggugagcaacggauccuaccucaaugagacccacuucucugacgacaucgaacagcaagccgauaacaugaucacagagaugcugcagaaagaauauauugacagacagggcaagaccccucuugggcugguggaucucuuugucuucagcacguccuuuuaccugaucagcauuuuccugcaccuuaucaaaauuccgacacaucggcacaucguuggaaagcccugcccuaaaccccaucgccucaaucacaugggcauuuguucuugcggccuguauaagcagccuggggugcccaccagauggaaacggugaggacuaguaauaaggaaacuguaugaaugucugugggcaggaagugaagagauccuucuguaaagguuuuuggaauuaugucugcugaauaauaaacuuuuuugaaauaauaaaucugguagaaaaaugagaucucaaaggcucuuuucagagccaccaaaaaaaaaaaaaaaaaaaaaaaaaaaaaaaaaaaaaaaaaaaaaaaaaaaaaaaaaaaaaaaaaaaaaaaaaaaaaaaaaaaaaaaaaaaaaaaaaaaaa

SEQ ID NO: 14798 - RNA, 1809 nt, Artificial Sequence
  mRNA product Design b-4 (hSL-A100) comprising derived and/or modified sequence from LASV(KAK-428;Clade n.d. (VII))__ANH09740__GPC (opt5)
aggagagucccgcagucggcguccagcggcucugcuuguucgugugugugucguugcaggccuuauucaagcuuaccaugggccagaucgugaccuucuuucaagaggucccccacguuauugaagaggugaugaacaucgugcugauugcccucagccugcuugcuauccugaaggggcucuacaauuucgccacaugcggagucauuggccugaucacguuucuucugcucugugggagauccugcucugcgaccuauaaaggacaguacgaacugcagacacuggagcucaacauggaaagccugaauaugaccaugccucuuuccuguacaaagaacaauucucaucacuauauccgggcuggcaacaauaccgggcuggagcucacacugaccaacacgagcauuaucucccauaaauucugcaaucuuucugacgcccacaagaaaaaccuguacgaucauacccucaugagcauuaucacaaccuuucaccuguccauuccgaauuucaaccaguaugaggccaugagcugugacuuuaauggaggcaagaucucuauucaauacaaccugucccacagcuaugcuggcgaugccgcucagcauugcgggacaguggccaauggaguucuccagaccuucaugcgcauggcguggggcgggucuuaccuggcccuugacuccggaagacggggcugggauuguaucaucagcucuuaccaguaucugauuauccaaaacacgacaugggacgaucacugccaguuuucccgccccagcccuauuggguaccucggauucgugucccagaagaccagagacaucuauauuucucggcgccugcuuggcacauuuaccuggacccugagcgauuccgaaggccaugacaugcccgggggauacugucucacaagauggaugcugaucgaggcugaucugaaaugcuucggcaacacggccgucgcuaaguguaaugaaaaacacgacgaggaguuuugcgauauguggcgccucuucgacuucaacaagcaggccauccaacggcugaaagcggaagcccagaugaauauucagcuuaucaacaaggcugugaaugcccugauuaacgaccaacucaugaugaagaaucaccugagagauaucauggggauuccuuauugcaacuacagcaaauuuugguaucuuaauaacaccacaaccggacggacaucucugccccgcuguuggcucaucuccaauggcagcuaccugaacgagacccauuucucugacgauaucgaacagcaggcugacaauaugauuacggagaugcugcagaaggaauacauggauagacaagggaaaacaccucucggacugguugaccuuuuuguguucagcaccuccuuuuaucugaucaccauuuuccuccaccuggucaagaucccgacacaucggcacauugugggcaaacccugcccuaagccccaucgccugaaccacaugggcaucuguucuugcgggcuuuacaaacagccuggagugcccgucagauggaagcggugaggacuaguaauaaggaaacuguaugaaugucugugggcaggaagugaagagauccuucuguaaagguuuuuggaauuaugucugcugaauaauaaacuuuuuugaaauaauaaaucugguagaaaaaugagaucucaaaggcucuuuucagagccaccaaaaaaaaaaaaaaaaaaaaaaaaaaaaaaaaaaaaaaaaaaaaaaaaaaaaaaaaaaaaaaaaaaaaaaaaaaaaaaaaaaaaaaaaaaaaaaaaaaaaa

SEQ ID NO: 14799 - RNA, 1809 nt, Artificial Sequence; identical to SEQ ID NO: 14793
  mRNA product Design b-4 (hSL-A100) comprising derived and/or modified sequence from LASV(Pinneo-NIG-1969;Clade I)__AIT17836__GPC (opt5)

SEQ ID NO: 14800 - RNA, 1809 nt, Artificial Sequence
  mRNA product Design b-4 (hSL-A100) comprising derived and/or modified sequence from LASV(ISTH0009-NIG-2011;Clade II)__AIT17404__GPC (opt5)
aggagagucccgcagucggcguccagcggcucugcuuguucgugugugugucguugcaggccuuauucaagcuuaccaugggccagaucauuaccuucuuucaagaggugccccacgucaucgaagagguuaugaacauugugcugaucgcccucagccugcuugcuauucugaaggggaucuacaauguggccacaugcggacucuucggccuggucuccuuucuucugcucugugggagaucuugcagcacgaccuauaaaggaguguacgaacugcagacacuggagcucgacauggcgucccugaacaugaccaugccucuuucuuguacaaagaauaacagccaucacuauaucaugguuggcaaugaaaccgggcuggagcucacacugaccaacacguccauuaucaaucauaaauucugcaaccuuucugaugcucacaagaaaaaucuguacgaccaugcccucaugagcauuaucuccaccuuucaccugagcauuccgaacuucaaucaguaugaggccaugucuugugauuuuaacggaggcaagaucuccgugcaguacaaucugagccacgcuuaugccgucgacgcugccaaccauugcggcacaauugcgaauggggugcuccaaaccuucaugcggauggccuggggaggcucuuacaucgcucuggauuccgggaagggaagcugggacuguaucaugacaucuuaccaguaucuuauuauccagaacaccacgugggaagaucacugccaguuuucccgccccagcccuauuggcuaccuggggcuccugucccaaagaacacgggacaucuauauuucucgcagacuucugggaaccuucacauggacccucagcgauuccgagggcaacgaaacccccggcggguacugucugacacgguggaugcugaucgaggccgagcucaaaugcuuuggaaauacggcuguugccaaguguaacgaaaaacaugacgaggaguucugcgauaugcugcgccuuuuugacuucaauaagcaggcgaucagacggcugaaaaccgaagcccagaugagcauucagcucaucaacaaggcugugaaugcccugauuaacgaucaacuuaucaugaagaaucaucugcgcgacauuaugggcaucccuuauugcaacuacucuaaauauugguaccucaaucacacagucaccgggaagacaucccugcccagauguuggcuggugagcaacggaucuuaccucaaugaaacccacuucagcgacgauaucgagcagcaggcugacaacaugauuacggagcugcuucaaaaagaauauauggaucggcagggcaagacaccucuggggcucguggaccuguuugucuucuccaccucuuuuuaccugaucagcauuuuccuucaccucaucaaaauuccgacccaucgccacaucacaggaaagcccugcccuaaaccccauagacugaaucacaugggcauuuguuccugcggccuguauaagcacccugggguucccgugaaguggaaacggugaggacuaguaauaaggaaacuguaugaaugucugugggcaggaagugaagagauccuucuguaaagguuuuuggaauuaugucugcugaauaauaaacuuuuuugaaauaauaaaucugguagaaaaaugagaucucaaaggcucuuuucagagccaccaaaaaaaaaaaaaaaaaaaaaaaaaaaaaaaaaaaaaaaaaaaaaaaaaaaaaaaaaaaaaaaaaaaaaaaaaaaaaaaaaaaaaaaaaaaaaaaaaaaaa

SEQ ID NO: 14801 - RNA, 1809 nt, Artificial Sequence
  mRNA product Design b-4 (hSL-A100) comprising derived and/or modified sequence from LASV(ISTH2010-NIG-2012;Clade II)__AIT17482__GPC (opt5)
aggagagucccgcagucggcguccagcggcucugcuuguucgugugugugucguugcaggccuuauucaagcuuaccaugggccagaucauuaccuucuuucaagaggugccccacgucaucgaagagguuaugaacauugugcugaucgcccucagccugcuugcuauucugaaggggaucuacaauguggccacaugcggacucuucggccuggucuccuuucuucugcucugugggagaucuugcagcacgaccuauaaaggaguguacgaacugcagacacuggagcucgacauggcgucccugaacaugaccaugccucuuucuuguacaaagaauaacagccaucacuauaucaugguuggcaaugaaaccgggcuggagcucacacugaccaacacguccauuaucaaucauaaauucugcaaccuuucugaugcucacaagaaaaaucuguacgaccaugcccucaugagcauuaucuccaccuuucaccugagcauuccgaacuucaaucaguaugaggccaugucuugugauuuuaacggaggcaagaucuccgugcaguacaaucugagccacgcuuaugccgucgacgcugccaaccauugcggcacaauugcgaauggggugcuccaaaccuucaugcggauggccuggggaggcucuuacaucgcucuggauuccgggaagggaagcugggacuguaucaugacaucuuaccaguaucuuauuauccagaacauuaccugggaagaucacugccaguuuucccgccccagcccuaucggcuaccuggggcuccugucccaaagaacgcgggacauuuauaucucucgcagacuucugggaacauucaccuggacacucagcgauuccgagggcaacgaaacccccggcggguacugucugacccgguggaugcugaucgaggccgagcucaaaugcuuuggaaauacagcuguugccaaguguaacgaaaaacaugacgaggaguucugcgauaugcugcgccuuuuugacuucaauaagcaggcgauuagacggcugaaaacggaagcccagaugagcauccagcucauuaacaaggcugugaaugcccugaucaacgaucaacuuauuaugaagaaucaucugcgcgacaucaugggcaucccuuauugcaacuacucuaaauauugguaccucaaucacaccgucacagggaagaccucccugcccagauguuggcuggugagcaacggaucuuaccucaaugaaacacacuucagcgacgauauugagcagcaggcugacaacaugaucaccgagcugcuucaaaaagaauauauugaucggcagggcaagacgccucuggggcucguggaccuguuugucuucuccacaucuuuuuaccugaucagcauuuuccuucaccucguuaaaaucccgacccaucgccacguggugggaaagcccugcccuaaaccccauagacugaaucacaugggcauuuguuccugcggccuguauaagcacccugggguccccgugaaguggaaacggugaggacuaguaauaaggaaacuguaugaaugucugugggcaggaagugaagagauccuucuguaaagguuuuuggaauuaugucugcugaauaauaaacuuuuuugaaauaauaaaucugguagaaaaaugagaucucaaaggcucuuuucagagccaccaaaaaaaaaaaaaaaaaaaaaaaaaaaaaaaaaaaaaaaaaaaaaaaaaaaaaaaaaaaaaaaaaaaaaaaaaaaaaaaaaaaaaaaaaaaaaaaaaaaaa

SEQ ID NO: 14802 - RNA, 1809 nt, Artificial Sequence
  mRNA product Design b-4 (hSL-A100) comprising derived and/or modified sequence from LASV(Lassa virus/H.sapiens-wt/NGA/2015/ISTH_0543;Clade II)__AVO03639__GPC (opt5)
aggagagucccgcagucggcguccagcggcucugcuuguucgugugugugucguugcaggccuuauucaagcuuaccaugggccagaucauuaccuucuuucaagaggugccccacgucaucgaagagguuaugaacauugugcugaucgcccucagccugcuugcuauucugaaggggaucuacaauguggccacaugcggacucuucggccuggucuccuuucuucugcucugugggagaucuugcagcacgaccuauaaaggaguguacgaacugcagacacuggagcucgacauggcgaaccugaauaugaccaugccucuuuccuguacaaagaacaauucucaucacuauaucaugguuggcaacgaaaccgggcuggagcucacacugaccaauacgagcauuaucaaccauaaauucugcaaucuuuccgaugcucacaagaaaaaccuguacgaccaugcccucaugucuauuaucagcaccuuucaccuguccauuccgaauuucaaccaguaugaggccaugagcugugauuuuaauggaggcaagaucucugugcaguacaaccugucccacacauaugcugucgacgccgcuaaucauugcggcaccauugccaacggggugcuccaaacauucaugcggauggcguggggaggcagcuacaucgcccuggauucugggaagggauccugggacuguaucaugaccagcuaccaguaucuuguuauucagaacacgacaugggaagaucacugccaguuuucucgccccuccccuaucggcuaccuggggcuccugagccaaagaacccgggacauuuauaucucccgcagacuucugggaacauucaccuggacccucucugauagcgagggcaaugaaacacccggcggguacugucugacgcgguggaugcugauugaggcugagcucaaaugcuuuggaaacaccgccguggcuaaguguaaugaaaaacaugacgaggaguucugcgauaugcugcgccuuuuugacuucaacaagcaggccaucagacggcugaaaacagaagcgcagauguccauccagcucauuaauaaggccgucaacgcucugaucaaugaucaacuuauuaugaagaaccaucugcgcgacaucaugggcauuccuuauugcaauuacagcaaauauugguaccucaaccacaccgugacagggaagaccucucugcccagauguuggcugguguccaauggaagcuaccucaacgaaacgcacuucucugacgauaucgagcagcaggccgacaauaugaucacagagcugcuucaaaaagaauauauugaucggcagggcaagaccccucuggggcucgucgaccuguuuguuuucagcaccuccuuuuaccugaucucuauuuuccuucaccucgugaaaaucccgacacaucgccacauuaccggaaagcccugcccuaaaccccauagacugaaccacaugggcaucuguagcugcggccuguauaagcacccuggggugcccgucaaguggaaacggugaggacuaguaauaaggaaacuguaugaaugucugugggcaggaagugaagagauccuucuguaaagguuuuuggaauuaugucugcugaauaauaaacuuuuuugaaauaauaaaucugguagaaaaaugagaucucaaaggcucuuuucagagccaccaaaaaaaaaaaaaaaaaaaaaaaaaaaaaaaaaaaaaaaaaaaaaaaaaaaaaaaaaaaaaaaaaaaaaaaaaaaaaaaaaaaaaaaaaaaaaaaaaaaaa

SEQ ID NO: 14803 - RNA, 1809 nt, Artificial Sequence
  mRNA product Design b-4 (hSL-A100) comprising derived and/or modified sequence from LASV(Lassa virus/H.sapiens-wt/NGA/2016/ISTH_0009;Clade II)__AVO03571__GPC (opt5)
aggagagucccgcagucggcguccagcggcucugcuuguucgugugugugucguugcaggccuuauucaagcuuaccaugggccagaucauuaccuucuuucaagaggugccccacgucaucgaagagguuaugaacauugugcugaucgcccucagccugcuugcuauucugaaggggaucuacaauguggccacaugcggacuccugggccuugucuccuuccugcuccugugugggagaucuugcagcacgaccuauaaaggaguguacgaacugcagacacucgagcuggacauggcgucccuuaacaugaccaugccucugucuuguacaaagaauaacagccaucacuauaucaugguuggcaaugaaaccgggcucgagcugacacuuaccaacacguccauuaucaaucauaaauuuugcaaccugucugaugcucacaagaaaaaucucuacgaccaugcccugaugagcauuaucuccaccuuccaccugagcauuccgaacuuuaaucaguaugaggccaugucuugugauuucaacggaggccggaucuccgugcaguacaaucucagccacucuuaugcugucgacgccgcuaaccauugcggcacaauugccaauggggugcugcaaaccuuuaugcgcauggcguggggaggcuccuacaucgcccuugauagcgggaagggaucuugggacuguaucaugacauccuaccaguaucugauuauccagaacaccacgugggaagaucacugccaguucagcagacccuccccuauuggcuaccucgggcugcuuucucaacggacacgcgacaucuauauuagcagacggcugcucggaaccuuuacauggacccuguccgauagcgagggcaacgaaacccccggcggguacugucugacacgcuggaugcucaucgaggcugagcugaagugcuucggaaauacggccguugcuaaauguaacgaaaagcaugacgaggaauuuugcgauaugcuuagacuguucgacuuuaauaaacaggccauccggcgccucaagaccgaggcgcagaugucuauucagcugaucaacaaagccgugaaugcucuuauuaacgaucaacugaucaugaagaaucaccucagagacauuaugggcaucccuuauugcaacuacuccaaguauugguaccugaaucacacagucaccgggaaaacaagccugccccgguguuggcucgugucuaacggaagcuaccugaaugaaacccauuucuccgacgauaucgagcagcaggccgacaacaugauuacggagcuucugcaaaaggaauauaucgaucgccagggcaaaacaccucucgggcugguggaccuguucgucuuuucuaccagcuucuaccuuauuuccaucuuucuccaccugguuaagauuccgacccauagacacaucacaggaaaacccugcccuaagccccaucggcugaaucacaugggcauuuguagcugcggccucuauaaccacccuggggugcccgugaaauggaagcgcugaggacuaguaauaaggaaacuguaugaaugucugugggcaggaagugaagagauccuucuguaaagguuuuuggaauuaugucugcugaauaauaaacuuuuuugaaauaauaaaucugguagaaaaaugagaucucaaaggcucuuuucagagccaccaaaaaaaaaaaaaaaaaaaaaaaaaaaaaaaaaaaaaaaaaaaaaaaaaaaaaaaaaaaaaaaaaaaaaaaaaaaaaaaaaaaaaaaaaaaaaaaaaaaaa

SEQ ID NO: 14804 - RNA, 1809 nt, Artificial Sequence
  mRNA product Design b-4 (hSL-A100) comprising derived and/or modified sequence from LASV(Lassa virus/H.sapiens-wt/NGA/2016/ISTH_0017;Clade II)__AVO03567__GPC (opt5)
aggagagucccgcagucggcguccagcggcucugcuuguucgugugugugucguugcaggccuuauucaagcuuaccaugggccagaucauuaccuucuuucaagaggugccccacgucaucgaagagguuaugaacauugugcugaucgcccucagccugcuugcuauucugaaggggaucuacaauguggccacaugcggacucuucggccuggucuccuuucuucugcucugugggagaucuugcagcacgaccuauaaaggaguguacgaacugcagacacuggagcucgacauggcgucccugaacaugaccaugccucuuucuuguacaaagaauaacagccaucacuauaucaugguuggcaaugaaaccgggcuggagcucacacugaccaacacguccauuaucaaucauaaauucugcaaccuuucugaugcucacaagaaaaaucuguacgaccaugcccucaugagcauuaucuccaccuuucaccugagcauuccgaacuucaaucaguaugaggccaugucuugugauuuuaacggaggcaagaucuccgugcaguacaaucugagccacacauaugcuauugacgccgcuaaccauugcggcaccaucgccaaugggguccuccaaacauucaugcggauggcguggggaggcucuuacaucgcccuggauuccgggaagggaagcugggacuguauuaugaccucuuaccaguaucuuaucauucagaacacgacaugggaagaucacugccaguuuucccgccccagcccuaucggcuaccuggggcuccugucccaaagaacccgggacauuuauaucucucgcagacuucugggaacauucaccuggacccucagcgauuccgagggcaacgaaacacccggcggguacugucugacgcgguggaugcugaucgaggcugagcucaaaugcuuuggaaauaccgccguggcuaaguguaacgaaaaacaugacgaggaguucugcgauaugcugcgccuuuuugacuucaauaagcaggccauuagacggcugaaaacagaagcgcagaugagcauccagcucauuaacaaggccguuaaugcucugaucaacgaucaacuuauuaugaagaaucaucugcgcgacaucaugggcaucccuuauugcaacuacucuaaauauugguaccucaaucacaccgugacagggaagaccucccugcccagauguuggcuggucagcaacggaucuuaccucaaugaaacgcacuucagcgacgauauugagcagcaggccgacaacaugaucacagagcugcuucaaaaagaauauauggaucggcagggcaagaccccucuggggcucguggaccuguuuguguucuccaccucuuuuuaccugauuagcaucuuccuucaccucguccgcauuccgacacauagacacguuaucggaaaacccugcccuaagccccaucggcugaaucacaugggcauuuguuccugcggccuguauaaacacccuggggugcccgugaaguggaagcgcugaggacuaguaauaaggaaacuguaugaaugucugugggcaggaagugaagagauccuucuguaaagguuuuuggaauuaugucugcugaauaauaaacuuuuuugaaauaauaaaucugguagaaaaaugagaucucaaaggcucuuuucagagccaccaaaaaaaaaaaaaaaaaaaaaaaaaaaaaaaaaaaaaaaaaaaaaaaaaaaaaaaaaaaaaaaaaaaaaaaaaaaaaaaaaaaaaaaaaaaaaaaaaaaaa

SEQ ID NO: 14805 - RNA, 1809 nt, Artificial Sequence
  mRNA product Design b-4 (hSL-A100) comprising derived and/or modified sequence from LASV(Lassa virus/H.sapiens-wt/NGA/2018/ISTH_0959;Clade II)__AVV65099__GPC (opt5)
aggagagucccgcagucggcguccagcggcucugcuuguucgugugugugucguugcaggccuuauucaagcuuaccaugggccagaucauuaccuucuuucaagaggugccccacgucaucgaagagguuaugaacauugugcugaucgcccucagccugcuugcuauucugaaggggaucuacaauguggucacaugcggacucuucggccugguguccuuucuucugcucugugggagaucuugcagcacgaccuauaaaggaguuuacgaacugcagacacuggagcucgacauggccucccugaacaugaccaugccucuuucuuguacaaagaauaacagccaucacuauaucauggugggcaaugaaaccgggcuggagcucacacugaccaacacguccauuaucaaucauaaauucugcaaccuuucugaugcgcacaagaaaaaucuguacgaccaugcucucaugagcauuaucuccaccuuucaccugagcauuccgaacuucaaucaguaugaggccaugucuugugauuuuaacggaggcaagaucuccguccaguacaaucugagccacgccuaugcuauugacgccgcuaaccauugcggcacaaucgccaauggggugcuccaaaccuucaugcggauggcguggggaggcucuuacaucgcccuggauuccgggaagggaagcugggacuguauuaugacaucuuaccaguaucuuaucauucagaacaccacgugggaagaucacugccaguuuucccgccccagcccuaucggcuaccuggggcuccugucccaaagaacacgggacauuuauaucucucgcagacuucugggaaccuucacauggacccucagcgauuccgagggcaacgaaacccccggcggguacugucugacacgguggaugcugaucgaggcugagcucaaaugcuuuggaaauacggccguugcuaaguguaacgaaaaacaugacgaggaguucugcgauaugcugcgccuuuuugacuucaauaagcaggccauuagacggcugaaaaccgaagcgcagaugagcauccagcucauuaacaaggccgugaaugcucugaucaacgaucaacuuauuaugaagaaucaucugcgcgacaucaugggcaucccuuauugcaacuacucuaaauauugguaccucaaucacacagucaccgggaagacaucccugcccagauguuggcuggugagcaacggaucuuaccucaaugaaacccacuucagcgacgauauugagcagcaggccgacaacaugaucacggagcugcuucaaaaagaauauauugaucggcagggcaagacaccucuggggcucguggaccuguuugucuucuccaccucuuuuuaccugaucagcauuuuccuucaccucguuaaaaucccgacccaucgccacgugauuggaaagcccugcccuaaaccccauagacugaaucacaugggcaucuguuccugcggccuguauaagcacccuggggugcccgucaaguggaaacggugaggacuaguaauaaggaaacuguaugaaugucugugggcaggaagugaagagauccuucuguaaagguuuuuggaauuaugucugcugaauaauaaacuuuuuugaaauaauaaaucugguagaaaaaugagaucucaaaggcucuuuucagagccaccaaaaaaaaaaaaaaaaaaaaaaaaaaaaaaaaaaaaaaaaaaaaaaaaaaaaaaaaaaaaaaaaaaaaaaaaaaaaaaaaaaaaaaaaaaaaaaaaaaaaa

SEQ ID NO: 14806 - RNA, 1809 nt, Artificial Sequence
  mRNA product Design b-4 (hSL-A100) comprising derived and/or modified sequence from LASV(LASV003-NIG-2008;Clade II)__AIT17580__GPC (opt5)
aggagagucccgcagucggcguccagcggcucugcuuguucgugugugugucguugcaggccuuauucaagcuuaccaugggccagaucauuaccuucuuucaagaggugccccacgucaucgaagagguuaugaacauugugcugaucgcccucagccugcuugcuauucugaaggggaucuacaauguggccacaugcggacucuucggccuggucuccuuucuucugcucugugggagaucuugcagcacgaccuauaaaggaguguacgaacugcagacacuggagcucgacauggcgucccugaacaugaccaugccucuuucuuguacaaagaauaacagccaucacuauaucaugguuggcaaugaaaccgggcuggagcucacacugaccaacacguccauuaucaaucauaaauucugcaaccuuucugaugcucacaagaaaaaucuguacgaccaugcccucaugagcauuaucuccaccuuucaccugagcauuccgaacuucaaucaguaugaggccaugucuugugauuuuaacggaggcaagaucuccgugcaguacaaucugagccacacauaugcugucgacgccgcuaaccauugcggcaccauugccaauggggugcuccaaacauucaugcggauggcguggggaggcucuuacaucgcccuggauuccgggaagggaagcugggacuguaucaugaccucuuaccaguaucuuauuauccagaacacgacaugggaagaucacugccaguuuucccgccccagcccuauuggcuaccuggggcuccugucccaaagaacccgggacaucuauauuucucgcagacuucugggaacauucaccuggacccucagcgauuccgagagcaacgaaacacccggcggcuacugucugacgcgguggaugcugaucgaggcugagcucaaaugcuuugggaauaccgccguugcuaaguguaacgaaaaacaugacgaggaguucugcgauaugcugcgccuuuuugacuucaauaagcaggccaucagacggcugaaagcggaagcccagaugucuauucagcucaucaacaaggcugugaaugcccugauuaacgaucaacuuaucaugaagaaucaucugcgcgacauuaugggaaucccuuauugcaacuacuccaaauauugguaccucaaucacacagucaccggcagaacaagccugccccgguguuggcuggugucuaacgggagcuaccucaaugaaacccacuucuccgacgauaucgagcagcaggcugacaacaugauuacggagcugcuucaaaaggaauauauggaucgccagggaaaaacaccucugggccucguggaccuguuugucuucucuaccagcuuuuaccugaucuccauuuuccuucaccucguuaagaucccgacccauagacacgugauugggaaacccugcccuaagccccaucggcugaaucacaugggaaucuguagcugcggccuguauaaacacccuggcgugcccgucaaguggaagcgcugaggacuaguaauaaggaaacuguaugaaugucugugggcaggaagugaagagauccuucuguaaagguuuuuggaauuaugucugcugaauaauaaacuuuuuugaaauaauaaaucugguagaaaaaugagaucucaaaggcucuuuucagagccaccaaaaaaaaaaaaaaaaaaaaaaaaaaaaaaaaaaaaaaaaaaaaaaaaaaaaaaaaaaaaaaaaaaaaaaaaaaaaaaaaaaaaaaaaaaaaaaaaaaaaa

SEQ ID NO: 14807 - RNA, 1809 nt, Artificial Sequence
  mRNA product Design b-4 (hSL-A100) comprising derived and/or modified sequence from LASV(LASV035-NIG-2009;Clade II)__AIT17588__GPC (opt5)
aggagagucccgcagucggcguccagcggcucugcuuguucgugugugugucguugcaggccuuauucaagcuuaccaugggccagaucauuaccuucuuucaagaggugccccacgucaucgaagagguuaugaacauugugcugaucgcccucagccugcuugcuauucugaaggggaucuacaauguggccacaugcggacucuucggccuggucuccuuucuucugcucugugggagaucuugcagcacgaccuauaaaggaguguacgaacugcagacacuggagcucgacauggcgucccugaacaugaccaugccucuuucuuguacaaagaauaacagccaucacuauaucaugguuggcaaugaaaccgggcuggagcucacacugaccaacacguccauuaucaaucauaaauucugcaaccuuucugaugcucacaagaaaaaucuguacgaccaugcccucaugagcauuaucuccaccuuucaccugagcauuccgaacuucaaucaguaugaggccaugucuugugauuuuaacggaggcaagaucuccgugcaguacaaucugagccacgcuuaugccgucgacgcugccaaccauugcggcacaauugcgaauggggugcuccaaaccuucaugcggauggccuggggaggcucuuacaucgcucuggauuccgggaagggaagcugggacuguaucaugacaucuuaccaguaucuuauuauccagaacaccacgugggaagaucacugccaguuuucccgccccagcccuauuggcuaccuggggcuccugucccaaagaacacgggacaucuauauuucucgcagacuucugggaaccuucacauggacccucagcgauuccgagggcaacgaaacccccggcggguacugucugacacgguggaugcugaucgaggccgagcucaaaugcuuuggaaauacggcuguugccaaguguaacgaaaaacaugacgaggaguucugcgauaugcugcgccuuuuugacuucaauaagcaggcgaucagacggcugaaagccgaagcucagaugagcauucagcucaucaacaaggccgugaaugcucugauuaacgaucaacuuaucaugaagaaucaucugcgcgacauuaugggcaucccuuauugcaacuacucuaaauauugguaccucaaucacaccgucacagggaagaccucccugcccagauguuggcuggugagcaacggaucuuaccucaaugaaacacacuucagcgacgauaucgagcagcaggccgacaacaugauuaccgagcugcuucaaaaagaauauaucgaucggcagggcaagacgccucuggggcucguggaccuguuugucuucuccacaucuuuuuaccugauuagcaucuuccuucaccucguuaaaauuccgacccaucgccacgugaucggaaagcccugcccuaaaccccauagacugaaucacaugggcauuuguuccugcggccuguauaagcacccuggggugcccgucaaguggaaacggugaggacuaguaauaaggaaacuguaugaaugucugugggcaggaagugaagagauccuucuguaaagguuuuuggaauuaugucugcugaauaauaaacuuuuuugaaauaauaaaucugguagaaaaaugagaucucaaaggcucuuuucagagccaccaaaaaaaaaaaaaaaaaaaaaaaaaaaaaaaaaaaaaaaaaaaaaaaaaaaaaaaaaaaaaaaaaaaaaaaaaaaaaaaaaaaaaaaaaaaaaaaaaaaaa

SEQ ID NO: 14808 - RNA, 1809 nt, Artificial Sequence
  mRNA product Design b-4 (hSL-A100) comprising derived and/or modified sequence from LASV(LASV1000-NIG-2009;Clade II)__AIT17782__GPC (opt5)
aggagagucccgcagucggcguccagcggcucugcuuguucgugugugugucguugcaggccuuauucaagcuuaccaugggccagaucauuaccuucuuucaagaggugccccacgucaucgaagagguuaugaacauugugcugaucgcccucagccugcuugcuauucugaaggggaucuacaauguggccacaugcggacucuucggccuggucuccuuucuucugcucugugggagaucuugcagcacgaccuauaaaggaguguacgaacugcagacacuggagcucgacauggcgucccugaacaugaccaugccucuuucuuguacaaagaauaacagccaucacuauaucaugguuggcaaugaaaccgggcuggagcucacacugaccaacacguccauuaucaaucauaaauucugcaaccuuucugaugcucacaagaaaaaucuguacgaccaugcccucaugagcauuaucuccaccuuucaccugagcauuccgaacuucaaucaguaugaggccaugucuugugauuuuaacggaggcaagaucuccgugcaguacaaucugagccacacauaugcugucgacgccgcuaaccauugcggcaccauugccaauggggugcuccaaacauucaugcggauggcguggggaggcucuuacaucgcccuggauuccgggaagggaagcugggacuguaucaugaccucuuaccaguaucuuauuauccagaacacgacaugggaagaucacugccaguuuucccgccccagcccuauuggcuaccuggggcuccugucccaaagaacccgggacaucuauauuucucgcagacuucugggaacauucaccuggacccucagcgauuccgagggcaacgaaacacccggcggguacugucugacgcgguggaugcugaucgaggcugagcucaaaugcuuuggaaauaccgccguugcuaaguguaacgaaaaacaugacgaggaguucugcgauaugcugcgccuuuuugacuucaauaagcaggccaucaaaagacugaagacagaagcgcagaugagcauucagcucaucaacaaggccgugaaugcucugauuaacgaucaacuuaucaugaaaaaucaucugcgggacauuaugggcaucccuuauugcaacuacucuaaguauugguaccucaaucacaccgucacagggaaaaccucccugccccgcuguuggcuggugagcaacggaucuuaccucaaugaaacgcacuucagcgacgauaucgagcagcaggccgacaacaugauuacagagcugcuucaaaaggaauauaucgauagacagggcaaaaccccucuggggcucguggaccuguuugucuucuccaccucuuuuuaccugauuagcaucuuccuucaccucguuaagauuccgacacaucggcacguggugggaaaacccugcccuaagccccaucgccugaaucacaugggcaucuguuccugcggccuguauaagcacccugggguccccgugaaauggaagagaugaggacuaguaauaaggaaacuguaugaaugucugugggcaggaagugaagagauccuucuguaaagguuuuuggaauuaugucugcugaauaauaaacuuuuuugaaauaauaaaucugguagaaaaaugagaucucaaaggcucuuuucagagccaccaaaaaaaaaaaaaaaaaaaaaaaaaaaaaaaaaaaaaaaaaaaaaaaaaaaaaaaaaaaaaaaaaaaaaaaaaaaaaaaaaaaaaaaaaaaaaaaaaaaaa

SEQ ID NO: 14809 - RNA, 1809 nt, Artificial Sequence
  mRNA product Design b-4 (hSL-A100) comprising derived and/or modified sequence from LASV(LASV221-NIG-2010;Clade II)__AIT17624__GPC (opt5)
aggagagucccgcagucggcguccagcggcucugcuuguucgugugugugucguugcaggccuuauucaagcuuaccaugggccagaucauuaccuucuuucaagaggugccccacgucaucgaagagguuaugaacauugugcugaucgcccucagccugcuugcuauucugaaggggaucuacaauguggccacaugcggacucuucggccuggucuccuuucuucugcucugugggagaucuugcagcacgaccuauaaaggaguguacgaacugcagacacuggagcucgacauggcgucccugaacaugaccaugccucuuucuuguacaaagaauaacagccaucacuauaucaugguuggcaaugaaaccgggcuggagcucacacugaccaacacguccauuaucaaucauaaauucugcaaccuuucugaugcucacaagaaaaaucuguacgaccaugcccucaugagcauuaucuccaccuuucaccugagcauuccgaacuucaaucaguaugaggccaugucuugugauuuuaacggaggcaagaucuccgugcaguacaaucugagccacacauaugcuauugacgccgcuaaccauugcggcaccaucgccaaugggguccuccaaacauucaugcggauggcguggggaggcucuuacaucgcccuggauuccgggaagggaagcugggacuguauuaugaccucuuaccaguaucuuaucauucagaacacgacaugggaagaucacugccaguuuucccgccccagcccuaucggcuaccuggggcuccugucccaaagaacccgggacauuuauaucucucgcagacuucugggaacauucaccuggacccucagcgauuccgagggcaacgaaacacccggcggguacugucugacgcgguggaugcugaucgaggcugagcucaaaugcuuuggaaauaccgccguggcuaaguguaacgaaaaacaugacgaggaguucugcgauaugcugcgccuuuuugacuucaauaagcaggccauuagacggcugaaaacagaagcgcagaugagcauccagcucauuaacaaggccguuaaugcucugaucaacgaucaacuuauuaugaagaaucaucugcgcgacaucaugggcaucccuuauugcaacuacucuaaauauugguaccucaaucacaccgugacagggaagaccucccugcccagauguuggcuggucagcaacggaucuuaccucaaugaaacgcacuucagcgacgauauugagcagcaggccgacaacaugaucacagagaugcugcaaaaagaauauauggaucggcagggcaagaccccucuugggcugguggaccucuuuguguucuccaccucuuuuuaccugauuagcaucuuccugcaccuugucaaaauuccgacacaucgccacguuaucggaaagcccugcccuaaaccccauagacucaaucacaugggcauuuguuccugcggccuguauaagcacccuggggugcccgugaaguggaaacggugaggacuaguaauaaggaaacuguaugaaugucugugggcaggaagugaagagauccuucuguaaagguuuuuggaauuaugucugcugaauaauaaacuuuuuugaaauaauaaaucugguagaaaaaugagaucucaaaggcucuuuucagagccaccaaaaaaaaaaaaaaaaaaaaaaaaaaaaaaaaaaaaaaaaaaaaaaaaaaaaaaaaaaaaaaaaaaaaaaaaaaaaaaaaaaaaaaaaaaaaaaaaaaaaa

SEQ ID NO: 14810 - RNA, 1809 nt, Artificial Sequence
  mRNA product Design b-4 (hSL-A100) comprising derived and/or modified sequence from LASV(LASV237-NIG-2010;Clade II)__AIT17638__GPC (opt5)
aggagagucccgcagucggcguccagcggcucugcuuguucgugugugugucguugcaggccuuauucaagcuuaccaugggccagaucauuaccuucuuucaagaggugccccacgucaucgaagagguuaugaacauugugcugaucgcccucagccugcuugcuauucugaaggggaucuacaauguggccacaugcggacucuucggccuggucuccuuucuucugcucugugggagaucuugcagcacgaccuauaaaggaguguacgaacugcagacacuggagcucgacauggcgucccugaacaugaccaugccucuuucuuguacaaagaauaacagccaucacuauaucaugguuggcaaugaaaccgggcuggagcucacacugaccaacacguccauuaucaaucauaaauucugcaaccuuucugaugcucacaagaaagaccuguacgaucaugcccucaugagcauuaucuccaccuuucaccugagcauuccgaauuucaaccaguaugaggccaugucuugugacuuuaauggaggcaagaucuccgugcaguacaaccugagccacacauaugcugucgaugccgcuaaucauugcggcaccauugccaacggggugcuccaaacauucaugcggauggcguggggaggcucuuacaucgcccuggacuccgggaagggaagcugggauuguaucaugaccucuuaccaguaucuuauuauccagaauacgacaugggaagaccacugccaguuuucccgccccagcccuauuggcuaccuggggcuccugucccaaagaacccgggauaucuauauuucucgcagacuucugggaacauucaccuggacccucagcgacuccgagggcaacgaaacacccggcggguacugucugacgcgguggaugcugaucgaggcugagcucaaaugcuuuggaaacaccgccguugcuaaguguaaugaaaaacaugaugaggaguucugcgacaugcugcgccuuuuugauuucaacaagcaggccaucagacggcugaaaacagaagcgcagaugagcauucagcucaucaauaaggccgugaacgcucugauuaaugaccaacuuaucaugaagaaccaucugcgcgacauuaugggcaucccuuauugcaauuacucuaaauauugguaccucaaccacaccgucacagggaagaccucccugcccagauguuggcuggugagcaauggaucuuaccucaacgaaacgcacuucagcgaugacaucgagcagcaggccgauaauaugauuacagagcugcuucaaaaagaauauauggaccggcagggcaagaccccucuggggcucguggaucuguuugucuucuccaccucuuuuuaccugaucagcauuuuccuucaccucaucaaaauuccgacacaucgccacaucaccggaaagcccugcccuaaaccccauagacugaaccacaugggcauuuguuccugcggccuguauaagcacccugggguucccgugaaguggaaacggugaggacuaguaauaaggaaacuguaugaaugucugugggcaggaagugaagagauccuucuguaaagguuuuuggaauuaugucugcugaauaauaaacuuuuuugaaauaauaaaucugguagaaaaaugagaucucaaaggcucuuuucagagccaccaaaaaaaaaaaaaaaaaaaaaaaaaaaaaaaaaaaaaaaaaaaaaaaaaaaaaaaaaaaaaaaaaaaaaaaaaaaaaaaaaaaaaaaaaaaaaaaaaaaaa

SEQ ID NO: 14811 - RNA, 1809 nt, Artificial Sequence
  mRNA product Design b-4 (hSL-A100) comprising derived and/or modified sequence from LASV(LASV253-NIG-2011;Clade II)__AIT17670__GPC (opt5)
aggagagucccgcagucggcguccagcggcucugcuuguucgugugugugucguugcaggccuuauucaagcuuaccaugggccagaucauuaccuucuuucaagaggugccccacgucaucgaagagguuaugaacauugugcugaucgcccucagccugcuugcuauucugaaggggaucuacaauguggccacaugcggacucuucggccuggucuccuuucuucugcucugugggagaucuugcagcacgaccuauaaaggaguguacgaacugcagacacuggagcucgacauggcgucccugaacaugaccaugccucuuucuuguacaaagaauaacagccaucacuauaucaugguuggcaaugaaaccgggcuggagcucacacugaccaacacguccauuaucaaucauaaauucugcaaccuuucugaugcucacaagaaaaaucuguacgaccaugcccucaugagcauuaucuccaccuuucaccugagcauuccgaacuucaaucaguaugaggccaugucuugugauuuuaacggaggcaagaucuccgugcaguacaaucugagccacacauaugcugucgacgccgcuaaccauugcggcaccauugccaauggggugcuccaaacauucaugcggauggcguggggaggcucuuacaucgcccuggauuccgggaagggaagcugggacuguaucaugaccucuuaccaguaucuuauuauccagaacacgacaugggaagaucacugccaguuuucccgccccagcccuauuggcuaccuggggcuccugucccaaagaacccgggacaucuauauuucucgcagacuucugggaacauucaccuggacccucagcgauuccgagggcaacgaaacacccggcggguacugucugacgcgguggaugcugaucgaggcugagcucaaaugcuuuggaaauaccgccguugcuaaguguaacgaaaaacaugacgaggaguucugcgauaugcugcgccuuuuugacuucaauaagcaggccaucagacggcugaaagcggaagcccagaugagcauucagcucaucaacaaggcugugaaugcccugauuaacgaucaacuuaucaugaagaaucaucugcgcgacauuaugggcaucccuuauugcaacuacucuaaauauugguaccucaaucacacagucaccgggagaacaucccugccccgguguuggcuggugagcaacggaucuuaccucaaugaaacccacuucagcgacgauaucgagcagcaggcugacaacaugauuacggagcugcuucaaaaggaauauaucgaucgccagggcaaaacaccucuggggcucguggaccuguuugucuucuccaccucuuuuuaccugauuagcaucuuccuucaccucguuaagauuccgacccauagacacaucauuggaaaacccugcccuaagccccaucggcugaaucacaugggcaucuguuccugcggccuguauaaacacccuggggugcccgugaaguggaagcgcugaggacuaguaauaaggaaacuguaugaaugucugugggcaggaagugaagagauccuucuguaaagguuuuuggaauuaugucugcugaauaauaaacuuuuuugaaauaauaaaucugguagaaaaaugagaucucaaaggcucuuuucagagccaccaaaaaaaaaaaaaaaaaaaaaaaaaaaaaaaaaaaaaaaaaaaaaaaaaaaaaaaaaaaaaaaaaaaaaaaaaaaaaaaaaaaaaaaaaaaaaaaaaaaaa

SEQ ID NO: 14812 - RNA, 1809 nt, Artificial Sequence
  mRNA product Design b-4 (hSL-A100) comprising derived and/or modified sequence from LASV(LASV254-NIG-2011;Clade II)__AIT17674__GPC (opt5)
aggagagucccgcagucggcguccagcggcucugcuuguucgugugugugucguugcaggccuuauucaagcuuaccaugggccagaucauuaccuucuuucaagaggugccccacgucaucgaagagguuaugaacauugugcugaucgcccucagccugcuugcuauucugaaggggaucuacaauguggccacaugcggacucuucggccuggucuccuuucuucugcucugugggagaucuugcagcacgaccuauaaaggaguguacgaacugcagacacuggagcucgacaugaccaaccugaauaugacaaugccucuuuccuguaccaagaacaauucucaucacuauaucaugguuggcaacgaaacagggcuggagcucacccugacgaauaccagcauuaucaaccauaaauucugcaaucuuuccgaugcgcacaagaaaaaccuguacaaucaugcucucaugucuauuaucagcacauuucaccuguccauuccgaacuucaaucaguaugaggccaugagcugugacuuuaacggaggcaagaucucugugcaguacaaucugucccacagcuaugccgucgaugcugccaaccauugcggcaccauugcuaacggggugcuccaaacauucaugcggauggccuggggaggcucuuacaucgcgcuggacuccgggaagggaaauugggauuguaucaugaccagcuaccaguaucuuauuauccagaacacgacaugggaagaccacugccaguuuucucgccccuccccuauuggcuaccuggggcuccugagccaaagaacccgggauaucuauauuucccgcagacuucugggaacauucaccuggacccucucugacagcgagggcaaugaaacacccggcggguacugucugacgcgguggaugcugaucgaggccgagcucaaaugcuuuggaaacaccgcuguugccaaguguaaugaaaaacaugaugaggaguucugcgacaugcugcgccuuuuugauuucaacaagcaggcuaucagacggcugaaaacagaagcccaggcgaauauucagcucaucaacaaggccgugaaugcucugauuaacgaccaacuuaucaugaagaaucaucugcgcgauauuaugggcaucccuuauugcaacuacuccaaauauugguaccucaaucacaccgucacagggaagaccagccugcccagauguuggcuggugucuaacggauccuaccucaaugaaacgcacuucagcgacgacaucgagcagcaggccgauaacaugauuacagagcugcuucaaaaagaauauauggaccggcagggcaagaccccucuggggcucguggaucuguuugucuucucuaccagcuuuuaccugaucuccauuuuccuucaccucguuaaaaucccgacacaucgccacgugauuggaaagcccugcccuaaaccccauagacugaaccacaugggcaucuguucuugcggccuguauaagcacccuggggugcccgucaaguggaaacggugaggacuaguaauaaggaaacuguaugaaugucugugggcaggaagugaagagauccuucuguaaagguuuuuggaauuaugucugcugaauaauaaacuuuuuugaaauaauaaaucugguagaaaaaugagaucucaaaggcucuuuucagagccaccaaaaaaaaaaaaaaaaaaaaaaaaaaaaaaaaaaaaaaaaaaaaaaaaaaaaaaaaaaaaaaaaaaaaaaaaaaaaaaaaaaaaaaaaaaaaaaaaaaaaa

SEQ ID NO: 14813 - RNA, 1809 nt, Artificial Sequence
  mRNA product Design b-4 (hSL-A100) comprising derived and/or modified sequence from LASV(Nig08-A19;Clade III)__ADU56618__GPC (opt5)
aggagagucccgcagucggcguccagcggcucugcuuguucgugugugugucguugcaggccuuauucaagcuuaccaugggccagaucgugaccuucuuucaagaggucccccacguuauugaagaggugaugaacaucgugcugauugcccucagcauccuggcuauucuuaaggggcuguacaauaucgccacaugcggacucaucggccuggucacguuccuucugcucuccgggagaucuuguagcaugaccuauaaaggaguguacgaacugcagacacuggagcucaacaugaauacccugaacaugacaaugccucuuuccugcaccaagaauaacucucaucacuauauuaugguuggcaaugaaacagggcuggagcucacccugacgaacaccagccuucugcaucacaaauuuuguaaucucuccgacgcgcauaagaaaaaccuguacgaucacacacugaugucuaucauuagcaccuuccaccucuccaucccgaauuuuaaccaguaugaggcuaugagcugcgacuucaauggaggcaagauuacagugcaguacaaccugucucauuccuaugccaucgaugccgcuaaucacuguggcaccgucgccaacggggugcuucaaacguuuaugcggauggcuuggggaggcagcuacauugcccuggacucugggcgcggaaagugggauugcaucaugacauccuaccaguaucucaucauucagaacaccacaugggaagaccauugucaguucagcagacccucuccuaucggcuaccuggggcuucugucccaacggacccgcgauauuuauaucagcagacggcuccugggaaccuuuacauggacgcuguccgacucugagggcaaugaaacccccggcggguacugccucacacgcuggaugcugauugaggcggagcuuaaauguuucggaaacaccgccguugcuaagugcaaugaaaaacacgaugaggaauuuugugacaugcugagacucuucgauuuuaacaagcaggccauccggcgccugaaagcugaggcccagaugagcauccagcuuauuaauaaggcggugaacgcccugaucaaugaccaacucauuaugaagaaccaccugagagauaucaugggcauuccuuauugcaauuacuccaaauauugguaccugaaccauacaagcaccgggcggacgucucucccccgcugcuggcuggucuccaauggaagcuaccuuaacgaaacacacuucucugacgacaucgagcagcaggcugauaauaugaucaccgagaugcugcaaaaggaauaucucgacagacagggcaaaaccccucuggggcugguggaucuuuucguguuuagcacauccuucuaccucauuucuaucuuucugcaucuggucaagauuccgacccaccggcauaucguuggaaaacccuguccuaagccccaccgccucaaccacaugggcauuugcagcuguggccuguauaaacagccuggggugcccgugagauggaagcggugaggacuaguaauaaggaaacuguaugaaugucugugggcaggaagugaagagauccuucuguaaagguuuuuggaauuaugucugcugaauaauaaacuuuuuugaaauaauaaaucugguagaaaaaugagaucucaaaggcucuuuucagagccaccaaaaaaaaaaaaaaaaaaaaaaaaaaaaaaaaaaaaaaaaaaaaaaaaaaaaaaaaaaaaaaaaaaaaaaaaaaaaaaaaaaaaaaaaaaaaaaaaaaaaa

SEQ ID NO: 14814 - RNA, 1812 nt, Artificial Sequence
  mRNA product Design b-4 (hSL-A100) comprising derived and/or modified sequence from LASV(G1180-SLE-2010;Clade IV)__AIT17168__GPC (opt5)
aggagagucccgcagucggcguccagcggcucugcuuguucgugugugugucguugcaggccuuauucaagcuuaccaugggccagaucgugaccuucuuucaagaggucccccacguuauugaagaggugaugaacaucgugcugauugcccucagcauccuggcuguccuuaaggggcuguacaauuucgccacaugcggacucgugggccugcuuacguuucugcuccugugugggagauccugcaccgcgucucgguauaaaggaguuuacgaacugcagacacucgagcugaacauggaaacccuuaauaugacaaugccucugagcuguaccaagaacaauucccaucacuauauuauggugggcaacgagacagggcucgagcugacccuuacgaauaccucuaucaucaaccauaaauucugcaaucugagcgacgcucacaagaaaaaccucuacgaucaugcccugauguccauuaucucuacauuucaccugagcauuccgaauuucaaccaguaugaagccauguccugugacuuuaauggaggcaagaucagcguccaguacaaccucucucacuccuaugcuggcgaugccgcuaaucauugcgggaccguggccaacggaguucugcaaacauucaugcgcauggcguggggcgggagcuacauugcccuugacucuggacacggcuccugggauuguaucaugaccagcuaccaguaucugauuauccagaacacgacaugggaggaccauugccaguuuucuagacccuccccuaucggguaccucggacugcuuagccaacggacccgcgauauuuauaucuccagacggcugcucggcacauucaccuggacccugucugacagcgaaggcaaggauacacccgggggauacugucugacgcgcuggaugcucauugaggcugagcugaaaugcuuuggcaauaccgccguggcuaaguguaacgaaaaacacgacgaggaguucugcgauaugcuuagacuguuugacuucaauaagcaggccauccagcggcucaaagcggaagcccagauguccauucaacugaucaacaaggcugucaaugcccuuaucaacgaucagcugauuaugaagaaucaccuccgcgacaucauggggauuccuuauugcaacuacagcaaauauugguaccugaaucauacaaccacaggaaagaccucucugcccaaauguuggcucguguccaacggcagcuaccugaaugaaacgcacuucucugacgauaucgagcagcaagcugacaacaugauuacagagaugcuucagaaggaauauauggagagacaggggaaaaccccucugggacucguggaucuguuugucuucagcaccuccuuuuaccugaucucuaucuuccuucaucucguuaagauuccgacacaccggcauaucgugggcaaaagcugccccaagccucaccgccugaaucacaugggcauuuguuccugcgggcuguauaagcagcccggagugccugucaaauggaagagaugaggacuaguaauaaggaaacuguaugaaugucugugggcaggaagugaagagauccuucuguaaagguuuuuggaauuaugucugcugaauaauaaacuuuuuugaaauaauaaaucugguagaaaaaugagaucucaaaggcucuuuucagagccaccaaaaaaaaaaaaaaaaaaaaaaaaaaaaaaaaaaaaaaaaaaaaaaaaaaaaaaaaaaaaaaaaaaaaaaaaaaaaaaaaaaaaaaaaaaaaaaaaaaaaa

SEQ ID NO: 14815 - RNA, 1812 nt, Artificial Sequence
  mRNA product Design b-4 (hSL-A100) comprising derived and/or modified sequence from LASV(G1442-SLE-2011;Clade IV)__AIT17180__GPC (opt5)
aggagagucccgcagucggcguccagcggcucugcuuguucgugugugugucguugcaggccuuauucaagcuuaccaugggccagaucgugaccuucuuucaagaggucccccacguuauugaagaggugaugaacaucgugcugauugcccucagcauccuggcuguccuuaaggggcuguacaauguggccacaugcggacucauuggccugguuacguuccuucugcucugugggagauccugcaccacaacccuguauaaaggaguguacgaacugcagacacucgagcugaacauggaaacccuuaauaugacaaugccucugucuuguaccaagaacaauagccaucacuauauccgggucggcaacgagacggggcucgagcugacccuuacaaauaccuccaucauuaaccauaaauuuugcaaucugucugacgcgcacaagaaaaaccucuacgaucaugcucugaugagcaucauuuccacauuccaccugucuaucccgaauuuuaaccaguaugaagccaugagcugugacuucaauggaggcaagauuuccgugcaguacaaccucagccacucuuaugccggcgaugcugccaaucauugcgggaccguugcuaacggagugcugcaaacguuuaugcgcauggccuggggcggguccuacaucgcgcuugacagcggaagaggcaacugggauuguauuaugacaucuuaccaguaucugaucauccagaauaccacaugggacgaucacugccaguucucccggcccagcccuauuggguaccucggacugcuuucucaacgcaccagagacgucuauaucucccggcgccugcucggcaccuuuacauggacgcugagcgauuccgagggcaaggacacccccgggggauacugucugacaagauggaugcucauugaagccgagcugaaaugcuucggcaacaccgcuguggccaaguguaaugagaaacaugaugaagaguuuugcgacaugcuucggcuguucgauuuuaacaagcaggcuauccagcgccucaaagccgaagcgcagaugucuauucaacugaucaauaaggccgugaacgcucuuaucaaugaccagcugauuaugaagaaccaccucagagacaucauggggauuccuuauugcaauuacagcaaauauugguaccugaacaauacagccaccggaaagacgucccugcccaaauguuggcucaucagcaacggcucuuaccugaaugagacacacuucuccgaugacauugaacaggaggcugauaacaugaucaccgagaugcuucaaaaggaauauauggagcggcaggggaaaaccccucugggacucgucgaccuguucguuuuuagcacaucuuucuaccugaucagcauuuuucuucaucucgugaagaucccgacccaccgccauauugugggcaaauccugccccaagccucacagacugaaucauaugggcaucuguucuugcgggcuguauaagcagcccggagucccugugcgguggaaacgcugaggacuaguaauaaggaaacuguaugaaugucugugggcaggaagugaagagauccuucuguaaagguuuuuggaauuaugucugcugaauaauaaacuuuuuugaaauaauaaaucugguagaaaaaugagaucucaaaggcucuuuucagagccaccaaaaaaaaaaaaaaaaaaaaaaaaaaaaaaaaaaaaaaaaaaaaaaaaaaaaaaaaaaaaaaaaaaaaaaaaaaaaaaaaaaaaaaaaaaaaaaaaaaaaa

SEQ ID NO: 14816 - RNA, 1812 nt, Artificial Sequence
  mRNA product Design b-4 (hSL-A100) comprising derived and/or modified sequence from LASV(G3010-SLE-2013;Clade IV)__AIT17344__GPC (opt5)
aggagagucccgcagucggcguccagcggcucugcuuguucgugugugugucguugcaggccuuauucaagcuuaccaugggccagaucgugaccuucuuucaagaggucccccacguuauugaagaggugaugaacaucgugcugauugcccucagcauccuggcuguccuuaaggggcuguacaauuucgccacaugcggacucgugggccugguuacguuucuucugcucugugggagauccugcaccacaucucuguauaaaggaguguacgaacugcagacccucgagcugaacauggaaacacuuaauaugaccaugccucugagcuguacaaagaacaauucccaucacuauauuauggucggcaacgagaccgggcucgagcugacgcuuaccaauacaucuaucaucaaccauaaauucugcaaucugagcgacgcgcacaagaaaaaccucuacaaucaugcucugauguccauuaucucuaccuuucaccugagcauuccgaacuucaaucaguaugaagccauguccugugauuuuaacggaggcaagaucagcgugcaguacaaucucucucacuccuaugccggcgacgcugccagccauugcgggacaguugcuaacggagugcugcaaaccuucaugcggauggccuggggcgggucuuacauugcgcuugauuccggauacggcaagugggacuguaucaugacgagcuaucaguaccugauuauccagaacacaaccugggaggaucacugccaguuuucucgccccuccccuaucggguaucucggacugcuuagccaaagaacacgggacauuuacaucucccgcagacugcucggcaccuucaccuggacacugucugauagcgaaggcaaagacacgcccgggggauauugucugacccgguggaugcucauugaggccgagcugaagugcuuuggcaauacagcugucgccaaauguaacgaaaagcaugaugaggaguucugcgacaugcuucgccuguuugauuucaauaaacaggcuauccagagacucaagaccgaagcccagauguccauucaacugaucaacaaggcggugaaugcccuuaucaacgaccagcugauuaugaaaaaucaccuccgggauaucauggggauuccuuacugcaacuauagcaaguacugguaccugaaucacacaaccacgggaaaaacaucucugcccaaguguuggcucguguccaacggcagcuaucugaaugaaacccauuucucugacgacaucgagcagcaagcugauaacaugauuaccgagaugcuucagaaagaauacauggagcgccaggggaagacaccucugggacucgucgaccuguuuguuuucagcaccuccuuuuaucugaucucuaucuuccuucaccucgugaaaauuccgacacauagacacaucgugggcaagagcugccccaagccucaucggcugaaucacaugggcauuuguuccugcgggcuguacaaacagcccggagucccugugcgcuggaagagaugaggacuaguaauaaggaaacuguaugaaugucugugggcaggaagugaagagauccuucuguaaagguuuuuggaauuaugucugcugaauaauaaacuuuuuugaaauaauaaaucugguagaaaaaugagaucucaaaggcucuuuucagagccaccaaaaaaaaaaaaaaaaaaaaaaaaaaaaaaaaaaaaaaaaaaaaaaaaaaaaaaaaaaaaaaaaaaaaaaaaaaaaaaaaaaaaaaaaaaaaaaaaaaaaa

SEQ ID NO: 14817 - RNA, 1812 nt, Artificial Sequence
  mRNA product Design b-4 (hSL-A100) comprising derived and/or modified sequence from LASV(G502-SLE-2009;Clade IV)__AIT17126__GPC (opt5)
aggagagucccgcagucggcguccagcggcucugcuuguucgugugugugucguugcaggccuuauucaagcuuaccaugggccagaucgugaccuucuuucaagaggucccccacguuauugaagaggugaugaacaucgugcugauugcccucagcauccuggcuguccuuaaggggcuguacaauuucgccacaugcggacucgugggccugcuuacguuucugcuccugugugggagauccugcaccacaggacuguauaaaggcguuuacgaacuccagacccuggagcuuaacauggaaacacugaauaugaccaugccucucucuuguacaaagaacaauagccaucacuauauuaugguggggaacgagaccggacuggagcuuacgcugaccaauacauccaucaucaaccauaaauucugcaaucucucugacgcgcacaagaaaaaccuguacgaucaugcucugaugagcauuaucuccaccuuucaccucucuauuccgaauuucaaccaguaugaagccaugagcugugacuuuaauggcggcaagaucuccguccaguacaaccugagccacucuuaugccggggaugcugccgaccauugcggaacaguggcuaauggcguucuucaaaccuucaugcggauggccuggggaggguccuacauugcgcuggauagcggccgcgggagaugggacuguaucaugacgucuuaccaguaucucauuauccagaacacaaccugggaggaucacugccaguuuucccggcccagcccuaucggauaccugggccuucugucucaacgcacaagagacauuuauaucucccggcgccuccugggcaccuucaccuggacacugagcgauuccgaagggaaggacacgcccggaggcuacugucucaccagauggaugcugauugaggccgagcuuaaaugcuuugggaacacagcuguggccaaguguaaugaaaaacaugaugaggaguucugcgacaugcugcggcucuuugauuucaacaagcaggcuauccagcgccugaaagccgaagcgcagaugucuauucaacuuaucaauaaggccgucaacgcucugaucaaugaccagcucgugaugaagaaccaccugagagacauuaugggaaucccuuauugcaauuacagccgguauugguaccugaaccacaccacaaccggccgcacgucccuccccaaauguuggcuggugagcaaugggucuuaccuuaacgaaacacauuucuccgaugacauugagcagcaagccgauaauaugaucaccgagaugcugcagaaggaauauauggagagacagggaaaaaccccucucggccuggucgaccuguuuguuuucagcacaucuuuuuaccuuauuagcaucuuccuccaccuggugaagaucccgacccaucggcacauugugggcaaauccugccccaagccucaucgccugaaccacauggggaucuguucuugcggacucuauaaacagcccggcgucccugugaaguggaagagaugaggacuaguaauaaggaaacuguaugaaugucugugggcaggaagugaagagauccuucuguaaagguuuuuggaauuaugucugcugaauaauaaacuuuuuugaaauaauaaaucugguagaaaaaugagaucucaaaggcucuuuucagagccaccaaaaaaaaaaaaaaaaaaaaaaaaaaaaaaaaaaaaaaaaaaaaaaaaaaaaaaaaaaaaaaaaaaaaaaaaaaaaaaaaaaaaaaaaaaaaaaaaaaaaa

SEQ ID NO: 14818 - RNA, 1812 nt, Artificial Sequence
  mRNA product Design b-4 (hSL-A100) comprising derived and/or modified sequence from LASV(G733-SLE-2010;Clade IV)__AIT17154__GPC (opt5)
aggagagucccgcagucggcguccagcggcucugcuuguucgugugugugucguugcaggccuuauucaagcuuaccaugggccagaucgugaccuucuuucaagaggucccccacguuauugaagaggugaugaacaucgugcugauugcccucagcauccuggcuguccuuaaggggcuguacaauuucgccacaugcggaauugugggccucguuuccuuucugcuucugugugggagaucuugcacgaccagccucuauaaaggaguguacgaacugcagacacuggagcucaacauggaaacccugaauaugacaaugccucuuuccuguaccaagaacaauucucaucacuauaucauggucggcaacgagacagggcuggagcucacccugacgaauaccagcaucauuaaccauaaauucugcaaucuuuccgacgcgcacaagaaaaaccuguacgaucaugcucucaugucuaucauuagcacauuucaccuguccaucccgaauuucaaccaguaugaagccaugagcugugacuuuaauggaggcaagauuucugugcaguacaaccugucccacagcuaugccggcgaugcugccaaucauugcgggaccaucgcuaacggaguucuccaaacauucaugcggauggccuggggcgggucuuacauugcgcuggacuccggacgcgauagaugggacuguaucaugaccagcuaccaguaucuuaucauucagaacacgacaugggaggaucacugccaguuuucucggcccuccccuaucggcuaccuggggcuccugagccaacgcaccagagacauuuauaucucccggcgccuucugggaacauucaccuggacccucucugauagcgaaggcaaggacacacccggcggguacugucugacgagauggaugcugauugaggccgagcucaaaugcuuuggaaauaccgcuguggccaaguguaacgaaaaacaugaugaggaguucugcgacaugcugcggcuuuuugauuucaauaagcaggcuauccagcgccugaaagccgaagcgcagauguccauccaacucauuaacaaggccgucaaugcucugaucaacgaccagcuuauuaugaagaaucaccugagagacaucaugggcauuccuuauugcaacuacagcaaauauugguaccucaaucacacaaccacagggaagaccucucugcccaaauguuggcugguguccaacggaagcuaccucaaugaaacgcauuucucugaugacaucgagcagcaagccgauaacaugaucacagagaugcugcagaaggaauauauggagcggcagggcaaaaccccucuugggcugguggaccucuuugucuucagcaccuccuuuuaccugauuucuaucuuccugcaccuuguuaagauuccgacacaucgccacguggugggaaaaagcugccccaagccucauagacucaaucacaugggcaucuguuccugcggccuguaugggcagcccggagucccugugaaguggaaacggugaggacuaguaauaaggaaacuguaugaaugucugugggcaggaagugaagagauccuucuguaaagguuuuuggaauuaugucugcugaauaauaaacuuuuuugaaauaauaaaucugguagaaaaaugagaucucaaaggcucuuuucagagccaccaaaaaaaaaaaaaaaaaaaaaaaaaaaaaaaaaaaaaaaaaaaaaaaaaaaaaaaaaaaaaaaaaaaaaaaaaaaaaaaaaaaaaaaaaaaaaaaaaaaaa

SEQ ID NO: 14819 - RNA, 1812 nt, Artificial Sequence
  mRNA product Design b-4 (hSL-A100) comprising derived and/or modified sequence from MOPV/LASV reassortant(IGS-1;Clade IV)__AFY05576__GPC (opt5)
aggagagucccgcagucggcguccagcggcucugcuuguucgugugugugucguugcaggccuuauucaagcuuaccaugggccagaucgugaccuucuuucaagaggucccccacguuauugaagaggugaugaacaucgugcugauugcccucagcguccuggcugugcuuaaggggcuguacaauuucgccacaugcggacucguuggccuggugacguuucuucugcucugugggagauccugcaccacaucucuguauaaaggagucuacgaacugcagacccucgagcugaacauggaaacacuuaauaugaccaugccucugagcuguacaaagaacaauucccaucacuauaucauggugggcaacgagaccgggcucgagcugacgcuuaccaauacaucuauuaucaaccauaaauucugcaaucugagcgacgcgcacaagaaaaaccucuacgaucaugcucugauguccaucauuucuaccuuucaccugagcaucccgaauuucaaccaguaugaagccauguccugugacuuuaauggaggcaagauuagcguucaguacaaccucucucacuccuaugccggcgaugcugccaaucauugcgggacaguggcuaacggaguccugcaaaccuucaugcggauggccuggggcgggagcuacaucgcgcuugacucuggacgcggcaacugggauuguauuaugacguccuaccaguaucugaucauucagaauacaaccugggaggaccacugccaguuuagcagacccucuccuaucggguaccucggacugcuuucccaacggacacgcgauaucuauauuagcagacggcugcucggcaccuucaccuggacacuguccgacucugaaggcgaggauacgcccgggggauacugucugacccgcuggaugcucaucgaggccgaacugaagugcuuuggcaacacagcuguggccaaauguaaugagaagcaugacgaagaguucugcgauaugcuuagacuguuugacuucaacaaacaggcuauucagcggcucaaggccgaagcgcagaugagcauccaacugauuaauaaagccgugaacgcucuuaucaaugaucagcugaucaugaagaaccaccuccgcgacauuauggggaucccuuauugcaauuacuccaaguauugguaccugaaccacaccacaaccggaagaacgagccugcccaaauguuggcucgucucuaauggcuccuaccugaacgagacacauuucagcgacgauauugagcagcaagccgacaauaugaucaccgaaaugcuucagaaggaguauauggaacggcaggggaaaaccccucugggacucguugaucuguuuguguucucuaccagcuuuuaccugauuuccaucuuccuucaccucgugaagaucccgacacaucgccacauugucggcaaaucuugccccaagccucauagacugaaccacaugggcaucuguagcugcgggcuguauaaacagcccggagugccuguuaaguggaagcggugaggacuaguaauaaggaaacuguaugaaugucugugggcaggaagugaagagauccuucuguaaagguuuuuggaauuaugucugcugaauaauaaacuuuuuugaaauaauaaaucugguagaaaaaugagaucucaaaggcucuuuucagagccaccaaaaaaaaaaaaaaaaaaaaaaaaaaaaaaaaaaaaaaaaaaaaaaaaaaaaaaaaaaaaaaaaaaaaaaaaaaaaaaaaaaaaaaaaaaaaaaaaaaaaa

SEQ ID NO: 14820 - RNA, 1812 nt, Artificial Sequence
  mRNA product Design b-4 (hSL-A100) comprising derived and/or modified sequence from LASV(LM765-SLE-2012;Clade IV)__AIT17814__GPC (opt5)
aggagagucccgcagucggcguccagcggcucugcuuguucgugugugugucguugcaggccuuauucaagcuuaccaugggccagaucgugaccuucuuucaagaggucccccacguuauugaagaggugaugaacaucgugcugauugcccucagcauccuggcuguccuuaaggggcuguacaauuucgccacaugcggacucgugggccugguuacguuucuucugcucugugggagauccugcaccacaucucuguauaaaggaguguacgaacugcagacccucgagcugaacauggaaacacuuaauaugaccaugccucugagcuguacaaagaacaauucccaucacuauauuauggucggcaacgagaccgggcucgagcugacgcuuaccaauacaucuaucaucgaccauaaauucugcaaccugagcgaugcgcaccggaagaaucucuacgaccaugcucugauguccauuaucucuaccuuucaccugagcauuccgaacuucaaucaguaugaagccauguccugugauuuuaacggaggcaaaaucagcgugcaguacaaucucucucacuccuaugccaaggacgcugccgaucauugcggcacaguugcuaacggggugcugcaaaccuucaugcgcauggccuggggaggcagcuacauugcgcuugacucugggagaggacggugggauuguaucaugacguccuaccaguaucugauuauccagaauacaaccugggaggaccacugccaguuuagccgccccucuccuaucggcuaccucgggcugcuuucccaaagaacacgggauauuuauaucagccgcagacugcucggaaccuucaccuggacacuguccgacucugaaggcaaggauacgcccggcggguacugucugacccgguggaugcucauugaggccgagcugaaaugcuuuggaaacacagcugucgccaaguguaacgaaaaacaugacgaggaguucugcgauaugcuucgccuguuugacuucaauaagcaggcuauccagagacucaaagccgaagcgcagaugagcauucaacugaucaacaaggccgugaaugcucuuaucaacgaccagcugauuaugaagaaucaccuccgggauaucaugggcauuccuuauugcaacuacuccaaauauugguaccugaaucacaccacaaccgggaagacgagccugcccaaauguuggcucgugucuaacggauccuaccugaaugaaacacauuucagcgacgauaucgagcagcaagccgacaacaugauuaccgagaugcuucagaaggaauauauggagcgccagggcaaaaccccucuggggcucgucgaucuguuuguuuucucuaccagcuuuuaccugaucuccaucuuccuucaccucgugaagauuccgacacauagacacaucgugggaaaacccugcccuaagccccaucggcugaaucacaugggcauuuguucuugcggccuguauaagcagccugggguccccgugaaauggaagcgcugaggacuaguaauaaggaaacuguaugaaugucugugggcaggaagugaagagauccuucuguaaagguuuuuggaauuaugucugcugaauaauaaacuuuuuugaaauaauaaaucugguagaaaaaugagaucucaaaggcucuuuucagagccaccaaaaaaaaaaaaaaaaaaaaaaaaaaaaaaaaaaaaaaaaaaaaaaaaaaaaaaaaaaaaaaaaaaaaaaaaaaaaaaaaaaaaaaaaaaaaaaaaaaaaa

SEQ ID NO: 14821 - RNA, 1812 nt, Artificial Sequence
  mRNA product Design b-4 (hSL-A100) comprising derived and/or modified sequence from LASV(LM776-SLE-2012;Clade IV)__AIT17824__GPC (opt5)
aggagagucccgcagucggcguccagcggcucugcuuguucgugugugugucguugcaggccuuauucaagcuuaccaugggccagaucgugaccuucuuucaagaggucccccacguuauugaagaggugaugaacaucgugcugauugcccucagcauccuggcuguccuuaaggggcuguacaauuucgccacaugcggacucgugggccugguuacguuucuucugcucugugggagauccugcaccacaucuguguauaaaggagucuacgaacugcagacccuggagcucaacauggaaacacugaauaugaccaugccucuuagcuguacaaagaacaauucccaucacuauauuauggugggcaacgagaccgggcuggagcucacgcugaccaauacaucuaucaucaaccauaaauucugcaaucuuagcgacgcgcacaagaaaaaccuguacgaucaugcucucauguccauuaucucuaccuuucaccugagcauuccgaauuucaaccaguaugaagccauguccugugacuuuaauggaggcaagaucagcguucaguacaaccugucucacuccuaugccggcgaugcugccaaucauugcgggacaguggcuaacggaguccuccaaaccuucaugcggauggccuggggcgggagcuacauugcgcuggacucuggacacggcaagugggauuguaucaugacguccuaccaguaucuuauuauccagaacacaaccugggaggaccauugccaguuuagccgccccucuccuaucggguaccugggacuccugucccaaagaacacgggauauuuauaucagccgcagacuucugggcaccuucaccuggacacucuccgacucugaaggcaaagauacgcccgggggauacugucugacccgguggaugcugauugaggccgagcucaagugcuuuggcaauacagcuguggccaaauguaacgaaaagcacgacgaggaguucugcgauaugcugcgccuuuuugacuucaauaaacaggcuauccagagacugaaggccgaagcgcagaugagcauucaacucaucaacaaggccgugaaugcucugaucaacgaucagcuuauuaugaaaaaucaucugcgggacaucauggggauuccuuauugcaacuacuccaaguauugguaccucaaucacaccacaaccggaaaaacgagccugcccaaguguuggcuggucucuaacggcuccuaccucaaugaaacacacuucagcgacgauaucgagcagcaagccgacaacaugauuaccgagaugcugcagaaagaauauauggagcgccaggggaagaccccucuuggacugguugaucucuuuguguucucuaccagcuuuuaccugaucuccaucuuccugcaucuugugaaaauuccgacacacagacauaucgucggcaagucuugccccaagccucaccggcucaaucacaugggcauuuguagcugcgggcuguauaaacagcccggagugccuguucgcuggaagagaugaggacuaguaauaaggaaacuguaugaaugucugugggcaggaagugaagagauccuucuguaaagguuuuuggaauuaugucugcugaauaauaaacuuuuuugaaauaauaaaucugguagaaaaaugagaucucaaaggcucuuuucagagccaccaaaaaaaaaaaaaaaaaaaaaaaaaaaaaaaaaaaaaaaaaaaaaaaaaaaaaaaaaaaaaaaaaaaaaaaaaaaaaaaaaaaaaaaaaaaaaaaaaaaaa

SEQ ID NO: 14822 - RNA, 1812 nt, Artificial Sequence
  mRNA product Design b-4 (hSL-A100) comprising derived and/or modified sequence from LASV(Mad39;Clade IV)__ANH09722__GPC (opt5)
aggagagucccgcagucggcguccagcggcucugcuuguucgugugugugucguugcaggccuuauucaagcuuaccaugggccagaucgugaccuucuuucaagaggucccccacguuauugaagaggugaugaacaucgugcugauugcccucagcauccuggcuguccuuaaggggcuguacaauguggccacaugcggacucauuggccugguuacguuccuucugcucugugggagauccugcaccacaacccuguauaaaggaguguacgaacugcaggcgcucgagcugaacauggaaacacuuaauaugaccaugccucugucuuguacaaagaacaauagccaucacuauauccgggucggcaacgagaccgggcucgagcugacgcuuaccaauacaucccugaucaaccauaaauuuugcaaucucucugacgcucacaagaaaaaccuguacgaucaugcccugaugagcauuaucuccaccuuccaccucucuauuccgaauuuuaaccaguaugaagccaugagcugugacuucaaugauggaaagaucuccgugcaguacaaccugagccacacauaugcuggcgacaccgccaaucauugcggcacgguugcuaacggggugcuucaaacauuuaugcgcauggccuggggaggcucuuacauugcgcuggauuccgggagaggaggcugggacuguaucaugaccagcuaccaguaucucauuauccagaacacaaccugggaggaucacugccaguucucucggcccuccccuaucggguaccugggacuucugagccaacgcaccagagacauuuauaucucucggcgccuccugggcacauuuacguggacccuguccgauagcgaaggcaaggacacacccgggggauacugucucaccagauggaugcugauugaggccgagcuuaaaugcuucggcaauacagcugucgccaaguguaacgaaaaacaugaugaggaauuuugcgacaugcugcgccucuucgauuuuaauaagcaggcuauccagcggcugaaagccgaggcgcagauguccauucaacuuaucaacaaggccgugaaugcucugaucaacgaccagcucauuaugaagaaucaccugagagacaucauggggauuccuuauugcaacuacucuaaauauugguaccugaaucacaccgugacgggaaagacaagccuccccaaauguuggcuggucuccaacggcagcuaccuuaaugaaacccauuucucugaugacaucgagcagcaagccgauaacaugauuaccgagaugcugcagaaggaauauauggagcggcaggggaaaacaccucucggacugguugaccuguucguguuuuccaccagcuucuaccuuaucucuaucuuucuccaccuggugaagauuccgacacaucgccacgucgugggcaaacccugcccuaagccccauagacugaaucacaugggcaucuguagcugcggguucuauaagcagccuggaguucccgugcgguggaaacgcugaggacuaguaauaaggaaacuguaugaaugucugugggcaggaagugaagagauccuucuguaaagguuuuuggaauuaugucugcugaauaauaaacuuuuuugaaauaauaaaucugguagaaaaaugagaucucaaaggcucuuuucagagccaccaaaaaaaaaaaaaaaaaaaaaaaaaaaaaaaaaaaaaaaaaaaaaaaaaaaaaaaaaaaaaaaaaaaaaaaaaaaaaaaaaaaaaaaaaaaaaaaaaaaaa

SEQ ID NO: 14823 - RNA, 1812 nt, Artificial Sequence
  mRNA product Design b-4 (hSL-A100) comprising derived and/or modified sequence from LASV(Z0947-SLE-2011;Clade IV)__AIT17840__GPC (opt5)
aggagagucccgcagucggcguccagcggcucugcuuguucgugugugugucguugcaggccuuauucaagcuuaccaugggccagaucgugaccuucuuucaagaggucccccacguuauugaagaggugaugaacaucgugcugauugcccucagcauccuggcuguccuuaaggggcuguacaauuucgccacaugcggacucgugggccugguuacguuucuucugcucugugggagauccugcaccauuucucuguauaaaggaguguacgaacugcagacacucgagcugaacauggaaacccuuaauaugacaaugccucugagcuguaccaagaacaauucccaucacuauaucauggucggcaacgagacagggcucgagcugacccuuacgaauaccucuaucauuaaccauaaauucugcaaucugagcgacgcgcacaagaaaaaccucuacgaucaugcucugauguccaucauuucuacauuucaccugagcaucccgaauuucaaccaguaugaagccauguccugugacuuuaauggaggcaagauuagcgugcaguacaaccucucucacuccuaugccggcgaugcugccaaucauugcgggaccguugcuaacggagugcugcaaacauucaugcggauggccuggggcgggagcuacaucgcgcuugacucuggacgcgauagaugggacuguauuaugaccuccuaccaguaucugaucauccagaacacgacaugggaggaucacugccaguuuagccggcccucuccuauuggcuaccucgggcugcuuucccaacgcaccagagacaucuauauuagccggcgccugcucggaacauucaccuggacccuguccgauucugaaggcaaggacacacccggcggguacugucugacgagauggaugcucaucgaggccgagcugaaaugcuuuggaaauaccgcugucgccaaguguaacgaaaaacaugaugaggaguucugcgacaugcuucggcuguuugauuucaauaagcaggcuauucagcgccucaaagccgaagcgcagaugagcauccaacugaucaacaaggccgugaaugcucuuauuaacgaccagcugaucaugaagaaucaccucagagacauuaugggcaucccuuauugcaacuacuccaaauauugguaccugaaucacacaaccacagggaagaccagccugcccaaauguuggcucgugucuaacggauccuaccugaaugaaacgcauuucagcgaugacauugagcagcaagccgauaacaugaucacagagaugcuucagaaggaauauauggagcggcagggcaaaaccccucuggggcucgucgaccuguuuguuuucucuaccagcuuuuaccugaucuccauuuuccuucaccucgugaagaucccgacacaucgccacauugugggaaaacccugcccuaagccccauagacugaaucacaugggcaucuguucuugcggccuguauaagcagccugggguccccgugaaauggaagcggugaggacuaguaauaaggaaacuguaugaaugucugugggcaggaagugaagagauccuucuguaaagguuuuuggaauuaugucugcugaauaauaaacuuuuuugaaauaauaaaucugguagaaaaaugagaucucaaaggcucuuuucagagccaccaaaaaaaaaaaaaaaaaaaaaaaaaaaaaaaaaaaaaaaaaaaaaaaaaaaaaaaaaaaaaaaaaaaaaaaaaaaaaaaaaaaaaaaaaaaaaaaaaaaaa

SEQ ID NO: 14824 - RNA, 1788 nt, Artificial Sequence
  mRNA product Design b-4 (A100) comprising derived and/or modified sequence from LASV(Josiah;Clade IV)__NP_694870__GPC (opt1)
aggagagucccgcagucggcguccagcggcucugcuuguucgugugugugucguugcaggccuuauucaagcuuaccaugggccagaucgugaccuucuuccaggaggucccccacgugaucgaggaggugaugaacaucguccugaucgcccucagcgugcuggccgugcugaaggggcucuacaacuucgcgaccugcggccuggucgggcuggugacguuccuccugcugugcggccgcuccugcaccaccagccucuacaaggggguguacgagcugcagacccuggagcucaacauggagacgcugaacaugaccaugccgcuguccugcaccaagaacaacagccaccacuacaucauggucggcaacgagaccggccucgagcugacgcugaccaacaccuccaucaucaaccacaaguucugcaaccucagcgacgcccacaagaagaaccuguacgaccacgcccugauguccaucaucagcaccuuccaccucuccauccccaacuucaaccaguacgaggccaugagcugcgacuucaacgggggcaagaucuccgugcaguacaaccugagccacuccuacgccggggacgcggccaaccacugcggcacgguggccaacgggguccugcagaccuucaugcggauggccuggggcggcagcuacaucgcgcucgacuccgggcgcggcaacugggacugcaucaugaccagcuaccaguaccugaucauccagaacaccacgugggaggaccacugccaguucucccggcccagccccaucggguaccugggccuccugucccagcgcacccgggacaucuacaucagccgccggcugcucggcaccuucaccuggacgcugagcgacuccgaggggaaggacaccccgggcggguacugccugacccgcuggaugcucaucgaggccgagcugaagugcuucggcaacaccgccguggccaagugcaacgagaagcacgacgaggaguucugcgacaugcugcggcuguucgacuucaacaagcaggccauccagcgccugaaggcggaggcccagaugagcauccagcugaucaacaaggccgugaacgcccucaucaacgaccagcugaucaugaagaaccaccuccgggacaucauggggauccccuacugcaacuacuccaaguacugguaccucaaccacacgaccaccggccgcaccagccugcccaagugcuggcuggucuccaacggcagcuaccucaacgagacgcacuucuccgacgacaucgagcagcaggccgacaacaugaucaccgagaugcugcagaaggaguacauggagcggcaggggaagacgccccugggccucguggaccuguucguguucagcaccuccuucuaccugaucagcaucuuccugcaccucgucaagaucccgacccaccgccacaucguggggaaguccugccccaagccccaccggcugaaccacaugggcaucugcagcugcgggcuguacaagcagcccggcgugccggucaaguggaagcgcugaggacuaguaauaaggaaacuguaugaaugucugugggcaggaagugaagagauccuucuguaaagguuuuuggaauuaugucugcugaauaauaaacuuuuuugaaauaauaaaucugguagaaaaaugagaucuaaaaaaaaaaaaaaaaaaaaaaaaaaaaaaaaaaaaaaaaaaaaaaaaaaaaaaaaaaaaaaaaaaaaaaaaaaaaaaaaaaaaaaaaaaaaaaaaaaaa

SEQ ID NO: 14825 - RNA, 1785 nt, Artificial Sequence
  mRNA product Design b-4 (A100) comprising derived and/or modified sequence from LASV(LP;Clade I)__AAF86701__GPC (opt1)
aggagagucccgcagucggcguccagcggcucugcuuguucgugugugugucguugcaggccuuauucaagcuuaccaugggccagaucaucaccuucuuccaggaggugccccacgucaucgaggaggugaugaacaucgugcugaucgcccucagccugcuggccauccucaaggggcuguacaacaucgcgaccugcggcaucaucgggcuggucgccuuccucuuccugugcggcaaguccugcagccugacgcucaagggcggguacgagcugcagacccuggagcucaacauggagacccugaacaugaccaugccgcuguccugcacgaagaacagcucccaccacuacauccgcgugggcaacgagaccgggcucgagcugacccugaccaacacgagcaucaucaaccacaaguucugcaaccucuccgacgcccacaagaagaaccuguacgaccacgcccugaugagcaucaucuccaccuuccaccucagcauccccaacuucaaccaguacgaggccauguccugcgacuucaacggcgggaagaucagcgugcaguacaaccugucccacagcuacgcgggcgacgccgccgagcacugcgggaccgucgccaacggcgugcugcagaccuucaugcggauggcguggggcgggcgcuacaucgcccucgacuccggcaaggggaacugggacugcaucaugacgagcuaccaguaccugaucauccagaacaccaccugggaggaccacugccaguucucccggcccagccccaucggcuaccugggccuccugucccagcgcacccgggacaucuacaucagccgccggcugcucgggacguucaccuggacccugagcgacuccgagggcaacgagacccccgggggcuacugccugacgcgcuggaugcucaucgaggccgagcugaagugcuucgggaacaccgccguggccaagugcaacgagaagcacgacgaggaguucugcgacaugcugcggcuguucgacuucaacaagcaggcgauccgccggcugaaggccgaggcccagaugagcauccagcugaucaacaaggccgucaacgcccucaucaacgaccagcugaucaugaagaaccaccuccgcgacaucaugggcauccccuacugcaacuacuccaaguacugguaccucaaccacaccagcuccggccggaccagccugcccaagugcuggcugaucuccaacgggagcuaccucaacgagacgcaguucuccgacgacaucgagcagcaggcggacaacaugaucaccgagaugcugcagaaggaguacaucgagcgccagggcaagaccccgcuggggcucguggacaucuucaucuucagcaccuccuucuaccugaucagcaucuuccugcaccugaucaagaucccgacgcaccggcacaucgugggcaagcccugccccaagccccaccgccucaaccacaugggggucugcuccugcggccuguacaagcacccgggcgugcccaccaaguggaagcggugaggacuaguaauaaggaaacuguaugaaugucugugggcaggaagugaagagauccuucuguaaagguuuuuggaauuaugucugcugaauaauaaacuuuuuugaaauaauaaaucugguagaaaaaugagaucuaaaaaaaaaaaaaaaaaaaaaaaaaaaaaaaaaaaaaaaaaaaaaaaaaaaaaaaaaaaaaaaaaaaaaaaaaaaaaaaaaaaaaaaaaaaaaaaaaaaa

SEQ ID NO: 14826 - RNA, 1785 nt, Artificial Sequence
  mRNA product Design b-4 (A100) comprising derived and/or modified sequence from LASV(803213;Clade II)__AAF86703__GPC (opt1)
aggagagucccgcagucggcguccagcggcucugcuuguucgugugugugucguugcaggccuuauucaagcuuaccaugggccagaucaucaccuucuuccaggaggugccccacgucaucgaggaggugaugaacaucgugcugaucgcccucagccugcuggccauccucaaggggaucuacaacgucgcgaccugcggccuguucgggcugaucuccuuccuccugcugugcggccgcagcugcuccgugacguacaaggggguguacgagcuccagacccuggagcugaacauggccaaccucaacaugaccaugccgcugagcugcaccaagaacaacucccaccacuacaucauggucggcaacgagacgggccuggagcucacccugaccaacaccagcaucaucaaccacaaguucugcaaccuguccgacgcccacaagaagaaccucuacgaccacgcccugaugagcaucaucuccacguuccaccugagcauccccaacuucaaccaguacgaggccauguccugcgacuucaacgggggcaagaucagcgugcaguacaaccucucccacagcuucgcgguggacgccgccaaccacugcgggaccaucgccaacggcguccugcagaccuucaugcggauggcguggggcggguccuacaucgcccuggacagcggcaaggggaacugggacugcaucaugaccuccuaccaguaccucaucauccagaacacgaccugggaggaccacugccaguucagccgccccucccccaucggcuaccuggggcugcucagccagcggacccgcgacaucuacaucagccggcgccugcugggcaccuucacguggacccucuccgacagcgagggcaacgaggcccccgggggcuacugccugacccgguggaugcugaucgaggccgagcucaagugcuucgggaacaccgccguggcgaagugcaacgagaagcacgacgaggaguucugcgacaugcugcgccuguucgacuucaacaagcaggccaucaagcggcucaagacggaggcccagauguccauccagcugaucaacaaggccgugaacgcccugaucaacgaccagcucaucaugaagaaccaccuccgcgacaucaugggcauccccuacugcaacuacagccgguacugguaccugaaccacaccgucaccgggaagaccucccugccccgcugcuggcuggugagcaacggcuccuaccugaacgagacgcacuucagcgacgacaucgagcagcaggcggacaacaugaucaccgagaugcuccagaaggaguacauggaccggcagggcaagaccccgcuggggcugguggaccucuucgucuucuccaccagcuucuaccugaucuccaucuuccugcaccuggugaagaucccgacgcaccgccacaucgugggcaagcccugccccaagccccaccggcucaaccacauggggaucugcagcugcggccuguacaagcacccggggguccccgugaaguggaagcgcugaggacuaguaauaaggaaacuguaugaaugucugugggcaggaagugaagagauccuucuguaaagguuuuuggaauuaugucugcugaauaauaaacuuuuuugaaauaauaaaucugguagaaaaaugagaucuaaaaaaaaaaaaaaaaaaaaaaaaaaaaaaaaaaaaaaaaaaaaaaaaaaaaaaaaaaaaaaaaaaaaaaaaaaaaaaaaaaaaaaaaaaaaaaaaaaaa

SEQ ID NO: 14827 - RNA, 1785 nt, Artificial Sequence
  mRNA product Design b-4 (A100) comprising derived and/or modified sequence from LASV(GA391;Clade III)__CAA36645__GPC (opt1)
aggagagucccgcagucggcguccagcggcucugcuuguucgugugugugucguugcaggccuuauucaagcuuaccaugggccagaucgugaccuucuuccaggaggucccccacgugaucgaggaggugaugaacaucguccugaucgcccucagcauccuggccauccugaaggggcucuacaacguggcgaccugcggccugaucgggcuggugacguuccuccugcuguccggccgcagcugcucccucaucuacaaggggaccuacgagcugcagacccuggagcucaacauggagacccugaacaugacgaugccgcugagcugcaccaagaacaacucccaccacuacauccgggucggcaacgagaccggccucgagcugacccugacgaacaccagcauccucaaccacaaguucugcaaccuguccgacgcccacaagcgcaaccuguacgaccacagccucauguccaucaucagcaccuuccaccuguccauccccaacuucaaccaguacgaggccaugagcugcgacuucaacgggggcaagaucaccgugcaguacaaccugucccacagcuucgccguggacgccgcggggcacugcggcacgcucgccaacgggguccugcagaccuucaugcggauggccuggggcggcuccuacaucgcccuggacagcgggcgcggcaacugggacugcaucaugaccuccuaccaguaccucaucauccagaacaccacgugggacgaccacugccaguucagccggcccucccccaucggguaccugggccugcucagccagcgcacccgggacaucuacaucagccgccggcugcugggcaccuucaccuggacgcucuccgacagcgaggggaacgagaccccgggcggguacugccugacccgcuggaugcugaucgaggcggagcucaagugcuucggcaacaccgccguggccaagugcaacgagaagcacgacgaggaguucugcgacaugcugcggcuguucgacuucaacaagcaggccauccgccggcucaagacggaggcccagauguccauccagcugaucaacaaggcggugaacgcccugaucaacgaccagcucaucaugaagaaccaccuccgcgacaucauggggauccccuacugcaacuacagccgguacugguaccugaaccacaccuccaccggcaagaccagccugccccgcugcuggcugaucuccaacggcagcuaccugaacgagacgaaguucuccgacgacaucgagcagcaggccgacaacaugaucaccgagaugcuccagaaggaguacaucgaccggcaggggaagacgccccugggccuggucgaccuguucguguucagcaccuccuucuaccucaucagcaucuuccugcaccuggugaagaucccgacccaccgccacaucgucgggaagcccugccccaagccccaccggcucaaccacaugggcaucugcuccugcgggcuguacaagcagccgggcgugcccgugcgcuggaagcggugaggacuaguaauaaggaaacuguaugaaugucugugggcaggaagugaagagauccuucuguaaagguuuuuggaauuaugucugcugaauaauaaacuuuuuugaaauaauaaaucugguagaaaaaugagaucuaaaaaaaaaaaaaaaaaaaaaaaaaaaaaaaaaaaaaaaaaaaaaaaaaaaaaaaaaaaaaaaaaaaaaaaaaaaaaaaaaaaaaaaaaaaaaaaaaaaa

SEQ ID NO: 14828 - RNA, 1788 nt, Artificial Sequence
  mRNA product Design b-4 (A100) comprising derived and/or modified sequence from LASV(AV;Clade V)__CCA30314__GPC (opt1)
aggagagucccgcagucggcguccagcggcucugcuuguucgugugugugucguugcaggccuuauucaagcuuaccaugggccagaucgugaccuucuuccaggaggucccccacgugaucgaggaggugaugaacaucguccugaucgcccucagcauccuggccgugcugaaggggcucuacaacaucgcgaccugcggccugaucgggcugaucacguuccuccugcugugcggccgcuccugcagcuccaaccucuacaaggggguguacgagcugcagagccuggaccucaacauggagacccugaacaugaccaugccgcuguccugcaccaagaacaacagccaccacuacauccgggucggcaacgacacgggccucgagcugacccugaccaacaccuccauccucaaccacaaguucugcaaccugagcgacgcccacaagaaggaccuguacgaccacgcccucauguccaucaucagcacguuccaccuguccauccccaacuucaaccaguacgaggccaugagcugcgacuucaacgggggcaagaucuccgugcaguacaaccugagccacuccuacgccaucgacgcggccaaccacugcgggaccguggccaacggcauccuccagaccuucaugcgcauggccuggggcgggagcuacaucgcgcuggacuccggccgggggaacugggacugcaucaugaccagcuaccaguaccugaucauccagaacacgaccugggagaaccacugccaguucucccgccccagccccaucggcuaccucgggcugcugagccagcggacccgcgacaucuacaucucccggcgccuccugggcaccuucacguggacccugagcgacuccgagggcaacgccacccccgggggcuacugccucacccgguggaugcugaucgaggccgagcugaagugcuucgggaacacggccgucgccaagugcaacgagaagcacgacgaggaguucugcgacaugcuccgccuguucgacuucaacaagcaggcgaucagccggcugaaguccgaggcccagaugagcauccagcucaucaacaaggccgugaacgcccugaucaacgaccagcugaucaugaagaaccaccuccgcgacaucaugggcauccccuacugcaacuacuccaaguacugguaccugaaccacaccaucaccgggaagaccagccugcccaagugcuggcucguguccaacggcagcuaccugaacgagacgcacuucuccgacgacaucgagcagcaggccgacaacaugaucaccgagaugcugcagaaggaguacauggagcggcagggcaagaccccgcucgggcuggucgaccuguucguguucagcaccuccuucuaccugaucagcaucuuccuccgccuggugaagaucccgacgcaccggcacaucgucggcaagcccugccccaagccccaccgccugaaccacauggggaucugcuccugcggccucuacaagcagccgggggugcccgugcgguggaagcgcugaggacuaguaauaaggaaacuguaugaaugucugugggcaggaagugaagagauccuucuguaaagguuuuuggaauuaugucugcugaauaauaaacuuuuuugaaauaauaaaucugguagaaaaaugagaucuaaaaaaaaaaaaaaaaaaaaaaaaaaaaaaaaaaaaaaaaaaaaaaaaaaaaaaaaaaaaaaaaaaaaaaaaaaaaaaaaaaaaaaaaaaaaaaaaaaaa

SEQ ID NO: 14829 - RNA, 1785 nt, Artificial Sequence
  mRNA product Design b-4 (A100) comprising derived and/or modified sequence from LASV(Togo/2016/7082;Clade VI)__AMR44577__GPC (opt1)
aggagagucccgcagucggcguccagcggcucugcuuguucgugugugugucguugcaggccuuauucaagcuuaccaugggccagaucaucaccuucuuccaggaggugccccacgucaucgaggaggugaugaacaucgugcugaucgcccucagccugcuggccauccucaagggggucuacaacguggcgaccugcggcaucaucgggcuggugacguuccuguuccucugcggccgcuccugcagccugaucuacaagggguccuacgagcugcagacccucgagcugaacauggagacccugaacaugaccaugccgcucagcugcacgaagaacuccagccaccacuacauccgggucggcaacgagaccggccuggagcugacccucaccaacacguccaucaucaaccacaaguucugcaaccugagcgacgcccacaagcgcaaccuguacgaccacgcccucauguccauccugagcaccuuccaccuguccauccccaacuucaaccaguacgaggccaugagcugcgacuucaacgggggcaagaucuccgugcaguacaaccucagccacgccuacgcgguggacgccgccgagcacugcgggaccgucgccaacggcgugcugcagaccuucaugcggauggcguggggcggguccuacaucgcccuggacagcggccgcgggaacugggacugcaucaugacguccuaccaguaccucaucauccagaacaccaccugggaggaccacugccaguucagccggcccucccccaucggcuaccuggggcugcucagccagcgcacccgggacaucuacaucagccgccggcugcugggcacguucaccuggacccucuccgacagcgagggcaacgagacccccgggggcuacugccugacgcgcuggaugcugaucgaggccgagcucaagugcuucgggaacaccgccguggccaagugcaacgagaagcacgacgaggaguucugcgacaugcugcggcuguucgacuucaacaagcaggcgauccagcgccucaaguccgaggcccagaugagcauccagcugaucaacaaggccgucaacgcccugaucaacgaccagcucaucaugaagaaccaccuccgggacaugaugggcauccccuacugcaacuacuccaaguacugguaccugaaccacaccagcuccgggcgcaccagccugcccaagugcuggcugguguccaacggcagcuaccugaacgagacgcacuucuccgacgacaucgagcagcaggccgacaacaugaucaccgagaugcuccagaaggaguacaucgaccggcagggcaagaccccgcuggggcugguggaccucuucgucuucagcaccuccuucuaccugaucagcaucuuccugcaccugaucaagaucccgacgcaccgccacaucgugggcaagcccugccccaagccccaccggcucaaccacauggggaucugcuccugcggccuguacaagcagccgggggugcccacccgcuggaagcggugaggacuaguaauaaggaaacuguaugaaugucugugggcaggaagugaagagauccuucuguaaagguuuuuggaauuaugucugcugaauaauaaacuuuuuugaaauaauaaaucugguagaaaaaugagaucuaaaaaaaaaaaaaaaaaaaaaaaaaaaaaaaaaaaaaaaaaaaaaaaaaaaaaaaaaaaaaaaaaaaaaaaaaaaaaaaaaaaaaaaaaaaaaaaaaaaa

SEQ ID NO: 14830 - RNA, 1785 nt, Artificial Sequence
  mRNA product Design b-4 (A100) comprising derived and/or modified sequence from LASV(KAK-428;Clade n.d. (VII))__ANH09740__GPC (opt1)
aggagagucccgcagucggcguccagcggcucugcuuguucgugugugugucguugcaggccuuauucaagcuuaccaugggccagaucgugaccuucuuccaggaggucccccacgugaucgaggaggugaugaacaucguccugaucgcccucagccugcuggccauccucaaggggcuguacaacuucgcgaccugcggcgugaucgggcugaucacguuccuccugcugugcggccgcuccugcagcgccaccuacaaggggcaguacgagcuccagacccuggagcugaacauggagucccucaacaugaccaugccgcugagcugcacgaagaacaacucccaccacuacauccgggccggcaacaacaccggccuggagcucacccugaccaacacgagcaucaucucccacaaguucugcaaccugagcgacgcccacaagaagaaccucuacgaccacacccugauguccaucaucaccaccuuccaccugagcauccccaacuucaaccaguacgaggccauguccugcgacuucaacgggggcaagaucagcauccaguacaaccucucccacagcuacgcgggggacgccgcccagcacugcggcacgguggccaacgggguccugcagaccuucaugcgcauggcguggggcggcuccuaccuggcccucgacagcgggcggcgcggcugggacugcaucaucuccagcuaccaguaccugaucauccagaacaccaccugggacgaccacugccaguucucccggcccagccccaucggguaccugggcuucgugagccagaagacgcgcgacaucuacaucucccggcgccuccugggcaccuucaccuggacccugagcgacuccgaggggcacgacaugccgggcggguacugccucacgcgguggaugcugaucgaggccgaccugaagugcuucggcaacaccgccguggccaagugcaacgagaagcacgacgaggaguucugcgacauguggcgccucuucgacuucaacaagcaggcgauccagcggcugaaggccgaggcccagaugaacauccagcugaucaacaaggccgucaacgcccucaucaacgaccagcugaugaugaagaaccaccuccgcgacaucauggggauccccuacugcaacuacagcaaguucugguaccugaacaacaccaccacgggccggaccucccugccccgcugcuggcugaucagcaacggcuccuaccucaacgagacccacuucagcgacgacaucgagcagcaggcggacaacaugaucaccgagaugcugcagaaggaguacauggaccggcaggggaagacgccccugggccucguggaccuguucguguucuccaccagcuucuaccugaucaccaucuuccuccaccuggucaagaucccgacccaccgccacaucguggggaagcccugccccaagccccaccggcugaaccacaugggcaucugcuccugcgggcuguacaagcagccgggcgugcccguccgcuggaagcggugaggacuaguaauaaggaaacuguaugaaugucugugggcaggaagugaagagauccuucuguaaagguuuuuggaauuaugucugcugaauaauaaacuuuuuugaaauaauaaaucugguagaaaaaugagaucuaaaaaaaaaaaaaaaaaaaaaaaaaaaaaaaaaaaaaaaaaaaaaaaaaaaaaaaaaaaaaaaaaaaaaaaaaaaaaaaaaaaaaaaaaaaaaaaaaaaa

SEQ ID NO: 14831 - RNA, 1785 nt, Artificial Sequence; identical to SEQ ID NO: 14825
  mRNA product Design b-4 (A100) comprising derived and/or modified sequence from LASV(Pinneo-NIG-1969;Clade I)__AIT17836__GPC (opt1)

SEQ ID NO: 14832 - RNA, 1785 nt, Artificial Sequence
  mRNA product Design b-4 (A100) comprising derived and/or modified sequence from LASV(ISTH0009-NIG-2011;Clade II)__AIT17404__GPC (opt1)
aggagagucccgcagucggcguccagcggcucugcuuguucgugugugugucguugcaggccuuauucaagcuuaccaugggccagaucaucaccuucuuccaggaggugccccacgucaucgaggaggugaugaacaucgugcugaucgcccucagccugcuggccauccucaaggggaucuacaacgucgcgaccugcggccuguucgggcugguguccuuccuccugcugugcggccgcagcugcuccacgaccuacaaggggguguacgagcuccagacccuggagcuggacauggccagccucaacaugaccaugccgcuguccugcacgaagaacaacagccaccacuacaucauggucggcaacgagaccggccuggagcucacccugaccaacacguccaucaucaaccacaaguucugcaaccugagcgacgcccacaagaagaaccucuacgaccacgcccugauguccaucaucagcaccuuccaccuguccauccccaacuucaaccaguacgaggccaugagcugcgacuucaacgggggcaagaucuccgugcaguacaaccucagccacgcguacgccguggacgccgccaaccacugcgggaccaucgcgaacggcguccugcagaccuucaugcggauggccuggggcggguccuacaucgcccuggacagcggcaagggguccugggacugcaucaugacgagcuaccaguaccucaucauccagaacaccaccugggaggaccacugccaguucucccgccccagccccaucggcuaccuggggcugcucagccagcggacccgcgacaucuacaucucccggcgccugcugggcacguucaccuggacccucagcgacuccgagggcaacgagacccccgggggcuacugccugacgcgguggaugcugaucgaggccgagcucaagugcuucgggaacaccgccguggcgaagugcaacgagaagcacgacgaggaguucugcgacaugcugcgccuguucgacuucaacaagcaggccauccggcgccucaagaccgaggcccagaugagcauccagcugaucaacaaggccgugaacgcccugaucaacgaccagcucaucaugaagaaccaccuccgggacaucaugggcaucccguacugcaacuacuccaaguacugguaccugaaccacaccgucacggggaagaccagccugccccgcugcuggcugguguccaacggcagcuaccugaacgagacccacuucuccgacgacaucgagcagcaggcggacaacaugaucaccgagcuccugcagaaggaguacauggaccggcagggcaagacgccccuggggcucguggaccuguucgucuucagcaccuccuucuaccugaucagcaucuuccugcaccucaucaagaucccgacccaccgccacaucaccggcaagcccugccccaagccccaccggcugaaccacauggggaucugcuccugcggccuguacaagcacccgggggugcccgugaaguggaagcgcugaggacuaguaauaaggaaacuguaugaaugucugugggcaggaagugaagagauccuucuguaaagguuuuuggaauuaugucugcugaauaauaaacuuuuuugaaauaauaaaucugguagaaaaaugagaucuaaaaaaaaaaaaaaaaaaaaaaaaaaaaaaaaaaaaaaaaaaaaaaaaaaaaaaaaaaaaaaaaaaaaaaaaaaaaaaaaaaaaaaaaaaaaaaaaaaaa

SEQ ID NO: 14833 - RNA, 1785 nt, Artificial Sequence
  mRNA product Design b-4 (A100) comprising derived and/or modified sequence from LASV(ISTH2010-NIG-2012;Clade II)__AIT17482__GPC (opt1)
aggagagucccgcagucggcguccagcggcucugcuuguucgugugugugucguugcaggccuuauucaagcuuaccaugggccagaucaucaccuucuuccaggaggugccccacgucaucgaggaggugaugaacaucgugcugaucgcccucagccugcuggccauccucaaggggaucuacaacgucgcgaccugcggccuguucgggcugguguccuuccuccugcugugcggccgcagcugcuccacgaccuacaaggggguguacgagcuccagacccuggagcuggacauggccagccucaacaugaccaugccgcuguccugcacgaagaacaacagccaccacuacaucauggucggcaacgagaccggccuggagcucacccugaccaacacguccaucaucaaccacaaguucugcaaccugagcgacgcccacaagaagaaccucuacgaccacgcccugauguccaucaucagcaccuuccaccuguccauccccaacuucaaccaguacgaggccaugagcugcgacuucaacgggggcaagaucuccgugcaguacaaccucagccacgcguacgccguggacgccgccaaccacugcgggaccaucgcgaacggcguccugcagaccuucaugcggauggccuggggcggguccuacaucgcccuggacagcggcaagggguccugggacugcaucaugacgagcuaccaguaccucaucauccagaacaucaccugggaggaccacugccaguucucccgccccagccccaucggcuaccuggggcugcucagccagcggacccgcgacaucuacaucucccggcgccugcugggcaccuucacguggacccucagcgacuccgagggcaacgagacccccgggggcuacugccugacccgguggaugcugaucgaggccgagcucaagugcuucgggaacacggccguggcgaagugcaacgagaagcacgacgaggaguucugcgacaugcugcgccuguucgacuucaacaagcaggccauccggcgccucaagaccgaggcccagaugagcauccagcugaucaacaaggccgugaacgcccugaucaacgaccagcucaucaugaagaaccaccuccgggacaucaugggcauccccuacugcaacuacuccaaguacugguaccugaaccacaccgucaccgggaagacgagccugccccgcugcuggcugguguccaacggcagcuaccugaacgagacccacuucuccgacgacaucgagcagcaggcggacaacaugaucaccgagcuccugcagaaggaguacaucgaccggcagggcaagaccccgcuggggcucguggaccuguucgucuucagcacguccuucuaccugaucagcaucuuccugcaccucgugaagaucccgacccaccgccacguggucggcaagcccugccccaagccccaccggcugaaccacauggggaucugcuccugcggccuguacaagcacccgggggugcccgugaaguggaagcgcugaggacuaguaauaaggaaacuguaugaaugucugugggcaggaagugaagagauccuucuguaaagguuuuuggaauuaugucugcugaauaauaaacuuuuuugaaauaauaaaucugguagaaaaaugagaucuaaaaaaaaaaaaaaaaaaaaaaaaaaaaaaaaaaaaaaaaaaaaaaaaaaaaaaaaaaaaaaaaaaaaaaaaaaaaaaaaaaaaaaaaaaaaaaaaaaaa

SEQ ID NO: 14834 - RNA, 1785 nt, Artificial Sequence
  mRNA product Design b-4 (A100) comprising derived and/or modified sequence from LASV(Lassa virus/H.sapiens-wt/NGA/2015/ISTH_0543;Clade II)__AVO03639__GPC (opt1)
aggagagucccgcagucggcguccagcggcucugcuuguucgugugugugucguugcaggccuuauucaagcuuaccaugggccagaucaucaccuucuuccaggaggugccccacgucaucgaggaggugaugaacaucgugcugaucgcccucagccugcuggccauccucaaggggaucuacaacgucgcgaccugcggccuguucgggcugguguccuuccuccugcugugcggccgcagcugcuccacgaccuacaaggggguguacgagcuccagacccuggagcuggacauggccaaccucaacaugaccaugccgcugagcugcacgaagaacaacucccaccacuacaucauggucggcaacgagaccggccuggagcucacccugaccaacacgagcaucaucaaccacaaguucugcaaccuguccgacgcccacaagaagaaccucuacgaccacgcccugaugagcaucaucuccaccuuccaccugagcauccccaacuucaaccaguacgaggccauguccugcgacuucaacgggggcaagaucagcgugcaguacaaccucucccacaccuacgcgguggacgccgccaaccacugcgggaccaucgccaacggcguccugcagacguucaugcggauggcguggggcgggagcuacaucgcccuggacuccggcaaggggagcugggacugcaucaugaccuccuaccaguaccucgugauccagaacaccaccugggaggaccacugccaguucagccgccccucccccaucggcuaccuggggcugcucagccagcggacgcgcgacaucuacaucagccggcgccugcugggcaccuucaccuggacccucuccgacagcgagggcaacgagacgcccgggggcuacugccugacccgguggaugcugaucgaggccgagcucaagugcuucgggaacaccgccguggccaagugcaacgagaagcacgacgaggaguucugcgacaugcugcgccuguucgacuucaacaagcaggcgauccggcgccucaagaccgaggcccagauguccauccagcugaucaacaaggccgucaacgcccugaucaacgaccagcucaucaugaagaaccaccuccgggacaucaugggcauccccuacugcaacuacagcaaguacugguaccugaaccacacggugaccgggaagaccucccugccccgcugcuggcuggugagcaacggcuccuaccugaacgagacccacuucagcgacgacaucgagcagcaggccgacaacaugaucacggagcuccugcagaaggaguacaucgaccggcagggcaagaccccgcuggggcucgucgaccuguucguguucuccaccagcuucuaccugaucuccaucuuccugcaccucgugaagaucccgacccaccgccacaucacgggcaagcccugccccaagccccaccggcugaaccacauggggaucugcagcugcggccuguacaagcacccggggguccccgugaaguggaagcgcugaggacuaguaauaaggaaacuguaugaaugucugugggcaggaagugaagagauccuucuguaaagguuuuuggaauuaugucugcugaauaauaaacuuuuuugaaauaauaaaucugguagaaaaaugagaucuaaaaaaaaaaaaaaaaaaaaaaaaaaaaaaaaaaaaaaaaaaaaaaaaaaaaaaaaaaaaaaaaaaaaaaaaaaaaaaaaaaaaaaaaaaaaaaaaaaaa

SEQ ID NO: 14835 - RNA, 1785 nt, Artificial Sequence
  mRNA product Design b-4 (A100) comprising derived and/or modified sequence from LASV(Lassa virus/H.sapiens-wt/NGA/2016/ISTH_0009;Clade II)__AVO03571__GPC (opt1)
aggagagucccgcagucggcguccagcggcucugcuuguucgugugugugucguugcaggccuuauucaagcuuaccaugggccagaucaucaccuucuuccaggaggugccccacgucaucgaggaggugaugaacaucgugcugaucgcccucagccugcuggccauccucaaggggaucuacaacgucgcgaccugcggccugcuggggcucguguccuuccugcugcucugcggccgcagcugcuccacgaccuacaaggggguguacgagcugcagacccuggagcucgacauggccagccugaacaugaccaugccgcuguccugcacgaagaacaacagccaccacuacaucauggucggcaacgagaccggccucgagcugacccugaccaacacguccaucaucaaccacaaguucugcaaccucagcgacgcccacaagaagaaccuguacgaccacgcccugauguccaucaucagcaccuuccaccucuccauccccaacuucaaccaguacgaggccaugagcugcgacuucaacgggggccggaucuccgugcaguacaaccugagccacuccuacgcgguggacgccgccaaccacugcgggaccaucgccaacggcguccugcagaccuucaugcgcauggcguggggcgggagcuacaucgcccucgacuccggcaaggggagcugggacugcaucaugacguccuaccaguaccugaucauccagaacaccaccugggaggaccacugccaguucagccggcccagccccaucggcuaccuggggcuccugucccagcgcacccgggacaucuacaucagccgccggcugcucggcacguucaccuggacccuguccgacagcgagggcaacgagacccccgggggcuacugccugacgcgcuggaugcucaucgaggccgagcugaagugcuucgggaacaccgccguggccaagugcaacgagaagcacgacgaggaguucugcgacaugcugcggcuguucgacuucaacaagcaggcgauccgccggcugaagaccgaggcccagauguccauccagcugaucaacaaggccgugaacgcccucaucaacgaccagcugaucaugaagaaccaccuccgcgacaucaugggcaucccguacugcaacuacagcaaguacugguaccucaaccacaccgucacggggaagaccucccugccccggugcuggcuggugagcaacggcuccuaccucaacgagacccacuucagcgacgacaucgagcagcaggccgacaacaugaucaccgagcugcugcagaaggaguacaucgaccgccagggcaagacgccccucgggcugguggaccuguucgucuucuccaccagcuucuaccugaucuccaucuuccuccaccuggugaagaucccgacccaccggcacaucaccggcaagcccugccccaagccccaccgccugaaccacauggggaucugcagcugcggccucuacaaccacccgggggugcccgucaaguggaagcggugaggacuaguaauaaggaaacuguaugaaugucugugggcaggaagugaagagauccuucuguaaagguuuuuggaauuaugucugcugaauaauaaacuuuuuugaaauaauaaaucugguagaaaaaugagaucuaaaaaaaaaaaaaaaaaaaaaaaaaaaaaaaaaaaaaaaaaaaaaaaaaaaaaaaaaaaaaaaaaaaaaaaaaaaaaaaaaaaaaaaaaaaaaaaaaaaa

SEQ ID NO: 14836 - RNA, 1785 nt, Artificial Sequence
  mRNA product Design b-4 (A100) comprising derived and/or modified sequence from LASV(Lassa virus/H.sapiens-wt/NGA/2016/ISTH_0017;Clade II)__AVO03567__GPC (opt1)
aggagagucccgcagucggcguccagcggcucugcuuguucgugugugugucguugcaggccuuauucaagcuuaccaugggccagaucaucaccuucuuccaggaggugccccacgucaucgaggaggugaugaacaucgugcugaucgcccucagccugcuggccauccucaaggggaucuacaacgucgcgaccugcggccuguucgggcugguguccuuccuccugcugugcggccgcagcugcuccacgaccuacaaggggguguacgagcuccagacccuggagcuggacauggccagccucaacaugaccaugccgcuguccugcacgaagaacaacagccaccacuacaucauggucggcaacgagaccggccuggagcucacccugaccaacacguccaucaucaaccacaaguucugcaaccugagcgacgcccacaagaagaaccucuacgaccacgcccugauguccaucaucagcaccuuccaccuguccauccccaacuucaaccaguacgaggccaugagcugcgacuucaacgggggcaagaucuccgugcaguacaaccucagccacaccuacgcgaucgacgccgccaaccacugcgggaccaucgccaacggcgugcugcagacguucaugcggauggcguggggcggguccuacaucgcccuggacagcggcaagggguccugggacugcaucaugaccagcuaccaguaccucaucauccagaacaccaccugggaggaccacugccaguucucccgccccagccccaucggcuaccuggggcugcucagccagcggacgcgcgacaucuacaucucccggcgccugcugggcaccuucaccuggacccucagcgacuccgagggcaacgagacgcccgggggcuacugccugacccgguggaugcugaucgaggccgagcucaagugcuucgggaacaccgccgucgccaagugcaacgagaagcacgacgaggaguucugcgacaugcugcgccuguucgacuucaacaagcaggcgauccggcgccucaagaccgaggcccagaugagcauccagcugaucaacaaggccgugaacgcccugaucaacgaccagcucaucaugaagaaccaccuccgggacaucaugggcauccccuacugcaacuacuccaaguacugguaccugaaccacacggugaccgggaagaccagccugccccgcugcuggcuggucuccaacggcagcuaccugaacgagacccacuucuccgacgacaucgagcagcaggccgacaacaugaucacggagcuccugcagaaggaguacauggaccggcagggcaagaccccgcuggggcucguggaccuguucguguucagcaccuccuucuaccugaucagcaucuuccugcaccucguccgcaucccgacccaccggcacgugaucggcaagcccugccccaagccccaccgccugaaccacauggggaucugcuccugcggccuguacaagcacccgggggugcccgucaaguggaagcggugaggacuaguaauaaggaaacuguaugaaugucugugggcaggaagugaagagauccuucuguaaagguuuuuggaauuaugucugcugaauaauaaacuuuuuugaaauaauaaaucugguagaaaaaugagaucuaaaaaaaaaaaaaaaaaaaaaaaaaaaaaaaaaaaaaaaaaaaaaaaaaaaaaaaaaaaaaaaaaaaaaaaaaaaaaaaaaaaaaaaaaaaaaaaaaaaa

SEQ ID NO: 14837 - RNA, 1785 nt, Artificial Sequence
  mRNA product Design b-4 (A100) comprising derived and/or modified sequence from LASV(Lassa virus/H.sapiens-wt/NGA/2018/ISTH_0959;Clade II)__AVV65099__GPC (opt1)
aggagagucccgcagucggcguccagcggcucugcuuguucgugugugugucguugcaggccuuauucaagcuuaccaugggccagaucaucaccuucuuccaggaggugccccacgucaucgaggaggugaugaacaucgugcugaucgcccucagccugcuggccauccucaaggggaucuacaacgucgugaccugcggccuguucgggcugguguccuuccuccugcugugcggccgcagcugcuccacgaccuacaagggggucuacgagcuccagacccuggagcuggacauggcgagccucaacaugaccaugccgcuguccugcacgaagaacaacagccaccacuacaucauggugggcaacgagaccggccuggagcucacccugaccaacacguccaucaucaaccacaaguucugcaaccugagcgacgcccacaagaagaaccucuacgaccacgcccugauguccaucaucagcaccuuccaccuguccauccccaacuucaaccaguacgaggccaugagcugcgacuucaacgggggcaagaucuccgugcaguacaaccucagccacgccuacgcgaucgacgccgccaaccacugcgggaccaucgccaacggcguccugcagaccuucaugcggauggcguggggcggguccuacaucgcccuggacagcggcaagggguccugggacugcaucaugacgagcuaccaguaccucaucauccagaacaccaccugggaggaccacugccaguucucccgccccagccccaucggcuaccuggggcugcucagccagcggacccgcgacaucuacaucucccggcgccugcugggcacguucaccuggacccucagcgacuccgagggcaacgagacccccgggggcuacugccugacgcgguggaugcugaucgaggccgagcucaagugcuucgggaacaccgccguggccaagugcaacgagaagcacgacgaggaguucugcgacaugcugcgccuguucgacuucaacaagcaggcgauccggcgccucaagaccgaggcccagaugagcauccagcugaucaacaaggccgugaacgcccugaucaacgaccagcucaucaugaagaaccaccuccgggacaucaugggcaucccguacugcaacuacuccaaguacugguaccugaaccacaccgucacggggaagaccagccugccccgcugcuggcugguguccaacggcagcuaccugaacgagacccacuucuccgacgacaucgagcagcaggccgacaacaugaucaccgagcuccugcagaaggaguacaucgaccggcagggcaagacgccccuggggcucguggaccuguucgucuucagcaccuccuucuaccugaucagcaucuuccugcaccucgugaagaucccgacccaccgccacgugaucggcaagcccugccccaagccccaccggcugaaccacauggggaucugcuccugcggccuguacaagcacccggggguccccgugaaguggaagcgcugaggacuaguaauaaggaaacuguaugaaugucugugggcaggaagugaagagauccuucuguaaagguuuuuggaauuaugucugcugaauaauaaacuuuuuugaaauaauaaaucugguagaaaaaugagaucuaaaaaaaaaaaaaaaaaaaaaaaaaaaaaaaaaaaaaaaaaaaaaaaaaaaaaaaaaaaaaaaaaaaaaaaaaaaaaaaaaaaaaaaaaaaaaaaaaaaa

SEQ ID NO: 14838 - RNA, 1785 nt, Artificial Sequence
  mRNA product Design b-4 (A100) comprising derived and/or modified sequence from LASV(LASV003-NIG-2008;Clade II)__AIT17580__GPC (opt1)
aggagagucccgcagucggcguccagcggcucugcuuguucgugugugugucguugcaggccuuauucaagcuuaccaugggccagaucaucaccuucuuccaggaggugccccacgucaucgaggaggugaugaacaucgugcugaucgcccucagccugcuggccauccucaaggggaucuacaacgucgcgaccugcggccuguucgggcugguguccuuccuccugcugugcggccgcagcugcuccacgaccuacaaggggguguacgagcuccagacccuggagcuggacauggccagccucaacaugaccaugccgcuguccugcacgaagaacaacagccaccacuacaucauggucggcaacgagaccggccuggagcucacccugaccaacacguccaucaucaaccacaaguucugcaaccugagcgacgcccacaagaagaaccucuacgaccacgcccugauguccaucaucagcaccuuccaccuguccauccccaacuucaaccaguacgaggccaugagcugcgacuucaacgggggcaagaucuccgugcaguacaaccucagccacaccuacgcgguggacgccgccaaccacugcgggaccaucgccaacggcguccugcagacguucaugcggauggcguggggcggguccuacaucgcccuggacagcggcaagggguccugggacugcaucaugaccagcuaccaguaccucaucauccagaacaccaccugggaggaccacugccaguucucccgccccagccccaucggcuaccuggggcugcucagccagcggacgcgcgacaucuacaucucccggcgccugcugggcaccuucaccuggacccucagcgacuccgagagcaacgagacgccgggcggguacugccugacccgguggaugcugaucgaggccgagcucaagugcuucggcaacaccgccguggccaagugcaacgagaagcacgacgaggaguucugcgacaugcugcgccuguucgacuucaacaagcaggcgauccggcgccucaaggccgaggcccagauguccauccagcugaucaacaaggccgugaacgcccugaucaacgaccagcucaucaugaagaaccaccuccgggacaucauggggauccccuacugcaacuacagcaaguacugguaccugaaccacaccgucacgggccgcaccucccugccccggugcuggcuggugagcaacggguccuaccugaacgagacccacuucagcgacgacaucgagcagcaggcggacaacaugaucaccgagcuccugcagaaggaguacauggaccgccagggcaagacgccccugggccucguggaccuguucgucuucuccaccagcuucuaccugaucuccaucuuccugcaccucgugaagaucccgacccaccggcacgugaucgggaagcccugccccaagccccaccgccugaaccacaugggcaucugcagcugcgggcuguacaagcacccgggcguccccgugaaguggaagcggugaggacuaguaauaaggaaacuguaugaaugucugugggcaggaagugaagagauccuucuguaaagguuuuuggaauuaugucugcugaauaauaaacuuuuuugaaauaauaaaucugguagaaaaaugagaucuaaaaaaaaaaaaaaaaaaaaaaaaaaaaaaaaaaaaaaaaaaaaaaaaaaaaaaaaaaaaaaaaaaaaaaaaaaaaaaaaaaaaaaaaaaaaaaaaaaaa

SEQ ID NO: 14839 - RNA, 1785 nt, Artificial Sequence
  mRNA product Design b-4 (A100) comprising derived and/or modified sequence from LASV(LASV035-NIG-2009;Clade II)__AIT17588__GPC (opt1)
aggagagucccgcagucggcguccagcggcucugcuuguucgugugugugucguugcaggccuuauucaagcuuaccaugggccagaucaucaccuucuuccaggaggugccccacgucaucgaggaggugaugaacaucgugcugaucgcccucagccugcuggccauccucaaggggaucuacaacgucgcgaccugcggccuguucgggcugguguccuuccuccugcugugcggccgcagcugcuccacgaccuacaaggggguguacgagcuccagacccuggagcuggacauggccagccucaacaugaccaugccgcuguccugcacgaagaacaacagccaccacuacaucauggucggcaacgagaccggccuggagcucacccugaccaacacguccaucaucaaccacaaguucugcaaccugagcgacgcccacaagaagaaccucuacgaccacgcccugauguccaucaucagcaccuuccaccuguccauccccaacuucaaccaguacgaggccaugagcugcgacuucaacgggggcaagaucuccgugcaguacaaccucagccacgcguacgccguggacgccgccaaccacugcgggaccaucgcgaacggcguccugcagaccuucaugcggauggccuggggcggguccuacaucgcccuggacagcggcaagggguccugggacugcaucaugacgagcuaccaguaccucaucauccagaacaccaccugggaggaccacugccaguucucccgccccagccccaucggcuaccuggggcugcucagccagcggacccgcgacaucuacaucucccggcgccugcugggcacguucaccuggacccucagcgacuccgagggcaacgagacccccgggggcuacugccugacgcgguggaugcugaucgaggccgagcucaagugcuucgggaacaccgccguggcgaagugcaacgagaagcacgacgaggaguucugcgacaugcugcgccuguucgacuucaacaagcaggccauccggcgccucaaggccgaggcccagaugagcauccagcugaucaacaaggccgugaacgcgcugaucaacgaccagcucaucaugaagaaccaccuccgggacaucaugggcauccccuacugcaacuacuccaaguacugguaccugaaccacaccgucaccgggaagacgagccugccccgcugcuggcugguguccaacggcagcuaccugaacgagacccacuucuccgacgacaucgagcagcaggccgacaacaugaucaccgagcuccugcagaaggaguacaucgaccggcagggcaagaccccgcuggggcucguggaccuguucgucuucagcacguccuucuaccugaucagcaucuuccugcaccucgugaagaucccgacccaccgccacgugaucggcaagcccugccccaagccccaccggcugaaccacauggggaucugcuccugcggccuguacaagcacccggggguccccgugaaguggaagcgcugaggacuaguaauaaggaaacuguaugaaugucugugggcaggaagugaagagauccuucuguaaagguuuuuggaauuaugucugcugaauaauaaacuuuuuugaaauaauaaaucugguagaaaaaugagaucuaaaaaaaaaaaaaaaaaaaaaaaaaaaaaaaaaaaaaaaaaaaaaaaaaaaaaaaaaaaaaaaaaaaaaaaaaaaaaaaaaaaaaaaaaaaaaaaaaaaa

SEQ ID NO: 14840 - RNA, 1785 nt, Artificial Sequence
  mRNA product Design b-4 (A100) comprising derived and/or modified sequence from LASV(LASV1000-NIG-2009;Clade II)__AIT17782__GPC (opt1)
aggagagucccgcagucggcguccagcggcucugcuuguucgugugugugucguugcaggccuuauucaagcuuaccaugggccagaucaucaccuucuuccaggaggugccccacgucaucgaggaggugaugaacaucgugcugaucgcccucagccugcuggccauccucaaggggaucuacaacgucgcgaccugcggccuguucgggcugguguccuuccuccugcugugcggccgcagcugcuccacgaccuacaaggggguguacgagcuccagacccuggagcuggacauggccagccucaacaugaccaugccgcuguccugcacgaagaacaacagccaccacuacaucauggucggcaacgagaccggccuggagcucacccugaccaacacguccaucaucaaccacaaguucugcaaccugagcgacgcccacaagaagaaccucuacgaccacgcccugauguccaucaucagcaccuuccaccuguccauccccaacuucaaccaguacgaggccaugagcugcgacuucaacgggggcaagaucuccgugcaguacaaccucagccacaccuacgcgguggacgccgccaaccacugcgggaccaucgccaacggcguccugcagacguucaugcggauggcguggggcggguccuacaucgcccuggacagcggcaagggguccugggacugcaucaugaccagcuaccaguaccucaucauccagaacaccaccugggaggaccacugccaguucucccgccccagccccaucggcuaccuggggcugcucagccagcggacgcgcgacaucuacaucucccggcgccugcugggcaccuucaccuggacccucagcgacuccgagggcaacgagacgcccgggggcuacugccugacccgguggaugcugaucgaggccgagcucaagugcuucgggaacaccgccguggccaagugcaacgagaagcacgacgaggaguucugcgacaugcugcgccuguucgacuucaacaagcaggcgaucaagcggcucaagaccgaggcccagaugagcauccagcugaucaacaaggccgugaacgcccugaucaacgaccagcucaucaugaagaaccaccuccgcgacaucaugggcauccccuacugcaacuacuccaaguacugguaccugaaccacacggucaccgggaagaccagccugccccggugcuggcugguguccaacggcagcuaccugaacgagacccacuucuccgacgacaucgagcagcaggccgacaacaugaucacggagcuccugcagaaggaguacaucgaccgccagggcaagaccccgcuggggcucguggaccuguucgucuucagcaccuccuucuaccugaucagcaucuuccugcaccucgugaagaucccgacccaccggcacguggucggcaagcccugccccaagccccaccgccugaaccacauggggaucugcuccugcggccuguacaagcacccgggggugcccgugaaguggaagcggugaggacuaguaauaaggaaacuguaugaaugucugugggcaggaagugaagagauccuucuguaaagguuuuuggaauuaugucugcugaauaauaaacuuuuuugaaauaauaaaucugguagaaaaaugagaucuaaaaaaaaaaaaaaaaaaaaaaaaaaaaaaaaaaaaaaaaaaaaaaaaaaaaaaaaaaaaaaaaaaaaaaaaaaaaaaaaaaaaaaaaaaaaaaaaaaaa

SEQ ID NO: 14841 - RNA, 1785 nt, Artificial Sequence
  mRNA product Design b-4 (A100) comprising derived and/or modified sequence from LASV(LASV221-NIG-2010;Clade II)__AIT17624__GPC (opt1)
aggagagucccgcagucggcguccagcggcucugcuuguucgugugugugucguugcaggccuuauucaagcuuaccaugggccagaucaucaccuucuuccaggaggugccccacgucaucgaggaggugaugaacaucgugcugaucgcccucagccugcuggccauccucaaggggaucuacaacgucgcgaccugcggccuguucgggcugguguccuuccuccugcugugcggccgcagcugcuccacgaccuacaaggggguguacgagcuccagacccuggagcuggacauggccagccucaacaugaccaugccgcuguccugcacgaagaacaacagccaccacuacaucauggucggcaacgagaccggccuggagcucacccugaccaacacguccaucaucaaccacaaguucugcaaccugagcgacgcccacaagaagaaccucuacgaccacgcccugauguccaucaucagcaccuuccaccuguccauccccaacuucaaccaguacgaggccaugagcugcgacuucaacgggggcaagaucuccgugcaguacaaccucagccacaccuacgcgaucgacgccgccaaccacugcgggaccaucgccaacggcgugcugcagacguucaugcggauggcguggggcggguccuacaucgcccuggacagcggcaagggguccugggacugcaucaugaccagcuaccaguaccucaucauccagaacaccaccugggaggaccacugccaguucucccgccccagccccaucggcuaccuggggcugcucagccagcggacgcgcgacaucuacaucucccggcgccugcugggcaccuucaccuggacccucagcgacuccgagggcaacgagacgcccgggggcuacugccugacccgguggaugcugaucgaggccgagcucaagugcuucgggaacaccgccgucgccaagugcaacgagaagcacgacgaggaguucugcgacaugcugcgccuguucgacuucaacaagcaggcgauccggcgccucaagaccgaggcccagaugagcauccagcugaucaacaaggccgugaacgcccugaucaacgaccagcucaucaugaagaaccaccuccgggacaucaugggcauccccuacugcaacuacuccaaguacugguaccugaaccacacggugaccgggaagaccagccugccccgcugcuggcuggucuccaacggcagcuaccugaacgagacccacuucuccgacgacaucgagcagcaggccgacaacaugaucacggagaugcuccagaaggaguacauggaccggcagggcaagaccccgcuggggcugguggaccucuucguguucagcaccuccuucuaccugaucagcaucuuccugcaccuggucaagaucccgacccaccgccacgugaucggcaagcccugccccaagccccaccggcucaaccacauggggaucugcuccugcggccuguacaagcacccgggggugcccgucaaguggaagcgcugaggacuaguaauaaggaaacuguaugaaugucugugggcaggaagugaagagauccuucuguaaagguuuuuggaauuaugucugcugaauaauaaacuuuuuugaaauaauaaaucugguagaaaaaugagaucuaaaaaaaaaaaaaaaaaaaaaaaaaaaaaaaaaaaaaaaaaaaaaaaaaaaaaaaaaaaaaaaaaaaaaaaaaaaaaaaaaaaaaaaaaaaaaaaaaaaa

SEQ ID NO: 14842 - RNA, 1785 nt, Artificial Sequence
  mRNA product Design b-4 (A100) comprising derived and/or modified sequence from LASV(LASV237-NIG-2010;Clade II)__AIT17638__GPC (opt1)
aggagagucccgcagucggcguccagcggcucugcuuguucgugugugugucguugcaggccuuauucaagcuuaccaugggccagaucaucaccuucuuccaggaggugccccacgucaucgaggaggugaugaacaucgugcugaucgcccucagccugcuggccauccucaaggggaucuacaacgucgcgaccugcggccuguucgggcugguguccuuccuccugcugugcggccgcagcugcuccacgaccuacaaggggguguacgagcuccagacccuggagcuggacauggccagccucaacaugaccaugccgcuguccugcacgaagaacaacagccaccacuacaucauggucggcaacgagaccggccuggagcucacccugaccaacacguccaucaucaaccacaaguucugcaaccugagcgacgcccacaagaaggaccucuacgaccacgcccugauguccaucaucagcaccuuccaccuguccauccccaacuucaaccaguacgaggccaugagcugcgacuucaacgggggcaagaucuccgugcaguacaaccucagccacaccuacgcgguggacgccgccaaccacugcgggaccaucgccaacggcguccugcagacguucaugcggauggcguggggcggguccuacaucgcccuggacagcggcaagggguccugggacugcaucaugaccagcuaccaguaccucaucauccagaacaccaccugggaggaccacugccaguucucccgccccagccccaucggcuaccuggggcugcucagccagcggacgcgcgacaucuacaucucccggcgccugcugggcaccuucaccuggacccucagcgacuccgagggcaacgagacgcccgggggcuacugccugacccgguggaugcugaucgaggccgagcucaagugcuucgggaacaccgccguggccaagugcaacgagaagcacgacgaggaguucugcgacaugcugcgccuguucgacuucaacaagcaggcgauccggcgccucaagaccgaggcccagaugagcauccagcugaucaacaaggccgugaacgcccugaucaacgaccagcucaucaugaagaaccaccuccgggacaucaugggcauccccuacugcaacuacuccaaguacugguaccugaaccacacggucaccgggaagaccagccugccccgcugcuggcugguguccaacggcagcuaccugaacgagacccacuucuccgacgacaucgagcagcaggccgacaacaugaucacggagcuccugcagaaggaguacauggaccggcagggcaagaccccgcuggggcucguggaccuguucgucuucagcaccuccuucuaccugaucagcaucuuccugcaccucaucaagaucccgacccaccgccacaucacgggcaagcccugccccaagccccaccggcugaaccacauggggaucugcuccugcggccuguacaagcacccgggggugcccgugaaguggaagcgcugaggacuaguaauaaggaaacuguaugaaugucugugggcaggaagugaagagauccuucuguaaagguuuuuggaauuaugucugcugaauaauaaacuuuuuugaaauaauaaaucugguagaaaaaugagaucuaaaaaaaaaaaaaaaaaaaaaaaaaaaaaaaaaaaaaaaaaaaaaaaaaaaaaaaaaaaaaaaaaaaaaaaaaaaaaaaaaaaaaaaaaaaaaaaaaaaa

SEQ ID NO: 14843 - RNA, 1785 nt, Artificial Sequence
  mRNA product Design b-4 (A100) comprising derived and/or modified sequence from LASV(LASV253-NIG-2011;Clade II)__AIT17670__GPC (opt1)
aggagagucccgcagucggcguccagcggcucugcuuguucgugugugugucguugcaggccuuauucaagcuuaccaugggccagaucaucaccuucuuccaggaggugccccacgucaucgaggaggugaugaacaucgugcugaucgcccucagccugcuggccauccucaaggggaucuacaacgucgcgaccugcggccuguucgggcugguguccuuccuccugcugugcggccgcagcugcuccacgaccuacaaggggguguacgagcuccagacccuggagcuggacauggccagccucaacaugaccaugccgcuguccugcacgaagaacaacagccaccacuacaucauggucggcaacgagaccggccuggagcucacccugaccaacacguccaucaucaaccacaaguucugcaaccugagcgacgcccacaagaagaaccucuacgaccacgcccugauguccaucaucagcaccuuccaccuguccauccccaacuucaaccaguacgaggccaugagcugcgacuucaacgggggcaagaucuccgugcaguacaaccucagccacaccuacgcgguggacgccgccaaccacugcgggaccaucgccaacggcguccugcagacguucaugcggauggcguggggcggguccuacaucgcccuggacagcggcaagggguccugggacugcaucaugaccagcuaccaguaccucaucauccagaacaccaccugggaggaccacugccaguucucccgccccagccccaucggcuaccuggggcugcucagccagcggacgcgcgacaucuacaucucccggcgccugcugggcaccuucaccuggacccucagcgacuccgagggcaacgagacgcccgggggcuacugccugacccgguggaugcugaucgaggccgagcucaagugcuucgggaacaccgccguggccaagugcaacgagaagcacgacgaggaguucugcgacaugcugcgccuguucgacuucaacaagcaggcgauccggcgccucaaggccgaggcccagaugagcauccagcugaucaacaaggccgugaacgcccugaucaacgaccagcucaucaugaagaaccaccuccgggacaucaugggcaucccguacugcaacuacuccaaguacugguaccugaaccacaccgucacggggcgcaccagccugccccggugcuggcugguguccaacggcagcuaccugaacgagacccacuucuccgacgacaucgagcagcaggcggacaacaugaucaccgagcuccugcagaaggaguacaucgaccgccagggcaagacgccccuggggcucguggaccuguucgucuucagcaccuccuucuaccugaucagcaucuuccugcaccucgugaagaucccgacccaccggcacaucaucggcaagcccugccccaagccccaccgccugaaccacauggggaucugcuccugcggccuguacaagcacccgggggugcccgucaaguggaagcggugaggacuaguaauaaggaaacuguaugaaugucugugggcaggaagugaagagauccuucuguaaagguuuuuggaauuaugucugcugaauaauaaacuuuuuugaaauaauaaaucugguagaaaaaugagaucuaaaaaaaaaaaaaaaaaaaaaaaaaaaaaaaaaaaaaaaaaaaaaaaaaaaaaaaaaaaaaaaaaaaaaaaaaaaaaaaaaaaaaaaaaaaaaaaaaaaa

SEQ ID NO: 14844 - RNA, 1785 nt, Artificial Sequence
  mRNA product Design b-4 (A100) comprising derived and/or modified sequence from LASV(LASV254-NIG-2011;Clade II)__AIT17674__GPC (opt1)
aggagagucccgcagucggcguccagcggcucugcuuguucgugugugugucguugcaggccuuauucaagcuuaccaugggccagaucaucaccuucuuccaggaggugccccacgucaucgaggaggugaugaacaucgugcugaucgcccucagccugcuggccauccucaaggggaucuacaacgucgcgaccugcggccuguucgggcugguguccuuccuccugcugugcggccgcagcugcuccacgaccuacaaggggguguacgagcuccagacccuggagcuggacaugaccaaccucaacaugacgaugccgcugagcugcaccaagaacaacucccaccacuacaucauggucggcaacgagaccggccuggagcucacccugacgaacaccagcaucaucaaccacaaguucugcaaccuguccgacgcccacaagaagaaccucuacaaccacgcccugaugagcaucaucuccaccuuccaccugagcauccccaacuucaaccaguacgaggccauguccugcgacuucaacgggggcaagaucagcgugcaguacaaccucucccacagcuacgccguggacgcggccaaccacugcgggaccaucgccaacggcguccugcagacguucaugcggauggccuggggcggguccuacaucgcgcuggacagcggcaaggggaacugggacugcaucaugaccuccuaccaguaccucaucauccagaacaccaccugggaggaccacugccaguucagccgccccucccccaucggcuaccuggggcugcucagccagcggacgcgcgacaucuacaucagccggcgccugcugggcaccuucaccuggacccucuccgacagcgagggcaacgagacgcccgggggcuacugccugacccgguggaugcugaucgaggccgagcucaagugcuucgggaacaccgccguggccaagugcaacgagaagcacgacgaggaguucugcgacaugcugcgccuguucgacuucaacaagcaggccauccggcgccucaagaccgaggcgcaggccaacauccagcugaucaacaaggccgugaacgcccugaucaacgaccagcucaucaugaagaaccaccuccgggacaucaugggcauccccuacugcaacuacuccaaguacugguaccugaaccacacggucaccgggaagaccagccugccccgcugcuggcugguguccaacggcagcuaccugaacgagacccacuucuccgacgacaucgagcagcaggccgacaacaugaucacggagcuccugcagaaggaguacauggaccggcagggcaagaccccgcuggggcucguggaccuguucgucuucagcaccuccuucuaccugaucagcaucuuccugcaccucgugaagaucccgacccaccgccacgugaucggcaagcccugccccaagccccaccggcugaaccacauggggaucugcuccugcggccuguacaagcacccggggguccccgugaaguggaagcgcugaggacuaguaauaaggaaacuguaugaaugucugugggcaggaagugaagagauccuucuguaaagguuuuuggaauuaugucugcugaauaauaaacuuuuuugaaauaauaaaucugguagaaaaaugagaucuaaaaaaaaaaaaaaaaaaaaaaaaaaaaaaaaaaaaaaaaaaaaaaaaaaaaaaaaaaaaaaaaaaaaaaaaaaaaaaaaaaaaaaaaaaaaaaaaaaaa

SEQ ID NO: 14845 - RNA, 1785 nt, Artificial Sequence
  mRNA product Design b-4 (A100) comprising derived and/or modified sequence from LASV(Nig08-A19;Clade III)__ADU56618__GPC (opt1)
aggagagucccgcagucggcguccagcggcucugcuuguucgugugugugucguugcaggccuuauucaagcuuaccaugggccagaucgugaccuucuuccaggaggucccccacgugaucgaggaggugaugaacaucguccugaucgcccucagcauccuggccauccugaaggggcucuacaacaucgcgaccugcggccugaucgggcuggugacguuccuccugcuguccggccgcagcugcuccaugaccuacaaggggguguacgagcuccagacccuggagcugaacaugaacacccucaacaugacgaugccgcugagcugcaccaagaacaacucccaccacuacaucauggucggcaacgagaccggccuggagcucacccugacgaacaccagccugcuccaccacaaguucugcaaccuguccgacgcccacaagaagaaccuguacgaccacacccucaugagcaucaucuccaccuuccaccugagcauccccaacuucaaccaguacgaggccauguccugcgacuucaacgggggcaagaucacggugcaguacaaccugagccacuccuacgccaucgacgccgcgaaccacugcgggaccguggccaacggcguccuccagaccuucaugcggauggccuggggcgggagcuacaucgcccuggacuccggccgcgggaagugggacugcaucaugaccagcuaccaguaccugaucauccagaacacgaccugggaggaccacugccaguucucccggcccagccccaucggcuaccucgggcugcugucccagcgcacccgggacaucuacaucagccgccggcuccugggcaccuucacguggacccugagcgacuccgagggcaacgagacccccgggggcuacugccucacccgcuggaugcugaucgaggcggagcugaagugcuucgggaacacggccguggccaagugcaacgagaagcacgacgaggaguucugcgacaugcuccggcuguucgacuucaacaagcaggccauccgccggcugaaggccgaggcgcagaugagcauccagcucaucaacaaggccgugaacgcccugaucaacgaccagcugaucaugaagaaccaccuccgcgacaucaugggcauccccuacugcaacuacuccaaguacugguaccugaaccacaccagcaccgggcggaccucccugccccgcugcuggcucgucagcaacggcuccuaccugaacgagacgcacuucagcgacgacaucgagcagcaggccgacaacaugaucaccgagaugcugcagaaggaguaccucgaccggcagggcaagaccccgcuggggcugguggaccuguucguguucuccaccagcuucuaccucaucuccaucuuccugcaccuggucaagaucccgacgcaccgccacaucgugggcaagcccugccccaagccccaccggcucaaccacauggggaucugcagcugcggccuguacaagcagccgggggugcccguccgcuggaagcggugaggacuaguaauaaggaaacuguaugaaugucugugggcaggaagugaagagauccuucuguaaagguuuuuggaauuaugucugcugaauaauaaacuuuuuugaaauaauaaaucugguagaaaaaugagaucuaaaaaaaaaaaaaaaaaaaaaaaaaaaaaaaaaaaaaaaaaaaaaaaaaaaaaaaaaaaaaaaaaaaaaaaaaaaaaaaaaaaaaaaaaaaaaaaaaaaa

SEQ ID NO: 14846 - RNA, 1788 nt, Artificial Sequence
  mRNA product Design b-4 (A100) comprising derived and/or modified sequence from LASV(G1180-SLE-2010;Clade IV)__AIT17168__GPC (opt1)
aggagagucccgcagucggcguccagcggcucugcuuguucgugugugugucguugcaggccuuauucaagcuuaccaugggccagaucgugaccuucuuccaggaggucccccacgugaucgaggaggugaugaacaucguccugaucgcccucagcauccuggccgugcugaaggggcucuacaacuucgcgaccugcggccugguggggcugcucaccuuccugcugcucugcggccgcuccugcaccgccagccgguacaagggggucuacgagcugcagacccuggagcucaacauggagacccugaacaugacgaugccgcuguccugcaccaagaacaacagccaccacuacaucauggugggcaacgagaccggccucgagcugacccugacgaacaccuccaucaucaaccacaaguucugcaaccucagcgacgcccacaagaagaaccuguacgaccacgcccugauguccaucaucagcaccuuccaccucuccauccccaacuucaaccaguacgaggccaugagcugcgacuucaacgggggcaagaucuccgugcaguacaaccugagccacuccuacgcgggggacgccgccaaccacugcggcaccgucgccaacggggugcugcagacguucaugcgcauggcguggggcggcagcuacaucgcccucgacuccgggcacggcagcugggacugcaucaugaccuccuaccaguaccugaucauccagaacaccaccugggaggaccacugccaguucagccggcccucccccaucggguaccugggccuccugagccagcgcacgcgggacaucuacaucagccgccggcugcucggcaccuucaccuggacccuguccgacagcgaggggaaggacacgccgggcggguacugccugacccgcuggaugcucaucgaggccgagcugaagugcuucggcaacaccgccguggccaagugcaacgagaagcacgacgaggaguucugcgacaugcugcggcuguucgacuucaacaagcaggcgauccagcgccugaaggccgaggcccagauguccauccagcugaucaacaaggccgucaacgcccucaucaacgaccagcugaucaugaagaaccaccuccgggacaucauggggauccccuacugcaacuacagcaaguacugguaccucaaccacaccacgaccggcaagaccucccugcccaagugcuggcuggugagcaacggcuccuaccucaacgagacccacuucagcgacgacaucgagcagcaggcggacaacaugaucacggagaugcugcagaaggaguacauggagcgccaggggaagacgccccugggccucguggaccuguucgucuucuccaccagcuucuaccugaucuccaucuuccugcaccucgugaagaucccgacccaccggcacaucgugggcaagagcugccccaagccccaccgccugaaccacauggggaucugcuccugcgggcuguacaagcagcccggcgucccggugaaguggaagcggugaggacuaguaauaaggaaacuguaugaaugucugugggcaggaagugaagagauccuucuguaaagguuuuuggaauuaugucugcugaauaauaaacuuuuuugaaauaauaaaucugguagaaaaaugagaucuaaaaaaaaaaaaaaaaaaaaaaaaaaaaaaaaaaaaaaaaaaaaaaaaaaaaaaaaaaaaaaaaaaaaaaaaaaaaaaaaaaaaaaaaaaaaaaaaaaaa

SEQ ID NO: 14847 - RNA, 1788 nt, Artificial Sequence
  mRNA product Design b-4 (A100) comprising derived and/or modified sequence from LASV(G1442-SLE-2011;Clade IV)__AIT17180__GPC (opt1)
aggagagucccgcagucggcguccagcggcucugcuuguucgugugugugucguugcaggccuuauucaagcuuaccaugggccagaucgugaccuucuuccaggaggucccccacgugaucgaggaggugaugaacaucguccugaucgcccucagcauccuggccgugcugaaggggcucuacaacguggcgaccugcggccugaucgggcuggucacguuccuccugcugugcggccgcuccugcaccaccacccucuacaaggggguguacgagcugcagacgcuggagcucaacauggagacccugaacaugaccaugccgcugagcugcaccaagaacaacucccaccacuacauccgggugggcaacgagacgggccucgagcugacccugaccaacaccagcaucaucaaccacaaguucugcaaccucuccgacgcccacaagaagaaccuguacgaccacgcccugaugagcaucaucuccacguuccaccucagcauccccaacuucaaccaguacgaggccauguccugcgacuucaacgggggcaagaucagcguccaguacaaccugucccacagcuacgccggggacgcggccaaccacugcggcaccguggccaacggggugcugcagaccuucaugcgcauggccuggggcggcuccuacaucgcgcucgacagcgggcggggcaacugggacugcaucaugaccuccuaccaguaccugaucauccagaacacgaccugggacgaccacugccaguucagccgccccucccccaucggguaccugggccuccugagccagcggacccgcgacgucuacaucucccggcgccugcucggcaccuucacguggacccugagcgacagcgaggggaaggacaccccgggcggguacugccugacccgguggaugcucaucgaggccgagcugaagugcuucggcaacacggccguggccaagugcaacgagaagcacgacgaggaguucugcgacaugcugcgccucuucgacuucaacaagcaggccauccagcggcugaaggcggaggcccagauguccauccagcugaucaacaaggccgugaacgcccucaucaacgaccagcugaucaugaagaaccaccuccgcgacaucauggggauccccuacugcaacuacagcaaguacugguaccugaacaacaccgccaccggcaagaccucccugcccaagugcuggcugaucagcaacggcuccuaccucaacgagacgcacuucagcgacgacaucgagcaggaggcggacaacaugaucaccgagaugcugcagaaggaguacauggagcggcaggggaagacgccccugggccucgucgaccuguucguguucuccaccagcuucuaccugaucuccaucuuccugcaccucgugaagaucccgacccaccgccacaucgucggcaagagcugccccaagccccaccggcugaaccacauggggaucugcuccugcgggcuguacaagcagcccggcgugccggugcgcuggaagcggugaggacuaguaauaaggaaacuguaugaaugucugugggcaggaagugaagagauccuucuguaaagguuuuuggaauuaugucugcugaauaauaaacuuuuuugaaauaauaaaucugguagaaaaaugagaucuaaaaaaaaaaaaaaaaaaaaaaaaaaaaaaaaaaaaaaaaaaaaaaaaaaaaaaaaaaaaaaaaaaaaaaaaaaaaaaaaaaaaaaaaaaaaaaaaaaaa

SEQ ID NO: 14848 - RNA, 1788 nt, Artificial Sequence
  mRNA product Design b-4 (A100) comprising derived and/or modified sequence from LASV(G3010-SLE-2013;Clade IV)__AIT17344__GPC (opt1)
aggagagucccgcagucggcguccagcggcucugcuuguucgugugugugucguugcaggccuuauucaagcuuaccaugggccagaucgugaccuucuuccaggaggucccccacgugaucgaggaggugaugaacaucguccugaucgcccucagcauccuggccgugcugaaggggcucuacaacuucgcgaccugcggccugguggggcuggucacguuccuccugcugugcggccgcuccugcaccaccagccucuacaaggggguguacgagcugcagacccuggagcucaacauggagacgcugaacaugaccaugccgcuguccugcaccaagaacaacagccaccacuacaucauggugggcaacgagaccggccucgagcugacgcugaccaacaccuccaucaucaaccacaaguucugcaaccucagcgacgcccacaagaagaaccuguacaaccacgcccugauguccaucaucagcaccuuccaccucuccauccccaacuucaaccaguacgaggccaugagcugcgacuucaacgggggcaagaucuccguccaguacaaccugagccacuccuacgccggggacgcggccagccacugcggcacgguggccaacggggugcugcagaccuucaugcggauggccuggggcggcuccuacaucgcgcucgacagcggguacggcaagugggacugcaucaugaccuccuaccaguaccugaucauccagaacaccacgugggaggaccacugccaguucagccgccccucccccaucggguaccugggccuccugagccagcggacccgcgacaucuacaucagccggcgccugcucggcaccuucaccuggacgcuguccgacagcgaggggaaggacaccccgggcggguacugccugacccgguggaugcucaucgaggccgagcugaagugcuucggcaacaccgccgucgccaagugcaacgagaagcacgacgaggaguucugcgacaugcugcgccucuucgacuucaacaagcaggccauccagcggcugaagacggaggcgcagauguccauccagcugaucaacaaggccgugaacgcccucaucaacgaccagcugaucaugaagaaccaccuccgcgacaucauggggauccccuacugcaacuacagcaaguacugguaccugaaccacaccaccaccggcaagacgucccugcccaagugcuggcuggugagcaacggcuccuaccucaacgagacccacuucagcgacgacaucgagcagcaggccgacaacaugaucaccgagaugcugcagaaggaguacauggagcggcaggggaagacgccccugggccucgucgaccuguucguguucuccaccagcuucuaccugaucuccaucuuccugcaccucgugaagaucccgacccaccgccacaucgucggcaagagcugccccaagccccaccggcugaaccacauggggaucugcuccugcgggcuguacaagcagcccggcgugccggugcgcuggaagcggugaggacuaguaauaaggaaacuguaugaaugucugugggcaggaagugaagagauccuucuguaaagguuuuuggaauuaugucugcugaauaauaaacuuuuuugaaauaauaaaucugguagaaaaaugagaucuaaaaaaaaaaaaaaaaaaaaaaaaaaaaaaaaaaaaaaaaaaaaaaaaaaaaaaaaaaaaaaaaaaaaaaaaaaaaaaaaaaaaaaaaaaaaaaaaaaaa

SEQ ID NO: 14849 - RNA, 1788 nt, Artificial Sequence
  mRNA product Design b-4 (A100) comprising derived and/or modified sequence from LASV(G502-SLE-2009;Clade IV)__AIT17126__GPC (opt1)
aggagagucccgcagucggcguccagcggcucugcuuguucgugugugugucguugcaggccuuauucaagcuuaccaugggccagaucgugaccuucuuccaggaggucccccacgugaucgaggaggugaugaacaucguccugaucgcccucagcauccuggccgugcugaaggggcucuacaacuucgcgaccugcggccugguggggcugcucacguuccugcugcucugcggccgcuccugcaccaccgggcuguacaagggcgucuacgagcugcagacccucgagcugaacauggagacgcugaacaugaccaugccgcucagcugcaccaagaacaacucccaccacuacaucauggugggcaacgagaccgggcuggagcugacgcucaccaacaccagcaucaucaaccacaaguucugcaaccuguccgacgcccacaagaagaaccuguacgaccacgcccucaugagcaucaucuccaccuuccaccugagcauccccaacuucaaccaguacgaggccauguccugcgacuucaacggcgggaagaucagcgugcaguacaaccugucccacagcuacgccggcgacgcggccgaccacugcgggacggucgccaacggcgugcuccagaccuucaugcggauggccuggggcggguccuacaucgcgcuggacagcggccgcgggcggugggacugcaucaugaccuccuaccaguaccugaucauccagaacaccacgugggaggaccacugccaguucagccgccccucccccaucggcuaccucggccugcugagccagcggacccgcgacaucuacaucucccggcgccuccuggggaccuucaccuggacgcugagcgacagcgagggcaaggacacccccgggggcuacugccucacccgguggaugcugaucgaggccgagcugaagugcuucgggaacaccgccguggccaagugcaacgagaagcacgacgaggaguucugcgacaugcuccgccuguucgacuucaacaagcaggccauccagcggcugaaggcggaggcccagauguccauccagcucaucaacaaggccgucaacgcccugaucaacgaccagcuggugaugaagaaccaccuccgcgacaucaugggcauccccuacugcaacuacagccgguacugguaccugaaccacacgaccaccggccgcaccucccugcccaagugcuggcucgugagcaacggguccuaccugaacgagacgcacuucagcgacgacaucgagcagcaggccgacaacaugaucaccgagaugcugcagaaggaguacauggagcggcagggcaagaccccgcucgggcuggucgaccuguucguguucuccaccagcuucuaccugaucuccaucuuccuccaccuggugaagaucccgacgcaccgccacaucgucggcaagagcugccccaagccccaccggcugaaccacauggggaucugcuccugcggccucuacaagcagcccggcgugccggugaaguggaagcgcugaggacuaguaauaaggaaacuguaugaaugucugugggcaggaagugaagagauccuucuguaaagguuuuuggaauuaugucugcugaauaauaaacuuuuuugaaauaauaaaucugguagaaaaaugagaucuaaaaaaaaaaaaaaaaaaaaaaaaaaaaaaaaaaaaaaaaaaaaaaaaaaaaaaaaaaaaaaaaaaaaaaaaaaaaaaaaaaaaaaaaaaaaaaaaaaaa

SEQ ID NO: 14850 - RNA, 1788 nt, Artificial Sequence
  mRNA product Design b-4 (A100) comprising derived and/or modified sequence from LASV(G733-SLE-2010;Clade IV)__AIT17154__GPC (opt1)
aggagagucccgcagucggcguccagcggcucugcuuguucgugugugugucguugcaggccuuauucaagcuuaccaugggccagaucgugaccuucuuccaggaggucccccacgugaucgaggaggugaugaacaucguccugaucgcccucagcauccuggccgugcugaaggggcucuacaacuucgcgaccugcggcaucguggggcuggucuccuuccugcuccugugcggccgcagcugcacgaccucccuguacaaggggguguacgagcuccagacccuggagcugaacauggagacccucaacaugacgaugccgcugagcugcaccaagaacaacucccaccacuacaucauggugggcaacgagaccggccuggagcucacccugacgaacaccagcaucaucaaccacaaguucugcaaccuguccgacgcccacaagaagaaccucuacgaccacgcccugaugagcaucaucuccaccuuccaccugagcauccccaacuucaaccaguacgaggccauguccugcgacuucaacgggggcaagaucagcguccaguacaaccucucccacagcuacgccggggacgcggccaaccacugcggcaccaucgccaacggggugcugcagacguucaugcggauggccuggggcggcuccuacaucgcgcuggacagcgggcgcgaccggugggacugcaucaugaccuccuaccaguaccucaucauccagaacaccaccugggaggaccacugccaguucagccgccccucccccaucggcuaccuggggcugcucagccagcggacgcgcgacaucuacaucagccggcgccugcugggcaccuucaccuggacccucuccgacagcgagggcaaggacacgcccgggggcuacugccugacccgguggaugcugaucgaggccgagcucaagugcuucgggaacaccgccguggccaagugcaacgagaagcacgacgaggaguucugcgacaugcugcgccuguucgacuucaacaagcaggccauccagcggcucaaggcggaggcccagauguccauccagcugaucaacaaggccgucaacgcccugaucaacgaccagcucaucaugaagaaccaccuccgcgacaucaugggcauccccuacugcaacuacagcaaguacugguaccugaaccacaccacgaccgggaagaccucccugcccaagugcuggcuggugagcaacggcuccuaccugaacgagacccacuucagcgacgacaucgagcagcaggccgacaacaugaucacggagaugcuccagaaggaguacauggagcggcagggcaagaccccgcuggggcugguggaccucuucgucuucuccaccagcuucuaccugaucuccaucuuccugcaccuggugaagaucccgacccaccgccacguggucggcaagagcugccccaagccccaccggcucaaccacauggggaucugcuccugcggccuguacgggcagcccggcgugccggugaaguggaagcgcugaggacuaguaauaaggaaacuguaugaaugucugugggcaggaagugaagagauccuucuguaaagguuuuuggaauuaugucugcugaauaauaaacuuuuuugaaauaauaaaucugguagaaaaaugagaucuaaaaaaaaaaaaaaaaaaaaaaaaaaaaaaaaaaaaaaaaaaaaaaaaaaaaaaaaaaaaaaaaaaaaaaaaaaaaaaaaaaaaaaaaaaaaaaaaaaaa

SEQ ID NO: 14851 - RNA, 1788 nt, Artificial Sequence
  mRNA product Design b-4 (A100) comprising derived and/or modified sequence from MOPV/LASV reassortant(IGS-1;Clade IV)__AFY05576__GPC (opt1)
aggagagucccgcagucggcguccagcggcucugcuuguucgugugugugucguugcaggccuuauucaagcuuaccaugggccagaucgugaccuucuuccaggaggucccccacgugaucgaggaggugaugaacaucguccugaucgcccucagcgugcuggccgugcugaaggggcucuacaacuucgcgaccugcggccuggucgggcuggugacguuccuccugcugugcggccgcuccugcaccaccagccucuacaaggggguguacgagcugcagacccuggagcucaacauggagacgcugaacaugaccaugccgcuguccugcaccaagaacaacagccaccacuacaucauggucggcaacgagaccggccucgagcugacgcugaccaacaccuccaucaucaaccacaaguucugcaaccucagcgacgcccacaagaagaaccuguacgaccacgcccugauguccaucaucagcaccuuccaccucuccauccccaacuucaaccaguacgaggccaugagcugcgacuucaacgggggcaagaucuccgugcaguacaaccugagccacuccuacgccggggacgcggccaaccacugcggcacgguggccaacgggguccugcagaccuucaugcggauggccuggggcggcagcuacaucgcgcucgacuccgggcgcggcaacugggacugcaucaugaccagcuaccaguaccugaucauccagaacaccacgugggaggaccacugccaguucucccggcccagccccaucggguaccugggccuccugucccagcgcacccgggacaucuacaucagccgccggcugcucggcaccuucaccuggacgcugagcgacuccgagggggaggacaccccgggcggguacugccugacccgcuggaugcucaucgaggccgagcugaagugcuucggcaacaccgccguggccaagugcaacgagaagcacgacgaggaguucugcgacaugcugcggcuguucgacuucaacaagcaggccauccagcgccugaaggcggaggcccagaugagcauccagcugaucaacaaggccgugaacgcccucaucaacgaccagcugaucaugaagaaccaccuccgggacaucauggggauccccuacugcaacuacuccaaguacugguaccucaaccacacgaccaccggccgcaccagccugcccaagugcuggcuggucuccaacggcagcuaccucaacgagacgcacuucuccgacgacaucgagcagcaggccgacaacaugaucaccgagaugcugcagaaggaguacauggagcggcaggggaagacgccccugggccucguggaccuguucguguucagcaccuccuucuaccugaucagcaucuuccugcaccucgucaagaucccgacccaccgccacaucguggggaaguccugccccaagccccaccggcugaaccacaugggcaucugcagcugcgggcuguacaagcagcccggcgugccggucaaguggaagcgcugaggacuaguaauaaggaaacuguaugaaugucugugggcaggaagugaagagauccuucuguaaagguuuuuggaauuaugucugcugaauaauaaacuuuuuugaaauaauaaaucugguagaaaaaugagaucuaaaaaaaaaaaaaaaaaaaaaaaaaaaaaaaaaaaaaaaaaaaaaaaaaaaaaaaaaaaaaaaaaaaaaaaaaaaaaaaaaaaaaaaaaaaaaaaaaaaa

SEQ ID NO: 14852 - RNA, 1788 nt, Artificial Sequence
  mRNA product Design b-4 (A100) comprising derived and/or modified sequence from LASV(LM765-SLE-2012;Clade IV)__AIT17814__GPC (opt1)
aggagagucccgcagucggcguccagcggcucugcuuguucgugugugugucguugcaggccuuauucaagcuuaccaugggccagaucgugaccuucuuccaggaggucccccacgugaucgaggaggugaugaacaucguccugaucgcccucagcauccuggccgugcugaaggggcucuacaacuucgcgaccugcggccugguggggcuggucacguuccuccugcugugcggccgcuccugcaccaccagccucuacaaggggguguacgagcugcagacccuggagcucaacauggagacgcugaacaugaccaugccgcuguccugcaccaagaacaacagccaccacuacaucauggugggcaacgagaccggccucgagcugacgcugaccaacaccuccaucaucgaccacaaguucugcaaccucagcgacgcccaccggaagaaccuguacgaccacgcccugauguccaucaucagcaccuuccaccucuccauccccaacuucaaccaguacgaggccaugagcugcgacuucaacgggggcaagaucuccguccaguacaaccugagccacuccuacgccaaggacgcggccgaccacugcgggacgguggccaacggcgugcugcagaccuucaugcgcauggccuggggcgggagcuacaucgcgcucgacuccggccgggggcgcugggacugcaucaugaccagcuaccaguaccugaucauccagaacaccacgugggaggaccacugccaguucucccggcccagccccaucggcuaccuggggcuccugucccagcgcacccgggacaucuacaucagccgccggcugcucggcaccuucaccuggacgcugagcgacuccgagggcaaggacacccccgggggcuacugccugacccgcuggaugcucaucgaggccgagcugaagugcuucgggaacaccgccgucgccaagugcaacgagaagcacgacgaggaguucugcgacaugcugcggcuguucgacuucaacaagcaggccauccagcgccugaaggcggaggcccagaugagcauccagcugaucaacaaggccgugaacgcccucaucaacgaccagcugaucaugaagaaccaccuccgggacaucaugggcauccccuacugcaacuacuccaaguacugguaccucaaccacacgaccaccgggaagaccagccugcccaagugcuggcugguguccaacggcagcuaccucaacgagacgcacuucuccgacgacaucgagcagcaggccgacaacaugaucaccgagaugcugcagaaggaguacauggagcgccagggcaagaccccgcuggggcucgucgaccuguucguguucagcaccuccuucuaccugaucagcaucuuccugcaccucgugaagaucccgacgcaccggcacaucgucggcaagcccugccccaagccccaccgccugaaccacauggggaucugcuccugcggccuguacaagcagccgggggugcccgugaaguggaagcggugaggacuaguaauaaggaaacuguaugaaugucugugggcaggaagugaagagauccuucuguaaagguuuuuggaauuaugucugcugaauaauaaacuuuuuugaaauaauaaaucugguagaaaaaugagaucuaaaaaaaaaaaaaaaaaaaaaaaaaaaaaaaaaaaaaaaaaaaaaaaaaaaaaaaaaaaaaaaaaaaaaaaaaaaaaaaaaaaaaaaaaaaaaaaaaaaa

SEQ ID NO: 14853 - RNA, 1788 nt, Artificial Sequence
  mRNA product Design b-4 (A100) comprising derived and/or modified sequence from LASV(LM776-SLE-2012;Clade IV)__AIT17824__GPC (opt1)
aggagagucccgcagucggcguccagcggcucugcuuguucgugugugugucguugcaggccuuauucaagcuuaccaugggccagaucgugaccuucuuccaggaggucccccacgugaucgaggaggugaugaacaucguccugaucgcccucagcauccuggccgugcugaaggggcucuacaacuucgcgaccugcggccugguggggcuggucacguuccuccugcugugcggccgcuccugcaccaccagcguguacaaggggguguacgagcuccagacccuggagcugaacauggagacgcucaacaugaccaugccgcuguccugcaccaagaacaacagccaccacuacaucauggucggcaacgagaccggccuggagcucacgcugaccaacaccuccaucaucaaccacaaguucugcaaccugagcgacgcccacaagaagaaccucuacgaccacgcccugauguccaucaucagcaccuuccaccuguccauccccaacuucaaccaguacgaggccaugagcugcgacuucaacgggggcaagaucuccgugcaguacaaccucagccacuccuacgccggggacgcggccaaccacugcggcacgguggccaacgggguccugcagaccuucaugcggauggccuggggcggcagcuacaucgcgcuggacuccgggcacggcaagugggacugcaucaugaccagcuaccaguaccucaucauccagaacaccacgugggaggaccacugccaguucucccgccccagccccaucggguaccugggccugcucucccagcggacccgcgacaucuacaucagccggcgccugcugggcaccuucaccuggacgcucagcgacuccgaggggaaggacaccccgggcggguacugccugacccgguggaugcugaucgaggccgagcucaagugcuucggcaacaccgccguggccaagugcaacgagaagcacgacgaggaguucugcgacaugcugcgccuguucgacuucaacaagcaggccauccagcggcucaaggcggaggcccagaugagcauccagcugaucaacaaggccgugaacgcccugaucaacgaccagcucaucaugaagaaccaccuccgcgacaucauggggauccccuacugcaacuacuccaaguacugguaccugaaccacacgaccaccggcaagaccagccugcccaagugcuggcuggucuccaacggcagcuaccugaacgagacgcacuucuccgacgacaucgagcagcaggccgacaacaugaucaccgagaugcuccagaaggaguacauggagcggcaggggaagacgccccugggccugguggaccucuucguguucagcaccuccuucuaccugaucagcaucuuccugcaccuggucaagaucccgacccaccgccacaucguggggaaguccugccccaagccccaccggcucaaccacaugggcaucugcagcugcgggcuguacaagcagcccggcgugccgguccgcuggaagcggugaggacuaguaauaaggaaacuguaugaaugucugugggcaggaagugaagagauccuucuguaaagguuuuuggaauuaugucugcugaauaauaaacuuuuuugaaauaauaaaucugguagaaaaaugagaucuaaaaaaaaaaaaaaaaaaaaaaaaaaaaaaaaaaaaaaaaaaaaaaaaaaaaaaaaaaaaaaaaaaaaaaaaaaaaaaaaaaaaaaaaaaaaaaaaaaaa

SEQ ID NO: 14854 - RNA, 1788 nt, Artificial Sequence
  mRNA product Design b-4 (A100) comprising derived and/or modified sequence from LASV(Mad39;Clade IV)__ANH09722__GPC (opt1)
aggagagucccgcagucggcguccagcggcucugcuuguucgugugugugucguugcaggccuuauucaagcuuaccaugggccagaucgugaccuucuuccaggaggucccccacgugaucgaggaggugaugaacaucguccugaucgcccucagcauccuggccgugcugaaggggcucuacaacguggcgaccugcggccugaucgggcuggucacguuccuccugcugugcggccgcuccugcaccaccacccucuacaaggggguguacgagcugcaggcccuggagcucaacauggagacgcugaacaugaccaugccgcugagcugcaccaagaacaacucccaccacuacauccgggugggcaacgagaccggccucgagcugacgcugaccaacaccagccucaucaaccacaaguucugcaaccuguccgacgcccacaagaagaaccuguacgaccacgcccucaugagcaucaucuccaccuuccaccugagcauccccaacuucaaccaguacgaggccauguccugcgacuucaacgacgggaagaucagcguccaguacaaccugucccacacguacgcgggcgacaccgccaaccacugcgggaccguggccaacggcgugcuccagaccuucaugcgcauggccuggggcgggagcuacaucgcgcuggacuccggccgcgggggcugggacugcaucaugacgagcuaccaguaccugaucauccagaacaccaccugggaggaccacugccaguucucccggcccagccccaucggguaccucggccugcugucccagcggacccgcgacaucuacaucagccggcgccuccugggcacguucaccuggacccuguccgacagcgaggggaaggacaccccgggcggguacugccucacgcgguggaugcugaucgaggccgagcugaagugcuucggcaacaccgccgucgccaagugcaacgagaagcacgacgaggaguucugcgacaugcuccgccuguucgacuucaacaagcaggccauccagcggcugaaggcggaggcccagaugagcauccagcucaucaacaaggccgugaacgcccugaucaacgaccagcugaucaugaagaaccaccuccgcgacaucauggggauccccuacugcaacuacuccaaguacugguaccugaaccacaccgugaccggcaagacgagccugcccaagugcuggcucgucuccaacggcagcuaccugaacgagacccacuucuccgacgacaucgagcagcaggccgacaacaugaucaccgagaugcugcagaaggaguacauggagcggcaggggaagacgccccucggccugguggaccuguucguguucagcaccuccuucuaccugaucagcaucuuccuccaccuggucaagaucccgacccaccgccacgugguggggaagcccugccccaagccccaccggcugaaccacaugggcaucugcuccugcggguucuacaagcagccgggcguccccgugcgcuggaagcggugaggacuaguaauaaggaaacuguaugaaugucugugggcaggaagugaagagauccuucuguaaagguuuuuggaauuaugucugcugaauaauaaacuuuuuugaaauaauaaaucugguagaaaaaugagaucuaaaaaaaaaaaaaaaaaaaaaaaaaaaaaaaaaaaaaaaaaaaaaaaaaaaaaaaaaaaaaaaaaaaaaaaaaaaaaaaaaaaaaaaaaaaaaaaaaaaa

SEQ ID NO: 14855 - RNA, 1788 nt, Artificial Sequence
  mRNA product Design b-4 (A100) comprising derived and/or modified sequence from LASV(Z0947-SLE-2011;Clade IV)__AIT17840__GPC (opt1)
aggagagucccgcagucggcguccagcggcucugcuuguucgugugugugucguugcaggccuuauucaagcuuaccaugggccagaucgugaccuucuuccaggaggucccccacgugaucgaggaggugaugaacaucguccugaucgcccucagcauccuggccgugcugaaggggcucuacaacuucgcgaccugcggccugguggggcuggucacguuccuccugcugugcggccgcuccugcaccaucagccucuacaaggggguguacgagcugcagacccuggagcucaacauggagacccugaacaugacgaugccgcuguccugcaccaagaacaacagccaccacuacaucauggugggcaacgagaccggccucgagcugacccugacgaacaccuccaucaucaaccacaaguucugcaaccucagcgacgcccacaagaagaaccuguacgaccacgcccugauguccaucaucagcaccuuccaccucuccauccccaacuucaaccaguacgaggccaugagcugcgacuucaacgggggcaagaucuccguccaguacaaccugagccacuccuacgccggggacgcggccaaccacugcggcaccguggccaacggggugcugcagacguucaugcggauggccuggggcggcagcuacaucgcgcucgacuccgggcgcgaccggugggacugcaucaugaccagcuaccaguaccugaucauccagaacaccaccugggaggaccacugccaguucucccgccccagccccaucggcuaccuggggcuccugucccagcggacgcgcgacaucuacaucagccggcgccugcucggcaccuucaccuggacccugagcgacuccgagggcaaggacacgcccgggggcuacugccugacccgguggaugcucaucgaggccgagcugaagugcuucgggaacaccgccgucgccaagugcaacgagaagcacgacgaggaguucugcgacaugcugcgccucuucgacuucaacaagcaggccauccagcggcugaaggcggaggcccagaugagcauccagcugaucaacaaggccgugaacgcccucaucaacgaccagcugaucaugaagaaccaccuccgcgacaucaugggcauccccuacugcaacuacuccaaguacugguaccugaaccacaccacgaccgggaagaccagccugcccaagugcuggcugguguccaacggcagcuaccucaacgagacccacuucuccgacgacaucgagcagcaggccgacaacaugaucacggagaugcugcagaaggaguacauggagcggcagggcaagaccccgcuggggcucgucgaccuguucguguucagcaccuccuucuaccugaucagcaucuuccugcaccucgugaagaucccgacccaccgccacaucgucggcaagcccugccccaagccccaccggcugaaccacauggggaucugcuccugcggccuguacaagcagccgggggugcccgugaaguggaagcgcugaggacuaguaauaaggaaacuguaugaaugucugugggcaggaagugaagagauccuucuguaaagguuuuuggaauuaugucugcugaauaauaaacuuuuuugaaauaauaaaucugguagaaaaaugagaucuaaaaaaaaaaaaaaaaaaaaaaaaaaaaaaaaaaaaaaaaaaaaaaaaaaaaaaaaaaaaaaaaaaaaaaaaaaaaaaaaaaaaaaaaaaaaaaaaaaaa

SEQ ID NO: 14856 - RNA, 1788 nt, Artificial Sequence
  mRNA product Design b-4 (A100) comprising derived and/or modified sequence from LASV(Josiah;Clade IV)__NP_694870__GPC (opt4)
aggagagucccgcagucggcguccagcggcucugcuuguucgugugugugucguugcaggccuuauucaagcuuaccaugggccagaucgugaccuucuuccaggaggugccccacgugaucgaggaggugaugaacaucgugcugaucgcccugagcgugcuggccgugcugaagggccuguacaacuucgccaccugcggccuggugggccuggugaccuuccugcugcugugcggcagaagcugcaccaccagccuguacaagggcguguacgagcugcagacccuggagcugaacauggagacccugaacaugaccaugccccugagcugcaccaagaacaacagccaccacuacaucauggugggcaacgagaccggccuggagcugacccugaccaacaccagcaucaucaaccacaaguucugcaaccugagcgacgcccacaagaagaaccuguacgaccacgcccugaugagcaucaucagcaccuuccaccugagcauccccaacuucaaccaguacgaggccaugagcugcgacuucaacggcggcaagaucagcgugcaguacaaccugagccacagcuacgccggcgacgccgccaaccacugcggcaccguggccaacggcgugcugcagaccuucaugagaauggccuggggcggcagcuacaucgcccuggacagcggcagaggcaacugggacugcaucaugaccagcuaccaguaccugaucauccagaacaccaccugggaggaccacugccaguucagcagacccagccccaucggcuaccugggccugcugagccagagaaccagagacaucuacaucagcagaagacugcugggcaccuucaccuggacccugagcgacagcgagggcaaggacacccccggcggcuacugccugaccagauggaugcugaucgaggccgagcugaagugcuucggcaacaccgccguggccaagugcaacgagaagcacgacgaggaguucugcgacaugcugagacuguucgacuucaacaagcaggccauccagagacugaaggccgaggcccagaugagcauccagcugaucaacaaggccgugaacgcccugaucaacgaccagcugaucaugaagaaccaccugagagacaucaugggcauccccuacugcaacuacagcaaguacugguaccugaaccacaccaccaccggcagaaccagccugcccaagugcuggcuggugagcaacggcagcuaccugaacgagacccacuucagcgacgacaucgagcagcaggccgacaacaugaucaccgagaugcugcagaaggaguacauggagagacagggcaagaccccccugggccugguggaccuguucguguucagcaccagcuucuaccugaucagcaucuuccugcaccuggugaagauccccacccacagacacaucgugggcaagagcugccccaagccccacagacugaaccacaugggcaucugcagcugcggccuguacaagcagcccggcgugcccgugaaguggaagagaugaggacuaguaauaaggaaacuguaugaaugucugugggcaggaagugaagagauccuucuguaaagguuuuuggaauuaugucugcugaauaauaaacuuuuuugaaauaauaaaucugguagaaaaaugagaucuaaaaaaaaaaaaaaaaaaaaaaaaaaaaaaaaaaaaaaaaaaaaaaaaaaaaaaaaaaaaaaaaaaaaaaaaaaaaaaaaaaaaaaaaaaaaaaaaaaaa

SEQ ID NO: 14857 - RNA, 1785 nt, Artificial Sequence
  mRNA product Design b-4 (A100) comprising derived and/or modified sequence from LASV(LP;Clade I)__AAF86701__GPC (opt4)
aggagagucccgcagucggcguccagcggcucugcuuguucgugugugugucguugcaggccuuauucaagcuuaccaugggccagaucaucaccuucuuccaggaggugccccacgugaucgaggaggugaugaacaucgugcugaucgcccugagccugcuggccauccugaagggccuguacaacaucgccaccugcggcaucaucggccugguggccuuccuguuccugugcggcaagagcugcagccugacccugaagggcggcuacgagcugcagacccuggagcugaacauggagacccugaacaugaccaugccccugagcugcaccaagaacagcagccaccacuacaucagagugggcaacgagaccggccuggagcugacccugaccaacaccagcaucaucaaccacaaguucugcaaccugagcgacgcccacaagaagaaccuguacgaccacgcccugaugagcaucaucagcaccuuccaccugagcauccccaacuucaaccaguacgaggccaugagcugcgacuucaacggcggcaagaucagcgugcaguacaaccugagccacagcuacgccggcgacgccgccgagcacugcggcaccguggccaacggcgugcugcagaccuucaugagaauggccuggggcggcagauacaucgcccuggacagcggcaagggcaacugggacugcaucaugaccagcuaccaguaccugaucauccagaacaccaccugggaggaccacugccaguucagcagacccagccccaucggcuaccugggccugcugagccagagaaccagagacaucuacaucagcagaagacugcugggcaccuucaccuggacccugagcgacagcgagggcaacgagacccccggcggcuacugccugaccagauggaugcugaucgaggccgagcugaagugcuucggcaacaccgccguggccaagugcaacgagaagcacgacgaggaguucugcgacaugcugagacuguucgacuucaacaagcaggccaucagaagacugaaggccgaggcccagaugagcauccagcugaucaacaaggccgugaacgcccugaucaacgaccagcugaucaugaagaaccaccugagagacaucaugggcauccccuacugcaacuacagcaaguacugguaccugaaccacaccagcagcggcagaaccagccugcccaagugcuggcugaucagcaacggcagcuaccugaacgagacccaguucagcgacgacaucgagcagcaggccgacaacaugaucaccgagaugcugcagaaggaguacaucgagagacagggcaagaccccccugggccugguggacaucuucaucuucagcaccagcuucuaccugaucagcaucuuccugcaccugaucaagauccccacccacagacacaucgugggcaagcccugccccaagccccacagacugaaccacaugggcgugugcagcugcggccuguacaagcaccccggcgugcccaccaaguggaagagaugaggacuaguaauaaggaaacuguaugaaugucugugggcaggaagugaagagauccuucuguaaagguuuuuggaauuaugucugcugaauaauaaacuuuuuugaaauaauaaaucugguagaaaaaugagaucuaaaaaaaaaaaaaaaaaaaaaaaaaaaaaaaaaaaaaaaaaaaaaaaaaaaaaaaaaaaaaaaaaaaaaaaaaaaaaaaaaaaaaaaaaaaaaaaaaaaa

SEQ ID NO: 14858 - RNA, 1785 nt, Artificial Sequence
  mRNA product Design b-4 (A100) comprising derived and/or modified sequence from LASV(803213;Clade II)__AAF86703__GPC (opt4)
aggagagucccgcagucggcguccagcggcucugcuuguucgugugugugucguugcaggccuuauucaagcuuaccaugggccagaucaucaccuucuuccaggaggugccccacgugaucgaggaggugaugaacaucgugcugaucgcccugagccugcuggccauccugaagggcaucuacaacguggccaccugcggccuguucggccugaucagcuuccugcugcugugcggcagaagcugcagcgugaccuacaagggcguguacgagcugcagacccuggagcugaacauggccaaccugaacaugaccaugccccugagcugcaccaagaacaacagccaccacuacaucauggugggcaacgagaccggccuggagcugacccugaccaacaccagcaucaucaaccacaaguucugcaaccugagcgacgcccacaagaagaaccuguacgaccacgcccugaugagcaucaucagcaccuuccaccugagcauccccaacuucaaccaguacgaggccaugagcugcgacuucaacggcggcaagaucagcgugcaguacaaccugagccacagcuucgccguggacgccgccaaccacugcggcaccaucgccaacggcgugcugcagaccuucaugagaauggccuggggcggcagcuacaucgcccuggacagcggcaagggcaacugggacugcaucaugaccagcuaccaguaccugaucauccagaacaccaccugggaggaccacugccaguucagcagacccagccccaucggcuaccugggccugcugagccagagaaccagagacaucuacaucagcagaagacugcugggcaccuucaccuggacccugagcgacagcgagggcaacgaggcccccggcggcuacugccugaccagauggaugcugaucgaggccgagcugaagugcuucggcaacaccgccguggccaagugcaacgagaagcacgacgaggaguucugcgacaugcugagacuguucgacuucaacaagcaggccaucaagagacugaagaccgaggcccagaugagcauccagcugaucaacaaggccgugaacgcccugaucaacgaccagcugaucaugaagaaccaccugagagacaucaugggcauccccuacugcaacuacagcagauacugguaccugaaccacaccgugaccggcaagaccagccugcccagaugcuggcuggugagcaacggcagcuaccugaacgagacccacuucagcgacgacaucgagcagcaggccgacaacaugaucaccgagaugcugcagaaggaguacauggacagacagggcaagaccccccugggccugguggaccuguucguguucagcaccagcuucuaccugaucagcaucuuccugcaccuggugaagauccccacccacagacacaucgugggcaagcccugccccaagccccacagacugaaccacaugggcaucugcagcugcggccuguacaagcaccccggcgugcccgugaaguggaagagaugaggacuaguaauaaggaaacuguaugaaugucugugggcaggaagugaagagauccuucuguaaagguuuuuggaauuaugucugcugaauaauaaacuuuuuugaaauaauaaaucugguagaaaaaugagaucuaaaaaaaaaaaaaaaaaaaaaaaaaaaaaaaaaaaaaaaaaaaaaaaaaaaaaaaaaaaaaaaaaaaaaaaaaaaaaaaaaaaaaaaaaaaaaaaaaaaa

SEQ ID NO: 14859 - RNA, 1785 nt, Artificial Sequence
  mRNA product Design b-4 (A100) comprising derived and/or modified sequence from LASV(GA391;Clade III)__CAA36645__GPC (opt4)
aggagagucccgcagucggcguccagcggcucugcuuguucgugugugugucguugcaggccuuauucaagcuuaccaugggccagaucgugaccuucuuccaggaggugccccacgugaucgaggaggugaugaacaucgugcugaucgcccugagcauccuggccauccugaagggccuguacaacguggccaccugcggccugaucggccuggugaccuuccugcugcugagcggcagaagcugcagccugaucuacaagggcaccuacgagcugcagacccuggagcugaacauggagacccugaacaugaccaugccccugagcugcaccaagaacaacagccaccacuacaucagagugggcaacgagaccggccuggagcugacccugaccaacaccagcauccugaaccacaaguucugcaaccugagcgacgcccacaagagaaaccuguacgaccacagccugaugagcaucaucagcaccuuccaccugagcauccccaacuucaaccaguacgaggccaugagcugcgacuucaacggcggcaagaucaccgugcaguacaaccugagccacagcuucgccguggacgccgccggccacugcggcacccuggccaacggcgugcugcagaccuucaugagaauggccuggggcggcagcuacaucgcccuggacagcggcagaggcaacugggacugcaucaugaccagcuaccaguaccugaucauccagaacaccaccugggacgaccacugccaguucagcagacccagccccaucggcuaccugggccugcugagccagagaaccagagacaucuacaucagcagaagacugcugggcaccuucaccuggacccugagcgacagcgagggcaacgagacccccggcggcuacugccugaccagauggaugcugaucgaggccgagcugaagugcuucggcaacaccgccguggccaagugcaacgagaagcacgacgaggaguucugcgacaugcugagacuguucgacuucaacaagcaggccaucagaagacugaagaccgaggcccagaugagcauccagcugaucaacaaggccgugaacgcccugaucaacgaccagcugaucaugaagaaccaccugagagacaucaugggcauccccuacugcaacuacagcagauacugguaccugaaccacaccagcaccggcaagaccagccugcccagaugcuggcugaucagcaacggcagcuaccugaacgagaccaaguucagcgacgacaucgagcagcaggccgacaacaugaucaccgagaugcugcagaaggaguacaucgacagacagggcaagaccccccugggccugguggaccuguucguguucagcaccagcuucuaccugaucagcaucuuccugcaccuggugaagauccccacccacagacacaucgugggcaagcccugccccaagccccacagacugaaccacaugggcaucugcagcugcggccuguacaagcagcccggcgugcccgugagauggaagagaugaggacuaguaauaaggaaacuguaugaaugucugugggcaggaagugaagagauccuucuguaaagguuuuuggaauuaugucugcugaauaauaaacuuuuuugaaauaauaaaucugguagaaaaaugagaucuaaaaaaaaaaaaaaaaaaaaaaaaaaaaaaaaaaaaaaaaaaaaaaaaaaaaaaaaaaaaaaaaaaaaaaaaaaaaaaaaaaaaaaaaaaaaaaaaaaaa

SEQ ID NO: 14860 - RNA, 1788 nt, Artificial Sequence
  mRNA product Design b-4 (A100) comprising derived and/or modified sequence from LASV(AV;Clade V)__CCA30314__GPC (opt4)
aggagagucccgcagucggcguccagcggcucugcuuguucgugugugugucguugcaggccuuauucaagcuuaccaugggccagaucgugaccuucuuccaggaggugccccacgugaucgaggaggugaugaacaucgugcugaucgcccugagcauccuggccgugcugaagggccuguacaacaucgccaccugcggccugaucggccugaucaccuuccugcugcugugcggcagaagcugcagcagcaaccuguacaagggcguguacgagcugcagagccuggaccugaacauggagacccugaacaugaccaugccccugagcugcaccaagaacaacagccaccacuacaucagagugggcaacgacaccggccuggagcugacccugaccaacaccagcauccugaaccacaaguucugcaaccugagcgacgcccacaagaaggaccuguacgaccacgcccugaugagcaucaucagcaccuuccaccugagcauccccaacuucaaccaguacgaggccaugagcugcgacuucaacggcggcaagaucagcgugcaguacaaccugagccacagcuacgccaucgacgccgccaaccacugcggcaccguggccaacggcauccugcagaccuucaugagaauggccuggggcggcagcuacaucgcccuggacagcggcagaggcaacugggacugcaucaugaccagcuaccaguaccugaucauccagaacaccaccugggagaaccacugccaguucagcagacccagccccaucggcuaccugggccugcugagccagagaaccagagacaucuacaucagcagaagacugcugggcaccuucaccuggacccugagcgacagcgagggcaacgccacccccggcggcuacugccugaccagauggaugcugaucgaggccgagcugaagugcuucggcaacaccgccguggccaagugcaacgagaagcacgacgaggaguucugcgacaugcugagacuguucgacuucaacaagcaggccaucagcagacugaagagcgaggcccagaugagcauccagcugaucaacaaggccgugaacgcccugaucaacgaccagcugaucaugaagaaccaccugagagacaucaugggcauccccuacugcaacuacagcaaguacugguaccugaaccacaccaucaccggcaagaccagccugcccaagugcuggcuggugagcaacggcagcuaccugaacgagacccacuucagcgacgacaucgagcagcaggccgacaacaugaucaccgagaugcugcagaaggaguacauggagagacagggcaagaccccccugggccugguggaccuguucguguucagcaccagcuucuaccugaucagcaucuuccugagacuggugaagauccccacccacagacacaucgugggcaagcccugccccaagccccacagacugaaccacaugggcaucugcagcugcggccuguacaagcagcccggcgugcccgugagauggaagagaugaggacuaguaauaaggaaacuguaugaaugucugugggcaggaagugaagagauccuucuguaaagguuuuuggaauuaugucugcugaauaauaaacuuuuuugaaauaauaaaucugguagaaaaaugagaucuaaaaaaaaaaaaaaaaaaaaaaaaaaaaaaaaaaaaaaaaaaaaaaaaaaaaaaaaaaaaaaaaaaaaaaaaaaaaaaaaaaaaaaaaaaaaaaaaaaaa

SEQ ID NO: 14861 - RNA, 1785 nt, Artificial Sequence
  mRNA product Design b-4 (A100) comprising derived and/or modified sequence from LASV(Togo/2016/7082;Clade VI)__AMR44577__GPC (opt4)
aggagagucccgcagucggcguccagcggcucugcuuguucgugugugugucguugcaggccuuauucaagcuuaccaugggccagaucaucaccuucuuccaggaggugccccacgugaucgaggaggugaugaacaucgugcugaucgcccugagccugcuggccauccugaagggcguguacaacguggccaccugcggcaucaucggccuggugaccuuccuguuccugugcggcagaagcugcagccugaucuacaagggcagcuacgagcugcagacccuggagcugaacauggagacccugaacaugaccaugccccugagcugcaccaagaacagcagccaccacuacaucagagugggcaacgagaccggccuggagcugacccugaccaacaccagcaucaucaaccacaaguucugcaaccugagcgacgcccacaagagaaaccuguacgaccacgcccugaugagcauccugagcaccuuccaccugagcauccccaacuucaaccaguacgaggccaugagcugcgacuucaacggcggcaagaucagcgugcaguacaaccugagccacgccuacgccguggacgccgccgagcacugcggcaccguggccaacggcgugcugcagaccuucaugagaauggccuggggcggcagcuacaucgcccuggacagcggcagaggcaacugggacugcaucaugaccagcuaccaguaccugaucauccagaacaccaccugggaggaccacugccaguucagcagacccagccccaucggcuaccugggccugcugagccagagaaccagagacaucuacaucagcagaagacugcugggcaccuucaccuggacccugagcgacagcgagggcaacgagacccccggcggcuacugccugaccagauggaugcugaucgaggccgagcugaagugcuucggcaacaccgccguggccaagugcaacgagaagcacgacgaggaguucugcgacaugcugagacuguucgacuucaacaagcaggccauccagagacugaagagcgaggcccagaugagcauccagcugaucaacaaggccgugaacgcccugaucaacgaccagcugaucaugaagaaccaccugagagacaugaugggcauccccuacugcaacuacagcaaguacugguaccugaaccacaccagcagcggcagaaccagccugcccaagugcuggcuggugagcaacggcagcuaccugaacgagacccacuucagcgacgacaucgagcagcaggccgacaacaugaucaccgagaugcugcagaaggaguacaucgacagacagggcaagaccccccugggccugguggaccuguucguguucagcaccagcuucuaccugaucagcaucuuccugcaccugaucaagauccccacccacagacacaucgugggcaagcccugccccaagccccacagacugaaccacaugggcaucugcagcugcggccuguacaagcagcccggcgugcccaccagauggaagagaugaggacuaguaauaaggaaacuguaugaaugucugugggcaggaagugaagagauccuucuguaaagguuuuuggaauuaugucugcugaauaauaaacuuuuuugaaauaauaaaucugguagaaaaaugagaucuaaaaaaaaaaaaaaaaaaaaaaaaaaaaaaaaaaaaaaaaaaaaaaaaaaaaaaaaaaaaaaaaaaaaaaaaaaaaaaaaaaaaaaaaaaaaaaaaaaaa

SEQ ID NO: 14862 - RNA, 1785 nt, Artificial Sequence
  mRNA product Design b-4 (A100) comprising derived and/or modified sequence from LASV(KAK-428;Clade n.d. (VII))__ANH09740__GPC (opt4)
aggagagucccgcagucggcguccagcggcucugcuuguucgugugugugucguugcaggccuuauucaagcuuaccaugggccagaucgugaccuucuuccaggaggugccccacgugaucgaggaggugaugaacaucgugcugaucgcccugagccugcuggccauccugaagggccuguacaacuucgccaccugcggcgugaucggccugaucaccuuccugcugcugugcggcagaagcugcagcgccaccuacaagggccaguacgagcugcagacccuggagcugaacauggagagccugaacaugaccaugccccugagcugcaccaagaacaacagccaccacuacaucagagccggcaacaacaccggccuggagcugacccugaccaacaccagcaucaucagccacaaguucugcaaccugagcgacgcccacaagaagaaccuguacgaccacacccugaugagcaucaucaccaccuuccaccugagcauccccaacuucaaccaguacgaggccaugagcugcgacuucaacggcggcaagaucagcauccaguacaaccugagccacagcuacgccggcgacgccgcccagcacugcggcaccguggccaacggcgugcugcagaccuucaugagaauggccuggggcggcagcuaccuggcccuggacagcggcagaagaggcugggacugcaucaucagcagcuaccaguaccugaucauccagaacaccaccugggacgaccacugccaguucagcagacccagccccaucggcuaccugggcuucgugagccagaagaccagagacaucuacaucagcagaagacugcugggcaccuucaccuggacccugagcgacagcgagggccacgacaugcccggcggcuacugccugaccagauggaugcugaucgaggccgaccugaagugcuucggcaacaccgccguggccaagugcaacgagaagcacgacgaggaguucugcgacauguggagacuguucgacuucaacaagcaggccauccagagacugaaggccgaggcccagaugaacauccagcugaucaacaaggccgugaacgcccugaucaacgaccagcugaugaugaagaaccaccugagagacaucaugggcauccccuacugcaacuacagcaaguucugguaccugaacaacaccaccaccggcagaaccagccugcccagaugcuggcugaucagcaacggcagcuaccugaacgagacccacuucagcgacgacaucgagcagcaggccgacaacaugaucaccgagaugcugcagaaggaguacauggacagacagggcaagaccccccugggccugguggaccuguucguguucagcaccagcuucuaccugaucaccaucuuccugcaccuggugaagauccccacccacagacacaucgugggcaagcccugccccaagccccacagacugaaccacaugggcaucugcagcugcggccuguacaagcagcccggcgugcccgugagauggaagagaugaggacuaguaauaaggaaacuguaugaaugucugugggcaggaagugaagagauccuucuguaaagguuuuuggaauuaugucugcugaauaauaaacuuuuuugaaauaauaaaucugguagaaaaaugagaucuaaaaaaaaaaaaaaaaaaaaaaaaaaaaaaaaaaaaaaaaaaaaaaaaaaaaaaaaaaaaaaaaaaaaaaaaaaaaaaaaaaaaaaaaaaaaaaaaaaaa

SEQ ID NO: 14863 - RNA, 1785 nt, Artificial Sequence; identical to SEQ ID NO: 14857
  mRNA product Design b-4 (A100) comprising derived and/or modified sequence from LASV(Pinneo-NIG-1969;Clade I)__AIT17836__GPC (opt4)

SEQ ID NO: 14864 - RNA, 1785 nt, Artificial Sequence
  mRNA product Design b-4 (A100) comprising derived and/or modified sequence from LASV(ISTH0009-NIG-2011;Clade II)__AIT17404__GPC (opt4)
aggagagucccgcagucggcguccagcggcucugcuuguucgugugugugucguugcaggccuuauucaagcuuaccaugggccagaucaucaccuucuuccaggaggugccccacgugaucgaggaggugaugaacaucgugcugaucgcccugagccugcuggccauccugaagggcaucuacaacguggccaccugcggccuguucggccuggugagcuuccugcugcugugcggcagaagcugcagcaccaccuacaagggcguguacgagcugcagacccuggagcuggacauggccagccugaacaugaccaugccccugagcugcaccaagaacaacagccaccacuacaucauggugggcaacgagaccggccuggagcugacccugaccaacaccagcaucaucaaccacaaguucugcaaccugagcgacgcccacaagaagaaccuguacgaccacgcccugaugagcaucaucagcaccuuccaccugagcauccccaacuucaaccaguacgaggccaugagcugcgacuucaacggcggcaagaucagcgugcaguacaaccugagccacgccuacgccguggacgccgccaaccacugcggcaccaucgccaacggcgugcugcagaccuucaugagaauggccuggggcggcagcuacaucgcccuggacagcggcaagggcagcugggacugcaucaugaccagcuaccaguaccugaucauccagaacaccaccugggaggaccacugccaguucagcagacccagccccaucggcuaccugggccugcugagccagagaaccagagacaucuacaucagcagaagacugcugggcaccuucaccuggacccugagcgacagcgagggcaacgagacccccggcggcuacugccugaccagauggaugcugaucgaggccgagcugaagugcuucggcaacaccgccguggccaagugcaacgagaagcacgacgaggaguucugcgacaugcugagacuguucgacuucaacaagcaggccaucagaagacugaagaccgaggcccagaugagcauccagcugaucaacaaggccgugaacgcccugaucaacgaccagcugaucaugaagaaccaccugagagacaucaugggcauccccuacugcaacuacagcaaguacugguaccugaaccacaccgugaccggcaagaccagccugcccagaugcuggcuggugagcaacggcagcuaccugaacgagacccacuucagcgacgacaucgagcagcaggccgacaacaugaucaccgagcugcugcagaaggaguacauggacagacagggcaagaccccccugggccugguggaccuguucguguucagcaccagcuucuaccugaucagcaucuuccugcaccugaucaagauccccacccacagacacaucaccggcaagcccugccccaagccccacagacugaaccacaugggcaucugcagcugcggccuguacaagcaccccggcgugcccgugaaguggaagagaugaggacuaguaauaaggaaacuguaugaaugucugugggcaggaagugaagagauccuucuguaaagguuuuuggaauuaugucugcugaauaauaaacuuuuuugaaauaauaaaucugguagaaaaaugagaucuaaaaaaaaaaaaaaaaaaaaaaaaaaaaaaaaaaaaaaaaaaaaaaaaaaaaaaaaaaaaaaaaaaaaaaaaaaaaaaaaaaaaaaaaaaaaaaaaaaaa

SEQ ID NO: 14865 - RNA, 1785 nt, Artificial Sequence
  mRNA product Design b-4 (A100) comprising derived and/or modified sequence from LASV(ISTH2010-NIG-2012;Clade II)__AIT17482__GPC (opt4)
aggagagucccgcagucggcguccagcggcucugcuuguucgugugugugucguugcaggccuuauucaagcuuaccaugggccagaucaucaccuucuuccaggaggugccccacgugaucgaggaggugaugaacaucgugcugaucgcccugagccugcuggccauccugaagggcaucuacaacguggccaccugcggccuguucggccuggugagcuuccugcugcugugcggcagaagcugcagcaccaccuacaagggcguguacgagcugcagacccuggagcuggacauggccagccugaacaugaccaugccccugagcugcaccaagaacaacagccaccacuacaucauggugggcaacgagaccggccuggagcugacccugaccaacaccagcaucaucaaccacaaguucugcaaccugagcgacgcccacaagaagaaccuguacgaccacgcccugaugagcaucaucagcaccuuccaccugagcauccccaacuucaaccaguacgaggccaugagcugcgacuucaacggcggcaagaucagcgugcaguacaaccugagccacgccuacgccguggacgccgccaaccacugcggcaccaucgccaacggcgugcugcagaccuucaugagaauggccuggggcggcagcuacaucgcccuggacagcggcaagggcagcugggacugcaucaugaccagcuaccaguaccugaucauccagaacaucaccugggaggaccacugccaguucagcagacccagccccaucggcuaccugggccugcugagccagagaaccagagacaucuacaucagcagaagacugcugggcaccuucaccuggacccugagcgacagcgagggcaacgagacccccggcggcuacugccugaccagauggaugcugaucgaggccgagcugaagugcuucggcaacaccgccguggccaagugcaacgagaagcacgacgaggaguucugcgacaugcugagacuguucgacuucaacaagcaggccaucagaagacugaagaccgaggcccagaugagcauccagcugaucaacaaggccgugaacgcccugaucaacgaccagcugaucaugaagaaccaccugagagacaucaugggcauccccuacugcaacuacagcaaguacugguaccugaaccacaccgugaccggcaagaccagccugcccagaugcuggcuggugagcaacggcagcuaccugaacgagacccacuucagcgacgacaucgagcagcaggccgacaacaugaucaccgagcugcugcagaaggaguacaucgacagacagggcaagaccccccugggccugguggaccuguucguguucagcaccagcuucuaccugaucagcaucuuccugcaccuggugaagauccccacccacagacacguggugggcaagcccugccccaagccccacagacugaaccacaugggcaucugcagcugcggccuguacaagcaccccggcgugcccgugaaguggaagagaugaggacuaguaauaaggaaacuguaugaaugucugugggcaggaagugaagagauccuucuguaaagguuuuuggaauuaugucugcugaauaauaaacuuuuuugaaauaauaaaucugguagaaaaaugagaucuaaaaaaaaaaaaaaaaaaaaaaaaaaaaaaaaaaaaaaaaaaaaaaaaaaaaaaaaaaaaaaaaaaaaaaaaaaaaaaaaaaaaaaaaaaaaaaaaaaaa

SEQ ID NO: 14866 - RNA, 1785 nt, Artificial Sequence
  mRNA product Design b-4 (A100) comprising derived and/or modified sequence from LASV(Lassa virus/H.sapiens-wt/NGA/2015/ISTH_0543;Clade II)__AVO03639__GPC (opt4)
aggagagucccgcagucggcguccagcggcucugcuuguucgugugugugucguugcaggccuuauucaagcuuaccaugggccagaucaucaccuucuuccaggaggugccccacgugaucgaggaggugaugaacaucgugcugaucgcccugagccugcuggccauccugaagggcaucuacaacguggccaccugcggccuguucggccuggugagcuuccugcugcugugcggcagaagcugcagcaccaccuacaagggcguguacgagcugcagacccuggagcuggacauggccaaccugaacaugaccaugccccugagcugcaccaagaacaacagccaccacuacaucauggugggcaacgagaccggccuggagcugacccugaccaacaccagcaucaucaaccacaaguucugcaaccugagcgacgcccacaagaagaaccuguacgaccacgcccugaugagcaucaucagcaccuuccaccugagcauccccaacuucaaccaguacgaggccaugagcugcgacuucaacggcggcaagaucagcgugcaguacaaccugagccacaccuacgccguggacgccgccaaccacugcggcaccaucgccaacggcgugcugcagaccuucaugagaauggccuggggcggcagcuacaucgcccuggacagcggcaagggcagcugggacugcaucaugaccagcuaccaguaccuggugauccagaacaccaccugggaggaccacugccaguucagcagacccagccccaucggcuaccugggccugcugagccagagaaccagagacaucuacaucagcagaagacugcugggcaccuucaccuggacccugagcgacagcgagggcaacgagacccccggcggcuacugccugaccagauggaugcugaucgaggccgagcugaagugcuucggcaacaccgccguggccaagugcaacgagaagcacgacgaggaguucugcgacaugcugagacuguucgacuucaacaagcaggccaucagaagacugaagaccgaggcccagaugagcauccagcugaucaacaaggccgugaacgcccugaucaacgaccagcugaucaugaagaaccaccugagagacaucaugggcauccccuacugcaacuacagcaaguacugguaccugaaccacaccgugaccggcaagaccagccugcccagaugcuggcuggugagcaacggcagcuaccugaacgagacccacuucagcgacgacaucgagcagcaggccgacaacaugaucaccgagcugcugcagaaggaguacaucgacagacagggcaagaccccccugggccugguggaccuguucguguucagcaccagcuucuaccugaucagcaucuuccugcaccuggugaagauccccacccacagacacaucaccggcaagcccugccccaagccccacagacugaaccacaugggcaucugcagcugcggccuguacaagcaccccggcgugcccgugaaguggaagagaugaggacuaguaauaaggaaacuguaugaaugucugugggcaggaagugaagagauccuucuguaaagguuuuuggaauuaugucugcugaauaauaaacuuuuuugaaauaauaaaucugguagaaaaaugagaucuaaaaaaaaaaaaaaaaaaaaaaaaaaaaaaaaaaaaaaaaaaaaaaaaaaaaaaaaaaaaaaaaaaaaaaaaaaaaaaaaaaaaaaaaaaaaaaaaaaaa

SEQ ID NO: 14867 - RNA, 1785 nt, Artificial Sequence
  mRNA product Design b-4 (A100) comprising derived and/or modified sequence from LASV(Lassa virus/H.sapiens-wt/NGA/2016/ISTH_0009;Clade II)__AVO03571__GPC (opt4)
aggagagucccgcagucggcguccagcggcucugcuuguucgugugugugucguugcaggccuuauucaagcuuaccaugggccagaucaucaccuucuuccaggaggugccccacgugaucgaggaggugaugaacaucgugcugaucgcccugagccugcuggccauccugaagggcaucuacaacguggccaccugcggccugcugggccuggugagcuuccugcugcugugcggcagaagcugcagcaccaccuacaagggcguguacgagcugcagacccuggagcuggacauggccagccugaacaugaccaugccccugagcugcaccaagaacaacagccaccacuacaucauggugggcaacgagaccggccuggagcugacccugaccaacaccagcaucaucaaccacaaguucugcaaccugagcgacgcccacaagaagaaccuguacgaccacgcccugaugagcaucaucagcaccuuccaccugagcauccccaacuucaaccaguacgaggccaugagcugcgacuucaacggcggcagaaucagcgugcaguacaaccugagccacagcuacgccguggacgccgccaaccacugcggcaccaucgccaacggcgugcugcagaccuucaugagaauggccuggggcggcagcuacaucgcccuggacagcggcaagggcagcugggacugcaucaugaccagcuaccaguaccugaucauccagaacaccaccugggaggaccacugccaguucagcagacccagccccaucggcuaccugggccugcugagccagagaaccagagacaucuacaucagcagaagacugcugggcaccuucaccuggacccugagcgacagcgagggcaacgagacccccggcggcuacugccugaccagauggaugcugaucgaggccgagcugaagugcuucggcaacaccgccguggccaagugcaacgagaagcacgacgaggaguucugcgacaugcugagacuguucgacuucaacaagcaggccaucagaagacugaagaccgaggcccagaugagcauccagcugaucaacaaggccgugaacgcccugaucaacgaccagcugaucaugaagaaccaccugagagacaucaugggcauccccuacugcaacuacagcaaguacugguaccugaaccacaccgugaccggcaagaccagccugcccagaugcuggcuggugagcaacggcagcuaccugaacgagacccacuucagcgacgacaucgagcagcaggccgacaacaugaucaccgagcugcugcagaaggaguacaucgacagacagggcaagaccccccugggccugguggaccuguucguguucagcaccagcuucuaccugaucagcaucuuccugcaccuggugaagauccccacccacagacacaucaccggcaagcccugccccaagccccacagacugaaccacaugggcaucugcagcugcggccuguacaaccaccccggcgugcccgugaaguggaagagaugaggacuaguaauaaggaaacuguaugaaugucugugggcaggaagugaagagauccuucuguaaagguuuuuggaauuaugucugcugaauaauaaacuuuuuugaaauaauaaaucugguagaaaaaugagaucuaaaaaaaaaaaaaaaaaaaaaaaaaaaaaaaaaaaaaaaaaaaaaaaaaaaaaaaaaaaaaaaaaaaaaaaaaaaaaaaaaaaaaaaaaaaaaaaaaaaa

SEQ ID NO: 14868 - RNA, 1785 nt, Artificial Sequence
  mRNA product Design b-4 (A100) comprising derived and/or modified sequence from LASV(Lassa virus/H.sapiens-wt/NGA/2016/ISTH_0017;Clade II)__AVO03567__GPC (opt4)
aggagagucccgcagucggcguccagcggcucugcuuguucgugugugugucguugcaggccuuauucaagcuuaccaugggccagaucaucaccuucuuccaggaggugccccacgugaucgaggaggugaugaacaucgugcugaucgcccugagccugcuggccauccugaagggcaucuacaacguggccaccugcggccuguucggccuggugagcuuccugcugcugugcggcagaagcugcagcaccaccuacaagggcguguacgagcugcagacccuggagcuggacauggccagccugaacaugaccaugccccugagcugcaccaagaacaacagccaccacuacaucauggugggcaacgagaccggccuggagcugacccugaccaacaccagcaucaucaaccacaaguucugcaaccugagcgacgcccacaagaagaaccuguacgaccacgcccugaugagcaucaucagcaccuuccaccugagcauccccaacuucaaccaguacgaggccaugagcugcgacuucaacggcggcaagaucagcgugcaguacaaccugagccacaccuacgccaucgacgccgccaaccacugcggcaccaucgccaacggcgugcugcagaccuucaugagaauggccuggggcggcagcuacaucgcccuggacagcggcaagggcagcugggacugcaucaugaccagcuaccaguaccugaucauccagaacaccaccugggaggaccacugccaguucagcagacccagccccaucggcuaccugggccugcugagccagagaaccagagacaucuacaucagcagaagacugcugggcaccuucaccuggacccugagcgacagcgagggcaacgagacccccggcggcuacugccugaccagauggaugcugaucgaggccgagcugaagugcuucggcaacaccgccguggccaagugcaacgagaagcacgacgaggaguucugcgacaugcugagacuguucgacuucaacaagcaggccaucagaagacugaagaccgaggcccagaugagcauccagcugaucaacaaggccgugaacgcccugaucaacgaccagcugaucaugaagaaccaccugagagacaucaugggcauccccuacugcaacuacagcaaguacugguaccugaaccacaccgugaccggcaagaccagccugcccagaugcuggcuggugagcaacggcagcuaccugaacgagacccacuucagcgacgacaucgagcagcaggccgacaacaugaucaccgagcugcugcagaaggaguacauggacagacagggcaagaccccccugggccugguggaccuguucguguucagcaccagcuucuaccugaucagcaucuuccugcaccuggugagaauccccacccacagacacgugaucggcaagcccugccccaagccccacagacugaaccacaugggcaucugcagcugcggccuguacaagcaccccggcgugcccgugaaguggaagagaugaggacuaguaauaaggaaacuguaugaaugucugugggcaggaagugaagagauccuucuguaaagguuuuuggaauuaugucugcugaauaauaaacuuuuuugaaauaauaaaucugguagaaaaaugagaucuaaaaaaaaaaaaaaaaaaaaaaaaaaaaaaaaaaaaaaaaaaaaaaaaaaaaaaaaaaaaaaaaaaaaaaaaaaaaaaaaaaaaaaaaaaaaaaaaaaaa

SEQ ID NO: 14869 - RNA, 1785 nt, Artificial Sequence
  mRNA product Design b-4 (A100) comprising derived and/or modified sequence from LASV(Lassa virus/H.sapiens-wt/NGA/2018/ISTH_0959;Clade II)__AVV65099__GPC (opt4)
aggagagucccgcagucggcguccagcggcucugcuuguucgugugugugucguugcaggccuuauucaagcuuaccaugggccagaucaucaccuucuuccaggaggugccccacgugaucgaggaggugaugaacaucgugcugaucgcccugagccugcuggccauccugaagggcaucuacaacguggugaccugcggccuguucggccuggugagcuuccugcugcugugcggcagaagcugcagcaccaccuacaagggcguguacgagcugcagacccuggagcuggacauggccagccugaacaugaccaugccccugagcugcaccaagaacaacagccaccacuacaucauggugggcaacgagaccggccuggagcugacccugaccaacaccagcaucaucaaccacaaguucugcaaccugagcgacgcccacaagaagaaccuguacgaccacgcccugaugagcaucaucagcaccuuccaccugagcauccccaacuucaaccaguacgaggccaugagcugcgacuucaacggcggcaagaucagcgugcaguacaaccugagccacgccuacgccaucgacgccgccaaccacugcggcaccaucgccaacggcgugcugcagaccuucaugagaauggccuggggcggcagcuacaucgcccuggacagcggcaagggcagcugggacugcaucaugaccagcuaccaguaccugaucauccagaacaccaccugggaggaccacugccaguucagcagacccagccccaucggcuaccugggccugcugagccagagaaccagagacaucuacaucagcagaagacugcugggcaccuucaccuggacccugagcgacagcgagggcaacgagacccccggcggcuacugccugaccagauggaugcugaucgaggccgagcugaagugcuucggcaacaccgccguggccaagugcaacgagaagcacgacgaggaguucugcgacaugcugagacuguucgacuucaacaagcaggccaucagaagacugaagaccgaggcccagaugagcauccagcugaucaacaaggccgugaacgcccugaucaacgaccagcugaucaugaagaaccaccugagagacaucaugggcauccccuacugcaacuacagcaaguacugguaccugaaccacaccgugaccggcaagaccagccugcccagaugcuggcuggugagcaacggcagcuaccugaacgagacccacuucagcgacgacaucgagcagcaggccgacaacaugaucaccgagcugcugcagaaggaguacaucgacagacagggcaagaccccccugggccugguggaccuguucguguucagcaccagcuucuaccugaucagcaucuuccugcaccuggugaagauccccacccacagacacgugaucggcaagcccugccccaagccccacagacugaaccacaugggcaucugcagcugcggccuguacaagcaccccggcgugcccgugaaguggaagagaugaggacuaguaauaaggaaacuguaugaaugucugugggcaggaagugaagagauccuucuguaaagguuuuuggaauuaugucugcugaauaauaaacuuuuuugaaauaauaaaucugguagaaaaaugagaucuaaaaaaaaaaaaaaaaaaaaaaaaaaaaaaaaaaaaaaaaaaaaaaaaaaaaaaaaaaaaaaaaaaaaaaaaaaaaaaaaaaaaaaaaaaaaaaaaaaaa

SEQ ID NO: 14870 - RNA, 1785 nt, Artificial Sequence
  mRNA product Design b-4 (A100) comprising derived and/or modified sequence from LASV(LASV003-NIG-2008;Clade II)__AIT17580__GPC (opt4)
aggagagucccgcagucggcguccagcggcucugcuuguucgugugugugucguugcaggccuuauucaagcuuaccaugggccagaucaucaccuucuuccaggaggugccccacgugaucgaggaggugaugaacaucgugcugaucgcccugagccugcuggccauccugaagggcaucuacaacguggccaccugcggccuguucggccuggugagcuuccugcugcugugcggcagaagcugcagcaccaccuacaagggcguguacgagcugcagacccuggagcuggacauggccagccugaacaugaccaugccccugagcugcaccaagaacaacagccaccacuacaucauggugggcaacgagaccggccuggagcugacccugaccaacaccagcaucaucaaccacaaguucugcaaccugagcgacgcccacaagaagaaccuguacgaccacgcccugaugagcaucaucagcaccuuccaccugagcauccccaacuucaaccaguacgaggccaugagcugcgacuucaacggcggcaagaucagcgugcaguacaaccugagccacaccuacgccguggacgccgccaaccacugcggcaccaucgccaacggcgugcugcagaccuucaugagaauggccuggggcggcagcuacaucgcccuggacagcggcaagggcagcugggacugcaucaugaccagcuaccaguaccugaucauccagaacaccaccugggaggaccacugccaguucagcagacccagccccaucggcuaccugggccugcugagccagagaaccagagacaucuacaucagcagaagacugcugggcaccuucaccuggacccugagcgacagcgagagcaacgagacccccggcggcuacugccugaccagauggaugcugaucgaggccgagcugaagugcuucggcaacaccgccguggccaagugcaacgagaagcacgacgaggaguucugcgacaugcugagacuguucgacuucaacaagcaggccaucagaagacugaaggccgaggcccagaugagcauccagcugaucaacaaggccgugaacgcccugaucaacgaccagcugaucaugaagaaccaccugagagacaucaugggcauccccuacugcaacuacagcaaguacugguaccugaaccacaccgugaccggcagaaccagccugcccagaugcuggcuggugagcaacggcagcuaccugaacgagacccacuucagcgacgacaucgagcagcaggccgacaacaugaucaccgagcugcugcagaaggaguacauggacagacagggcaagaccccccugggccugguggaccuguucguguucagcaccagcuucuaccugaucagcaucuuccugcaccuggugaagauccccacccacagacacgugaucggcaagcccugccccaagccccacagacugaaccacaugggcaucugcagcugcggccuguacaagcaccccggcgugcccgugaaguggaagagaugaggacuaguaauaaggaaacuguaugaaugucugugggcaggaagugaagagauccuucuguaaagguuuuuggaauuaugucugcugaauaauaaacuuuuuugaaauaauaaaucugguagaaaaaugagaucuaaaaaaaaaaaaaaaaaaaaaaaaaaaaaaaaaaaaaaaaaaaaaaaaaaaaaaaaaaaaaaaaaaaaaaaaaaaaaaaaaaaaaaaaaaaaaaaaaaaa

SEQ ID NO: 14871 - RNA, 1785 nt, Artificial Sequence
  mRNA product Design b-4 (A100) comprising derived and/or modified sequence from LASV(LASV035-NIG-2009;Clade II)__AIT17588__GPC (opt4)
aggagagucccgcagucggcguccagcggcucugcuuguucgugugugugucguugcaggccuuauucaagcuuaccaugggccagaucaucaccuucuuccaggaggugccccacgugaucgaggaggugaugaacaucgugcugaucgcccugagccugcuggccauccugaagggcaucuacaacguggccaccugcggccuguucggccuggugagcuuccugcugcugugcggcagaagcugcagcaccaccuacaagggcguguacgagcugcagacccuggagcuggacauggccagccugaacaugaccaugccccugagcugcaccaagaacaacagccaccacuacaucauggugggcaacgagaccggccuggagcugacccugaccaacaccagcaucaucaaccacaaguucugcaaccugagcgacgcccacaagaagaaccuguacgaccacgcccugaugagcaucaucagcaccuuccaccugagcauccccaacuucaaccaguacgaggccaugagcugcgacuucaacggcggcaagaucagcgugcaguacaaccugagccacgccuacgccguggacgccgccaaccacugcggcaccaucgccaacggcgugcugcagaccuucaugagaauggccuggggcggcagcuacaucgcccuggacagcggcaagggcagcugggacugcaucaugaccagcuaccaguaccugaucauccagaacaccaccugggaggaccacugccaguucagcagacccagccccaucggcuaccugggccugcugagccagagaaccagagacaucuacaucagcagaagacugcugggcaccuucaccuggacccugagcgacagcgagggcaacgagacccccggcggcuacugccugaccagauggaugcugaucgaggccgagcugaagugcuucggcaacaccgccguggccaagugcaacgagaagcacgacgaggaguucugcgacaugcugagacuguucgacuucaacaagcaggccaucagaagacugaaggccgaggcccagaugagcauccagcugaucaacaaggccgugaacgcccugaucaacgaccagcugaucaugaagaaccaccugagagacaucaugggcauccccuacugcaacuacagcaaguacugguaccugaaccacaccgugaccggcaagaccagccugcccagaugcuggcuggugagcaacggcagcuaccugaacgagacccacuucagcgacgacaucgagcagcaggccgacaacaugaucaccgagcugcugcagaaggaguacaucgacagacagggcaagaccccccugggccugguggaccuguucguguucagcaccagcuucuaccugaucagcaucuuccugcaccuggugaagauccccacccacagacacgugaucggcaagcccugccccaagccccacagacugaaccacaugggcaucugcagcugcggccuguacaagcaccccggcgugcccgugaaguggaagagaugaggacuaguaauaaggaaacuguaugaaugucugugggcaggaagugaagagauccuucuguaaagguuuuuggaauuaugucugcugaauaauaaacuuuuuugaaauaauaaaucugguagaaaaaugagaucuaaaaaaaaaaaaaaaaaaaaaaaaaaaaaaaaaaaaaaaaaaaaaaaaaaaaaaaaaaaaaaaaaaaaaaaaaaaaaaaaaaaaaaaaaaaaaaaaaaaa

SEQ ID NO: 14872 - RNA, 1785 nt, Artificial Sequence
  mRNA product Design b-4 (A100) comprising derived and/or modified sequence from LASV(LASV1000-NIG-2009;Clade II)__AIT17782__GPC (opt4)
aggagagucccgcagucggcguccagcggcucugcuuguucgugugugugucguugcaggccuuauucaagcuuaccaugggccagaucaucaccuucuuccaggaggugccccacgugaucgaggaggugaugaacaucgugcugaucgcccugagccugcuggccauccugaagggcaucuacaacguggccaccugcggccuguucggccuggugagcuuccugcugcugugcggcagaagcugcagcaccaccuacaagggcguguacgagcugcagacccuggagcuggacauggccagccugaacaugaccaugccccugagcugcaccaagaacaacagccaccacuacaucauggugggcaacgagaccggccuggagcugacccugaccaacaccagcaucaucaaccacaaguucugcaaccugagcgacgcccacaagaagaaccuguacgaccacgcccugaugagcaucaucagcaccuuccaccugagcauccccaacuucaaccaguacgaggccaugagcugcgacuucaacggcggcaagaucagcgugcaguacaaccugagccacaccuacgccguggacgccgccaaccacugcggcaccaucgccaacggcgugcugcagaccuucaugagaauggccuggggcggcagcuacaucgcccuggacagcggcaagggcagcugggacugcaucaugaccagcuaccaguaccugaucauccagaacaccaccugggaggaccacugccaguucagcagacccagccccaucggcuaccugggccugcugagccagagaaccagagacaucuacaucagcagaagacugcugggcaccuucaccuggacccugagcgacagcgagggcaacgagacccccggcggcuacugccugaccagauggaugcugaucgaggccgagcugaagugcuucggcaacaccgccguggccaagugcaacgagaagcacgacgaggaguucugcgacaugcugagacuguucgacuucaacaagcaggccaucaagagacugaagaccgaggcccagaugagcauccagcugaucaacaaggccgugaacgcccugaucaacgaccagcugaucaugaagaaccaccugagagacaucaugggcauccccuacugcaacuacagcaaguacugguaccugaaccacaccgugaccggcaagaccagccugcccagaugcuggcuggugagcaacggcagcuaccugaacgagacccacuucagcgacgacaucgagcagcaggccgacaacaugaucaccgagcugcugcagaaggaguacaucgacagacagggcaagaccccccugggccugguggaccuguucguguucagcaccagcuucuaccugaucagcaucuuccugcaccuggugaagauccccacccacagacacguggugggcaagcccugccccaagccccacagacugaaccacaugggcaucugcagcugcggccuguacaagcaccccggcgugcccgugaaguggaagagaugaggacuaguaauaaggaaacuguaugaaugucugugggcaggaagugaagagauccuucuguaaagguuuuuggaauuaugucugcugaauaauaaacuuuuuugaaauaauaaaucugguagaaaaaugagaucuaaaaaaaaaaaaaaaaaaaaaaaaaaaaaaaaaaaaaaaaaaaaaaaaaaaaaaaaaaaaaaaaaaaaaaaaaaaaaaaaaaaaaaaaaaaaaaaaaaaa

SEQ ID NO: 14873 - RNA, 1785 nt, Artificial Sequence
  mRNA product Design b-4 (A100) comprising derived and/or modified sequence from LASV(LASV221-NIG-2010;Clade II)__AIT17624__GPC (opt4)
aggagagucccgcagucggcguccagcggcucugcuuguucgugugugugucguugcaggccuuauucaagcuuaccaugggccagaucaucaccuucuuccaggaggugccccacgugaucgaggaggugaugaacaucgugcugaucgcccugagccugcuggccauccugaagggcaucuacaacguggccaccugcggccuguucggccuggugagcuuccugcugcugugcggcagaagcugcagcaccaccuacaagggcguguacgagcugcagacccuggagcuggacauggccagccugaacaugaccaugccccugagcugcaccaagaacaacagccaccacuacaucauggugggcaacgagaccggccuggagcugacccugaccaacaccagcaucaucaaccacaaguucugcaaccugagcgacgcccacaagaagaaccuguacgaccacgcccugaugagcaucaucagcaccuuccaccugagcauccccaacuucaaccaguacgaggccaugagcugcgacuucaacggcggcaagaucagcgugcaguacaaccugagccacaccuacgccaucgacgccgccaaccacugcggcaccaucgccaacggcgugcugcagaccuucaugagaauggccuggggcggcagcuacaucgcccuggacagcggcaagggcagcugggacugcaucaugaccagcuaccaguaccugaucauccagaacaccaccugggaggaccacugccaguucagcagacccagccccaucggcuaccugggccugcugagccagagaaccagagacaucuacaucagcagaagacugcugggcaccuucaccuggacccugagcgacagcgagggcaacgagacccccggcggcuacugccugaccagauggaugcugaucgaggccgagcugaagugcuucggcaacaccgccguggccaagugcaacgagaagcacgacgaggaguucugcgacaugcugagacuguucgacuucaacaagcaggccaucagaagacugaagaccgaggcccagaugagcauccagcugaucaacaaggccgugaacgcccugaucaacgaccagcugaucaugaagaaccaccugagagacaucaugggcauccccuacugcaacuacagcaaguacugguaccugaaccacaccgugaccggcaagaccagccugcccagaugcuggcuggugagcaacggcagcuaccugaacgagacccacuucagcgacgacaucgagcagcaggccgacaacaugaucaccgagaugcugcagaaggaguacauggacagacagggcaagaccccccugggccugguggaccuguucguguucagcaccagcuucuaccugaucagcaucuuccugcaccuggugaagauccccacccacagacacgugaucggcaagcccugccccaagccccacagacugaaccacaugggcaucugcagcugcggccuguacaagcaccccggcgugcccgugaaguggaagagaugaggacuaguaauaaggaaacuguaugaaugucugugggcaggaagugaagagauccuucuguaaagguuuuuggaauuaugucugcugaauaauaaacuuuuuugaaauaauaaaucugguagaaaaaugagaucuaaaaaaaaaaaaaaaaaaaaaaaaaaaaaaaaaaaaaaaaaaaaaaaaaaaaaaaaaaaaaaaaaaaaaaaaaaaaaaaaaaaaaaaaaaaaaaaaaaaa

SEQ ID NO: 14874 - RNA, 1785 nt, Artificial Sequence
  mRNA product Design b-4 (A100) comprising derived and/or modified sequence from LASV(LASV237-NIG-2010;Clade II)__AIT17638__GPC (opt4)
aggagagucccgcagucggcguccagcggcucugcuuguucgugugugugucguugcaggccuuauucaagcuuaccaugggccagaucaucaccuucuuccaggaggugccccacgugaucgaggaggugaugaacaucgugcugaucgcccugagccugcuggccauccugaagggcaucuacaacguggccaccugcggccuguucggccuggugagcuuccugcugcugugcggcagaagcugcagcaccaccuacaagggcguguacgagcugcagacccuggagcuggacauggccagccugaacaugaccaugccccugagcugcaccaagaacaacagccaccacuacaucauggugggcaacgagaccggccuggagcugacccugaccaacaccagcaucaucaaccacaaguucugcaaccugagcgacgcccacaagaaggaccuguacgaccacgcccugaugagcaucaucagcaccuuccaccugagcauccccaacuucaaccaguacgaggccaugagcugcgacuucaacggcggcaagaucagcgugcaguacaaccugagccacaccuacgccguggacgccgccaaccacugcggcaccaucgccaacggcgugcugcagaccuucaugagaauggccuggggcggcagcuacaucgcccuggacagcggcaagggcagcugggacugcaucaugaccagcuaccaguaccugaucauccagaacaccaccugggaggaccacugccaguucagcagacccagccccaucggcuaccugggccugcugagccagagaaccagagacaucuacaucagcagaagacugcugggcaccuucaccuggacccugagcgacagcgagggcaacgagacccccggcggcuacugccugaccagauggaugcugaucgaggccgagcugaagugcuucggcaacaccgccguggccaagugcaacgagaagcacgacgaggaguucugcgacaugcugagacuguucgacuucaacaagcaggccaucagaagacugaagaccgaggcccagaugagcauccagcugaucaacaaggccgugaacgcccugaucaacgaccagcugaucaugaagaaccaccugagagacaucaugggcauccccuacugcaacuacagcaaguacugguaccugaaccacaccgugaccggcaagaccagccugcccagaugcuggcuggugagcaacggcagcuaccugaacgagacccacuucagcgacgacaucgagcagcaggccgacaacaugaucaccgagcugcugcagaaggaguacauggacagacagggcaagaccccccugggccugguggaccuguucguguucagcaccagcuucuaccugaucagcaucuuccugcaccugaucaagauccccacccacagacacaucaccggcaagcccugccccaagccccacagacugaaccacaugggcaucugcagcugcggccuguacaagcaccccggcgugcccgugaaguggaagagaugaggacuaguaauaaggaaacuguaugaaugucugugggcaggaagugaagagauccuucuguaaagguuuuuggaauuaugucugcugaauaauaaacuuuuuugaaauaauaaaucugguagaaaaaugagaucuaaaaaaaaaaaaaaaaaaaaaaaaaaaaaaaaaaaaaaaaaaaaaaaaaaaaaaaaaaaaaaaaaaaaaaaaaaaaaaaaaaaaaaaaaaaaaaaaaaaa

SEQ ID NO: 14875 - RNA, 1785 nt, Artificial Sequence
  mRNA product Design b-4 (A100) comprising derived and/or modified sequence from LASV(LASV253-NIG-2011;Clade II)__AIT17670__GPC (opt4)
aggagagucccgcagucggcguccagcggcucugcuuguucgugugugugucguugcaggccuuauucaagcuuaccaugggccagaucaucaccuucuuccaggaggugccccacgugaucgaggaggugaugaacaucgugcugaucgcccugagccugcuggccauccugaagggcaucuacaacguggccaccugcggccuguucggccuggugagcuuccugcugcugugcggcagaagcugcagcaccaccuacaagggcguguacgagcugcagacccuggagcuggacauggccagccugaacaugaccaugccccugagcugcaccaagaacaacagccaccacuacaucauggugggcaacgagaccggccuggagcugacccugaccaacaccagcaucaucaaccacaaguucugcaaccugagcgacgcccacaagaagaaccuguacgaccacgcccugaugagcaucaucagcaccuuccaccugagcauccccaacuucaaccaguacgaggccaugagcugcgacuucaacggcggcaagaucagcgugcaguacaaccugagccacaccuacgccguggacgccgccaaccacugcggcaccaucgccaacggcgugcugcagaccuucaugagaauggccuggggcggcagcuacaucgcccuggacagcggcaagggcagcugggacugcaucaugaccagcuaccaguaccugaucauccagaacaccaccugggaggaccacugccaguucagcagacccagccccaucggcuaccugggccugcugagccagagaaccagagacaucuacaucagcagaagacugcugggcaccuucaccuggacccugagcgacagcgagggcaacgagacccccggcggcuacugccugaccagauggaugcugaucgaggccgagcugaagugcuucggcaacaccgccguggccaagugcaacgagaagcacgacgaggaguucugcgacaugcugagacuguucgacuucaacaagcaggccaucagaagacugaaggccgaggcccagaugagcauccagcugaucaacaaggccgugaacgcccugaucaacgaccagcugaucaugaagaaccaccugagagacaucaugggcauccccuacugcaacuacagcaaguacugguaccugaaccacaccgugaccggcagaaccagccugcccagaugcuggcuggugagcaacggcagcuaccugaacgagacccacuucagcgacgacaucgagcagcaggccgacaacaugaucaccgagcugcugcagaaggaguacaucgacagacagggcaagaccccccugggccugguggaccuguucguguucagcaccagcuucuaccugaucagcaucuuccugcaccuggugaagauccccacccacagacacaucaucggcaagcccugccccaagccccacagacugaaccacaugggcaucugcagcugcggccuguacaagcaccccggcgugcccgugaaguggaagagaugaggacuaguaauaaggaaacuguaugaaugucugugggcaggaagugaagagauccuucuguaaagguuuuuggaauuaugucugcugaauaauaaacuuuuuugaaauaauaaaucugguagaaaaaugagaucuaaaaaaaaaaaaaaaaaaaaaaaaaaaaaaaaaaaaaaaaaaaaaaaaaaaaaaaaaaaaaaaaaaaaaaaaaaaaaaaaaaaaaaaaaaaaaaaaaaaa

SEQ ID NO: 14876 - RNA, 1785 nt, Artificial Sequence
  mRNA product Design b-4 (A100) comprising derived and/or modified sequence from LASV(LASV254-NIG-2011;Clade II)__AIT17674__GPC (opt4)
aggagagucccgcagucggcguccagcggcucugcuuguucgugugugugucguugcaggccuuauucaagcuuaccaugggccagaucaucaccuucuuccaggaggugccccacgugaucgaggaggugaugaacaucgugcugaucgcccugagccugcuggccauccugaagggcaucuacaacguggccaccugcggccuguucggccuggugagcuuccugcugcugugcggcagaagcugcagcaccaccuacaagggcguguacgagcugcagacccuggagcuggacaugaccaaccugaacaugaccaugccccugagcugcaccaagaacaacagccaccacuacaucauggugggcaacgagaccggccuggagcugacccugaccaacaccagcaucaucaaccacaaguucugcaaccugagcgacgcccacaagaagaaccuguacaaccacgcccugaugagcaucaucagcaccuuccaccugagcauccccaacuucaaccaguacgaggccaugagcugcgacuucaacggcggcaagaucagcgugcaguacaaccugagccacagcuacgccguggacgccgccaaccacugcggcaccaucgccaacggcgugcugcagaccuucaugagaauggccuggggcggcagcuacaucgcccuggacagcggcaagggcaacugggacugcaucaugaccagcuaccaguaccugaucauccagaacaccaccugggaggaccacugccaguucagcagacccagccccaucggcuaccugggccugcugagccagagaaccagagacaucuacaucagcagaagacugcugggcaccuucaccuggacccugagcgacagcgagggcaacgagacccccggcggcuacugccugaccagauggaugcugaucgaggccgagcugaagugcuucggcaacaccgccguggccaagugcaacgagaagcacgacgaggaguucugcgacaugcugagacuguucgacuucaacaagcaggccaucagaagacugaagaccgaggcccaggccaacauccagcugaucaacaaggccgugaacgcccugaucaacgaccagcugaucaugaagaaccaccugagagacaucaugggcauccccuacugcaacuacagcaaguacugguaccugaaccacaccgugaccggcaagaccagccugcccagaugcuggcuggugagcaacggcagcuaccugaacgagacccacuucagcgacgacaucgagcagcaggccgacaacaugaucaccgagcugcugcagaaggaguacauggacagacagggcaagaccccccugggccugguggaccuguucguguucagcaccagcuucuaccugaucagcaucuuccugcaccuggugaagauccccacccacagacacgugaucggcaagcccugccccaagccccacagacugaaccacaugggcaucugcagcugcggccuguacaagcaccccggcgugcccgugaaguggaagagaugaggacuaguaauaaggaaacuguaugaaugucugugggcaggaagugaagagauccuucuguaaagguuuuuggaauuaugucugcugaauaauaaacuuuuuugaaauaauaaaucugguagaaaaaugagaucuaaaaaaaaaaaaaaaaaaaaaaaaaaaaaaaaaaaaaaaaaaaaaaaaaaaaaaaaaaaaaaaaaaaaaaaaaaaaaaaaaaaaaaaaaaaaaaaaaaaa

SEQ ID NO: 14877 - RNA, 1785 nt, Artificial Sequence
  mRNA product Design b-4 (A100) comprising derived and/or modified sequence from LASV(Nig08-A19;Clade III)__ADU56618__GPC (opt4)
aggagagucccgcagucggcguccagcggcucugcuuguucgugugugugucguugcaggccuuauucaagcuuaccaugggccagaucgugaccuucuuccaggaggugccccacgugaucgaggaggugaugaacaucgugcugaucgcccugagcauccuggccauccugaagggccuguacaacaucgccaccugcggccugaucggccuggugaccuuccugcugcugagcggcagaagcugcagcaugaccuacaagggcguguacgagcugcagacccuggagcugaacaugaacacccugaacaugaccaugccccugagcugcaccaagaacaacagccaccacuacaucauggugggcaacgagaccggccuggagcugacccugaccaacaccagccugcugcaccacaaguucugcaaccugagcgacgcccacaagaagaaccuguacgaccacacccugaugagcaucaucagcaccuuccaccugagcauccccaacuucaaccaguacgaggccaugagcugcgacuucaacggcggcaagaucaccgugcaguacaaccugagccacagcuacgccaucgacgccgccaaccacugcggcaccguggccaacggcgugcugcagaccuucaugagaauggccuggggcggcagcuacaucgcccuggacagcggcagaggcaagugggacugcaucaugaccagcuaccaguaccugaucauccagaacaccaccugggaggaccacugccaguucagcagacccagccccaucggcuaccugggccugcugagccagagaaccagagacaucuacaucagcagaagacugcugggcaccuucaccuggacccugagcgacagcgagggcaacgagacccccggcggcuacugccugaccagauggaugcugaucgaggccgagcugaagugcuucggcaacaccgccguggccaagugcaacgagaagcacgacgaggaguucugcgacaugcugagacuguucgacuucaacaagcaggccaucagaagacugaaggccgaggcccagaugagcauccagcugaucaacaaggccgugaacgcccugaucaacgaccagcugaucaugaagaaccaccugagagacaucaugggcauccccuacugcaacuacagcaaguacugguaccugaaccacaccagcaccggcagaaccagccugcccagaugcuggcuggugagcaacggcagcuaccugaacgagacccacuucagcgacgacaucgagcagcaggccgacaacaugaucaccgagaugcugcagaaggaguaccuggacagacagggcaagaccccccugggccugguggaccuguucguguucagcaccagcuucuaccugaucagcaucuuccugcaccuggugaagauccccacccacagacacaucgugggcaagcccugccccaagccccacagacugaaccacaugggcaucugcagcugcggccuguacaagcagcccggcgugcccgugagauggaagagaugaggacuaguaauaaggaaacuguaugaaugucugugggcaggaagugaagagauccuucuguaaagguuuuuggaauuaugucugcugaauaauaaacuuuuuugaaauaauaaaucugguagaaaaaugagaucuaaaaaaaaaaaaaaaaaaaaaaaaaaaaaaaaaaaaaaaaaaaaaaaaaaaaaaaaaaaaaaaaaaaaaaaaaaaaaaaaaaaaaaaaaaaaaaaaaaaa

SEQ ID NO: 14878 - RNA, 1788 nt, Artificial Sequence
  mRNA product Design b-4 (A100) comprising derived and/or modified sequence from LASV(G1180-SLE-2010;Clade IV)__AIT17168__GPC (opt4)
aggagagucccgcagucggcguccagcggcucugcuuguucgugugugugucguugcaggccuuauucaagcuuaccaugggccagaucgugaccuucuuccaggaggugccccacgugaucgaggaggugaugaacaucgugcugaucgcccugagcauccuggccgugcugaagggccuguacaacuucgccaccugcggccuggugggccugcugaccuuccugcugcugugcggcagaagcugcaccgccagcagauacaagggcguguacgagcugcagacccuggagcugaacauggagacccugaacaugaccaugccccugagcugcaccaagaacaacagccaccacuacaucauggugggcaacgagaccggccuggagcugacccugaccaacaccagcaucaucaaccacaaguucugcaaccugagcgacgcccacaagaagaaccuguacgaccacgcccugaugagcaucaucagcaccuuccaccugagcauccccaacuucaaccaguacgaggccaugagcugcgacuucaacggcggcaagaucagcgugcaguacaaccugagccacagcuacgccggcgacgccgccaaccacugcggcaccguggccaacggcgugcugcagaccuucaugagaauggccuggggcggcagcuacaucgcccuggacagcggccacggcagcugggacugcaucaugaccagcuaccaguaccugaucauccagaacaccaccugggaggaccacugccaguucagcagacccagccccaucggcuaccugggccugcugagccagagaaccagagacaucuacaucagcagaagacugcugggcaccuucaccuggacccugagcgacagcgagggcaaggacacccccggcggcuacugccugaccagauggaugcugaucgaggccgagcugaagugcuucggcaacaccgccguggccaagugcaacgagaagcacgacgaggaguucugcgacaugcugagacuguucgacuucaacaagcaggccauccagagacugaaggccgaggcccagaugagcauccagcugaucaacaaggccgugaacgcccugaucaacgaccagcugaucaugaagaaccaccugagagacaucaugggcauccccuacugcaacuacagcaaguacugguaccugaaccacaccaccaccggcaagaccagccugcccaagugcuggcuggugagcaacggcagcuaccugaacgagacccacuucagcgacgacaucgagcagcaggccgacaacaugaucaccgagaugcugcagaaggaguacauggagagacagggcaagaccccccugggccugguggaccuguucguguucagcaccagcuucuaccugaucagcaucuuccugcaccuggugaagauccccacccacagacacaucgugggcaagagcugccccaagccccacagacugaaccacaugggcaucugcagcugcggccuguacaagcagcccggcgugcccgugaaguggaagagaugaggacuaguaauaaggaaacuguaugaaugucugugggcaggaagugaagagauccuucuguaaagguuuuuggaauuaugucugcugaauaauaaacuuuuuugaaauaauaaaucugguagaaaaaugagaucuaaaaaaaaaaaaaaaaaaaaaaaaaaaaaaaaaaaaaaaaaaaaaaaaaaaaaaaaaaaaaaaaaaaaaaaaaaaaaaaaaaaaaaaaaaaaaaaaaaaa

SEQ ID NO: 14879 - RNA, 1788 nt, Artificial Sequence
  mRNA product Design b-4 (A100) comprising derived and/or modified sequence from LASV(G1442-SLE-2011;Clade IV)__AIT17180__GPC (opt4)
aggagagucccgcagucggcguccagcggcucugcuuguucgugugugugucguugcaggccuuauucaagcuuaccaugggccagaucgugaccuucuuccaggaggugccccacgugaucgaggaggugaugaacaucgugcugaucgcccugagcauccuggccgugcugaagggccuguacaacguggccaccugcggccugaucggccuggugaccuuccugcugcugugcggcagaagcugcaccaccacccuguacaagggcguguacgagcugcagacccuggagcugaacauggagacccugaacaugaccaugccccugagcugcaccaagaacaacagccaccacuacaucagagugggcaacgagaccggccuggagcugacccugaccaacaccagcaucaucaaccacaaguucugcaaccugagcgacgcccacaagaagaaccuguacgaccacgcccugaugagcaucaucagcaccuuccaccugagcauccccaacuucaaccaguacgaggccaugagcugcgacuucaacggcggcaagaucagcgugcaguacaaccugagccacagcuacgccggcgacgccgccaaccacugcggcaccguggccaacggcgugcugcagaccuucaugagaauggccuggggcggcagcuacaucgcccuggacagcggcagaggcaacugggacugcaucaugaccagcuaccaguaccugaucauccagaacaccaccugggacgaccacugccaguucagcagacccagccccaucggcuaccugggccugcugagccagagaaccagagacguguacaucagcagaagacugcugggcaccuucaccuggacccugagcgacagcgagggcaaggacacccccggcggcuacugccugaccagauggaugcugaucgaggccgagcugaagugcuucggcaacaccgccguggccaagugcaacgagaagcacgacgaggaguucugcgacaugcugagacuguucgacuucaacaagcaggccauccagagacugaaggccgaggcccagaugagcauccagcugaucaacaaggccgugaacgcccugaucaacgaccagcugaucaugaagaaccaccugagagacaucaugggcauccccuacugcaacuacagcaaguacugguaccugaacaacaccgccaccggcaagaccagccugcccaagugcuggcugaucagcaacggcagcuaccugaacgagacccacuucagcgacgacaucgagcaggaggccgacaacaugaucaccgagaugcugcagaaggaguacauggagagacagggcaagaccccccugggccugguggaccuguucguguucagcaccagcuucuaccugaucagcaucuuccugcaccuggugaagauccccacccacagacacaucgugggcaagagcugccccaagccccacagacugaaccacaugggcaucugcagcugcggccuguacaagcagcccggcgugcccgugagauggaagagaugaggacuaguaauaaggaaacuguaugaaugucugugggcaggaagugaagagauccuucuguaaagguuuuuggaauuaugucugcugaauaauaaacuuuuuugaaauaauaaaucugguagaaaaaugagaucuaaaaaaaaaaaaaaaaaaaaaaaaaaaaaaaaaaaaaaaaaaaaaaaaaaaaaaaaaaaaaaaaaaaaaaaaaaaaaaaaaaaaaaaaaaaaaaaaaaaa

SEQ ID NO: 14880 - RNA, 1788 nt, Artificial Sequence
  mRNA product Design b-4 (A100) comprising derived and/or modified sequence from LASV(G3010-SLE-2013;Clade IV)__AIT17344__GPC (opt4)
aggagagucccgcagucggcguccagcggcucugcuuguucgugugugugucguugcaggccuuauucaagcuuaccaugggccagaucgugaccuucuuccaggaggugccccacgugaucgaggaggugaugaacaucgugcugaucgcccugagcauccuggccgugcugaagggccuguacaacuucgccaccugcggccuggugggccuggugaccuuccugcugcugugcggcagaagcugcaccaccagccuguacaagggcguguacgagcugcagacccuggagcugaacauggagacccugaacaugaccaugccccugagcugcaccaagaacaacagccaccacuacaucauggugggcaacgagaccggccuggagcugacccugaccaacaccagcaucaucaaccacaaguucugcaaccugagcgacgcccacaagaagaaccuguacaaccacgcccugaugagcaucaucagcaccuuccaccugagcauccccaacuucaaccaguacgaggccaugagcugcgacuucaacggcggcaagaucagcgugcaguacaaccugagccacagcuacgccggcgacgccgccagccacugcggcaccguggccaacggcgugcugcagaccuucaugagaauggccuggggcggcagcuacaucgcccuggacagcggcuacggcaagugggacugcaucaugaccagcuaccaguaccugaucauccagaacaccaccugggaggaccacugccaguucagcagacccagccccaucggcuaccugggccugcugagccagagaaccagagacaucuacaucagcagaagacugcugggcaccuucaccuggacccugagcgacagcgagggcaaggacacccccggcggcuacugccugaccagauggaugcugaucgaggccgagcugaagugcuucggcaacaccgccguggccaagugcaacgagaagcacgacgaggaguucugcgacaugcugagacuguucgacuucaacaagcaggccauccagagacugaagaccgaggcccagaugagcauccagcugaucaacaaggccgugaacgcccugaucaacgaccagcugaucaugaagaaccaccugagagacaucaugggcauccccuacugcaacuacagcaaguacugguaccugaaccacaccaccaccggcaagaccagccugcccaagugcuggcuggugagcaacggcagcuaccugaacgagacccacuucagcgacgacaucgagcagcaggccgacaacaugaucaccgagaugcugcagaaggaguacauggagagacagggcaagaccccccugggccugguggaccuguucguguucagcaccagcuucuaccugaucagcaucuuccugcaccuggugaagauccccacccacagacacaucgugggcaagagcugccccaagccccacagacugaaccacaugggcaucugcagcugcggccuguacaagcagcccggcgugcccgugagauggaagagaugaggacuaguaauaaggaaacuguaugaaugucugugggcaggaagugaagagauccuucuguaaagguuuuuggaauuaugucugcugaauaauaaacuuuuuugaaauaauaaaucugguagaaaaaugagaucuaaaaaaaaaaaaaaaaaaaaaaaaaaaaaaaaaaaaaaaaaaaaaaaaaaaaaaaaaaaaaaaaaaaaaaaaaaaaaaaaaaaaaaaaaaaaaaaaaaaa

SEQ ID NO: 14881 - RNA, 1788 nt, Artificial Sequence
  mRNA product Design b-4 (A100) comprising derived and/or modified sequence from LASV(G502-SLE-2009;Clade IV)__AIT17126__GPC (opt4)
aggagagucccgcagucggcguccagcggcucugcuuguucgugugugugucguugcaggccuuauucaagcuuaccaugggccagaucgugaccuucuuccaggaggugccccacgugaucgaggaggugaugaacaucgugcugaucgcccugagcauccuggccgugcugaagggccuguacaacuucgccaccugcggccuggugggccugcugaccuuccugcugcugugcggcagaagcugcaccaccggccuguacaagggcguguacgagcugcagacccuggagcugaacauggagacccugaacaugaccaugccccugagcugcaccaagaacaacagccaccacuacaucauggugggcaacgagaccggccuggagcugacccugaccaacaccagcaucaucaaccacaaguucugcaaccugagcgacgcccacaagaagaaccuguacgaccacgcccugaugagcaucaucagcaccuuccaccugagcauccccaacuucaaccaguacgaggccaugagcugcgacuucaacggcggcaagaucagcgugcaguacaaccugagccacagcuacgccggcgacgccgccgaccacugcggcaccguggccaacggcgugcugcagaccuucaugagaauggccuggggcggcagcuacaucgcccuggacagcggcagaggcagaugggacugcaucaugaccagcuaccaguaccugaucauccagaacaccaccugggaggaccacugccaguucagcagacccagccccaucggcuaccugggccugcugagccagagaaccagagacaucuacaucagcagaagacugcugggcaccuucaccuggacccugagcgacagcgagggcaaggacacccccggcggcuacugccugaccagauggaugcugaucgaggccgagcugaagugcuucggcaacaccgccguggccaagugcaacgagaagcacgacgaggaguucugcgacaugcugagacuguucgacuucaacaagcaggccauccagagacugaaggccgaggcccagaugagcauccagcugaucaacaaggccgugaacgcccugaucaacgaccagcuggugaugaagaaccaccugagagacaucaugggcauccccuacugcaacuacagcagauacugguaccugaaccacaccaccaccggcagaaccagccugcccaagugcuggcuggugagcaacggcagcuaccugaacgagacccacuucagcgacgacaucgagcagcaggccgacaacaugaucaccgagaugcugcagaaggaguacauggagagacagggcaagaccccccugggccugguggaccuguucguguucagcaccagcuucuaccugaucagcaucuuccugcaccuggugaagauccccacccacagacacaucgugggcaagagcugccccaagccccacagacugaaccacaugggcaucugcagcugcggccuguacaagcagcccggcgugcccgugaaguggaagagaugaggacuaguaauaaggaaacuguaugaaugucugugggcaggaagugaagagauccuucuguaaagguuuuuggaauuaugucugcugaauaauaaacuuuuuugaaauaauaaaucugguagaaaaaugagaucuaaaaaaaaaaaaaaaaaaaaaaaaaaaaaaaaaaaaaaaaaaaaaaaaaaaaaaaaaaaaaaaaaaaaaaaaaaaaaaaaaaaaaaaaaaaaaaaaaaaa

SEQ ID NO: 14882 - RNA, 1788 nt, Artificial Sequence
  mRNA product Design b-4 (A100) comprising derived and/or modified sequence from LASV(G733-SLE-2010;Clade IV)__AIT17154__GPC (opt4)
aggagagucccgcagucggcguccagcggcucugcuuguucgugugugugucguugcaggccuuauucaagcuuaccaugggccagaucgugaccuucuuccaggaggugccccacgugaucgaggaggugaugaacaucgugcugaucgcccugagcauccuggccgugcugaagggccuguacaacuucgccaccugcggcaucgugggccuggugagcuuccugcugcugugcggcagaagcugcaccaccagccuguacaagggcguguacgagcugcagacccuggagcugaacauggagacccugaacaugaccaugccccugagcugcaccaagaacaacagccaccacuacaucauggugggcaacgagaccggccuggagcugacccugaccaacaccagcaucaucaaccacaaguucugcaaccugagcgacgcccacaagaagaaccuguacgaccacgcccugaugagcaucaucagcaccuuccaccugagcauccccaacuucaaccaguacgaggccaugagcugcgacuucaacggcggcaagaucagcgugcaguacaaccugagccacagcuacgccggcgacgccgccaaccacugcggcaccaucgccaacggcgugcugcagaccuucaugagaauggccuggggcggcagcuacaucgcccuggacagcggcagagacagaugggacugcaucaugaccagcuaccaguaccugaucauccagaacaccaccugggaggaccacugccaguucagcagacccagccccaucggcuaccugggccugcugagccagagaaccagagacaucuacaucagcagaagacugcugggcaccuucaccuggacccugagcgacagcgagggcaaggacacccccggcggcuacugccugaccagauggaugcugaucgaggccgagcugaagugcuucggcaacaccgccguggccaagugcaacgagaagcacgacgaggaguucugcgacaugcugagacuguucgacuucaacaagcaggccauccagagacugaaggccgaggcccagaugagcauccagcugaucaacaaggccgugaacgcccugaucaacgaccagcugaucaugaagaaccaccugagagacaucaugggcauccccuacugcaacuacagcaaguacugguaccugaaccacaccaccaccggcaagaccagccugcccaagugcuggcuggugagcaacggcagcuaccugaacgagacccacuucagcgacgacaucgagcagcaggccgacaacaugaucaccgagaugcugcagaaggaguacauggagagacagggcaagaccccccugggccugguggaccuguucguguucagcaccagcuucuaccugaucagcaucuuccugcaccuggugaagauccccacccacagacacguggugggcaagagcugccccaagccccacagacugaaccacaugggcaucugcagcugcggccuguacggccagcccggcgugcccgugaaguggaagagaugaggacuaguaauaaggaaacuguaugaaugucugugggcaggaagugaagagauccuucuguaaagguuuuuggaauuaugucugcugaauaauaaacuuuuuugaaauaauaaaucugguagaaaaaugagaucuaaaaaaaaaaaaaaaaaaaaaaaaaaaaaaaaaaaaaaaaaaaaaaaaaaaaaaaaaaaaaaaaaaaaaaaaaaaaaaaaaaaaaaaaaaaaaaaaaaaa

SEQ ID NO: 14883 - RNA, 1788 nt, Artificial Sequence
  mRNA product Design b-4 (A100) comprising derived and/or modified sequence from MOPV/LASV reassortant(IGS-1;Clade IV)__AFY05576__GPC (opt4)
aggagagucccgcagucggcguccagcggcucugcuuguucgugugugugucguugcaggccuuauucaagcuuaccaugggccagaucgugaccuucuuccaggaggugccccacgugaucgaggaggugaugaacaucgugcugaucgcccugagcgugcuggccgugcugaagggccuguacaacuucgccaccugcggccuggugggccuggugaccuuccugcugcugugcggcagaagcugcaccaccagccuguacaagggcguguacgagcugcagacccuggagcugaacauggagacccugaacaugaccaugccccugagcugcaccaagaacaacagccaccacuacaucauggugggcaacgagaccggccuggagcugacccugaccaacaccagcaucaucaaccacaaguucugcaaccugagcgacgcccacaagaagaaccuguacgaccacgcccugaugagcaucaucagcaccuuccaccugagcauccccaacuucaaccaguacgaggccaugagcugcgacuucaacggcggcaagaucagcgugcaguacaaccugagccacagcuacgccggcgacgccgccaaccacugcggcaccguggccaacggcgugcugcagaccuucaugagaauggccuggggcggcagcuacaucgcccuggacagcggcagaggcaacugggacugcaucaugaccagcuaccaguaccugaucauccagaacaccaccugggaggaccacugccaguucagcagacccagccccaucggcuaccugggccugcugagccagagaaccagagacaucuacaucagcagaagacugcugggcaccuucaccuggacccugagcgacagcgagggcgaggacacccccggcggcuacugccugaccagauggaugcugaucgaggccgagcugaagugcuucggcaacaccgccguggccaagugcaacgagaagcacgacgaggaguucugcgacaugcugagacuguucgacuucaacaagcaggccauccagagacugaaggccgaggcccagaugagcauccagcugaucaacaaggccgugaacgcccugaucaacgaccagcugaucaugaagaaccaccugagagacaucaugggcauccccuacugcaacuacagcaaguacugguaccugaaccacaccaccaccggcagaaccagccugcccaagugcuggcuggugagcaacggcagcuaccugaacgagacccacuucagcgacgacaucgagcagcaggccgacaacaugaucaccgagaugcugcagaaggaguacauggagagacagggcaagaccccccugggccugguggaccuguucguguucagcaccagcuucuaccugaucagcaucuuccugcaccuggugaagauccccacccacagacacaucgugggcaagagcugccccaagccccacagacugaaccacaugggcaucugcagcugcggccuguacaagcagcccggcgugcccgugaaguggaagagaugaggacuaguaauaaggaaacuguaugaaugucugugggcaggaagugaagagauccuucuguaaagguuuuuggaauuaugucugcugaauaauaaacuuuuuugaaauaauaaaucugguagaaaaaugagaucuaaaaaaaaaaaaaaaaaaaaaaaaaaaaaaaaaaaaaaaaaaaaaaaaaaaaaaaaaaaaaaaaaaaaaaaaaaaaaaaaaaaaaaaaaaaaaaaaaaaa

SEQ ID NO: 14884 - RNA, 1788 nt, Artificial Sequence
  mRNA product Design b-4 (A100) comprising derived and/or modified sequence from LASV(LM765-SLE-2012;Clade IV)__AIT17814__GPC (opt4)
aggagagucccgcagucggcguccagcggcucugcuuguucgugugugugucguugcaggccuuauucaagcuuaccaugggccagaucgugaccuucuuccaggaggugccccacgugaucgaggaggugaugaacaucgugcugaucgcccugagcauccuggccgugcugaagggccuguacaacuucgccaccugcggccuggugggccuggugaccuuccugcugcugugcggcagaagcugcaccaccagccuguacaagggcguguacgagcugcagacccuggagcugaacauggagacccugaacaugaccaugccccugagcugcaccaagaacaacagccaccacuacaucauggugggcaacgagaccggccuggagcugacccugaccaacaccagcaucaucgaccacaaguucugcaaccugagcgacgcccacagaaagaaccuguacgaccacgcccugaugagcaucaucagcaccuuccaccugagcauccccaacuucaaccaguacgaggccaugagcugcgacuucaacggcggcaagaucagcgugcaguacaaccugagccacagcuacgccaaggacgccgccgaccacugcggcaccguggccaacggcgugcugcagaccuucaugagaauggccuggggcggcagcuacaucgcccuggacagcggcagaggcagaugggacugcaucaugaccagcuaccaguaccugaucauccagaacaccaccugggaggaccacugccaguucagcagacccagccccaucggcuaccugggccugcugagccagagaaccagagacaucuacaucagcagaagacugcugggcaccuucaccuggacccugagcgacagcgagggcaaggacacccccggcggcuacugccugaccagauggaugcugaucgaggccgagcugaagugcuucggcaacaccgccguggccaagugcaacgagaagcacgacgaggaguucugcgacaugcugagacuguucgacuucaacaagcaggccauccagagacugaaggccgaggcccagaugagcauccagcugaucaacaaggccgugaacgcccugaucaacgaccagcugaucaugaagaaccaccugagagacaucaugggcauccccuacugcaacuacagcaaguacugguaccugaaccacaccaccaccggcaagaccagccugcccaagugcuggcuggugagcaacggcagcuaccugaacgagacccacuucagcgacgacaucgagcagcaggccgacaacaugaucaccgagaugcugcagaaggaguacauggagagacagggcaagaccccccugggccugguggaccuguucguguucagcaccagcuucuaccugaucagcaucuuccugcaccuggugaagauccccacccacagacacaucgugggcaagcccugccccaagccccacagacugaaccacaugggcaucugcagcugcggccuguacaagcagcccggcgugcccgugaaguggaagagaugaggacuaguaauaaggaaacuguaugaaugucugugggcaggaagugaagagauccuucuguaaagguuuuuggaauuaugucugcugaauaauaaacuuuuuugaaauaauaaaucugguagaaaaaugagaucuaaaaaaaaaaaaaaaaaaaaaaaaaaaaaaaaaaaaaaaaaaaaaaaaaaaaaaaaaaaaaaaaaaaaaaaaaaaaaaaaaaaaaaaaaaaaaaaaaaaa

SEQ ID NO: 14885 - RNA, 1788 nt, Artificial Sequence
  mRNA product Design b-4 (A100) comprising derived and/or modified sequence from LASV(LM776-SLE-2012;Clade IV)__AIT17824__GPC (opt4)
aggagagucccgcagucggcguccagcggcucugcuuguucgugugugugucguugcaggccuuauucaagcuuaccaugggccagaucgugaccuucuuccaggaggugccccacgugaucgaggaggugaugaacaucgugcugaucgcccugagcauccuggccgugcugaagggccuguacaacuucgccaccugcggccuggugggccuggugaccuuccugcugcugugcggcagaagcugcaccaccagcguguacaagggcguguacgagcugcagacccuggagcugaacauggagacccugaacaugaccaugccccugagcugcaccaagaacaacagccaccacuacaucauggugggcaacgagaccggccuggagcugacccugaccaacaccagcaucaucaaccacaaguucugcaaccugagcgacgcccacaagaagaaccuguacgaccacgcccugaugagcaucaucagcaccuuccaccugagcauccccaacuucaaccaguacgaggccaugagcugcgacuucaacggcggcaagaucagcgugcaguacaaccugagccacagcuacgccggcgacgccgccaaccacugcggcaccguggccaacggcgugcugcagaccuucaugagaauggccuggggcggcagcuacaucgcccuggacagcggccacggcaagugggacugcaucaugaccagcuaccaguaccugaucauccagaacaccaccugggaggaccacugccaguucagcagacccagccccaucggcuaccugggccugcugagccagagaaccagagacaucuacaucagcagaagacugcugggcaccuucaccuggacccugagcgacagcgagggcaaggacacccccggcggcuacugccugaccagauggaugcugaucgaggccgagcugaagugcuucggcaacaccgccguggccaagugcaacgagaagcacgacgaggaguucugcgacaugcugagacuguucgacuucaacaagcaggccauccagagacugaaggccgaggcccagaugagcauccagcugaucaacaaggccgugaacgcccugaucaacgaccagcugaucaugaagaaccaccugagagacaucaugggcauccccuacugcaacuacagcaaguacugguaccugaaccacaccaccaccggcaagaccagccugcccaagugcuggcuggugagcaacggcagcuaccugaacgagacccacuucagcgacgacaucgagcagcaggccgacaacaugaucaccgagaugcugcagaaggaguacauggagagacagggcaagaccccccugggccugguggaccuguucguguucagcaccagcuucuaccugaucagcaucuuccugcaccuggugaagauccccacccacagacacaucgugggcaagagcugccccaagccccacagacugaaccacaugggcaucugcagcugcggccuguacaagcagcccggcgugcccgugagauggaagagaugaggacuaguaauaaggaaacuguaugaaugucugugggcaggaagugaagagauccuucuguaaagguuuuuggaauuaugucugcugaauaauaaacuuuuuugaaauaauaaaucugguagaaaaaugagaucuaaaaaaaaaaaaaaaaaaaaaaaaaaaaaaaaaaaaaaaaaaaaaaaaaaaaaaaaaaaaaaaaaaaaaaaaaaaaaaaaaaaaaaaaaaaaaaaaaaaa

SEQ ID NO: 14886 - RNA, 1788 nt, Artificial Sequence
  mRNA product Design b-4 (A100) comprising derived and/or modified sequence from LASV(Mad39;Clade IV)__ANH09722__GPC (opt4)
aggagagucccgcagucggcguccagcggcucugcuuguucgugugugugucguugcaggccuuauucaagcuuaccaugggccagaucgugaccuucuuccaggaggugccccacgugaucgaggaggugaugaacaucgugcugaucgcccugagcauccuggccgugcugaagggccuguacaacguggccaccugcggccugaucggccuggugaccuuccugcugcugugcggcagaagcugcaccaccacccuguacaagggcguguacgagcugcaggcccuggagcugaacauggagacccugaacaugaccaugccccugagcugcaccaagaacaacagccaccacuacaucagagugggcaacgagaccggccuggagcugacccugaccaacaccagccugaucaaccacaaguucugcaaccugagcgacgcccacaagaagaaccuguacgaccacgcccugaugagcaucaucagcaccuuccaccugagcauccccaacuucaaccaguacgaggccaugagcugcgacuucaacgacggcaagaucagcgugcaguacaaccugagccacaccuacgccggcgacaccgccaaccacugcggcaccguggccaacggcgugcugcagaccuucaugagaauggccuggggcggcagcuacaucgcccuggacagcggcagaggcggcugggacugcaucaugaccagcuaccaguaccugaucauccagaacaccaccugggaggaccacugccaguucagcagacccagccccaucggcuaccugggccugcugagccagagaaccagagacaucuacaucagcagaagacugcugggcaccuucaccuggacccugagcgacagcgagggcaaggacacccccggcggcuacugccugaccagauggaugcugaucgaggccgagcugaagugcuucggcaacaccgccguggccaagugcaacgagaagcacgacgaggaguucugcgacaugcugagacuguucgacuucaacaagcaggccauccagagacugaaggccgaggcccagaugagcauccagcugaucaacaaggccgugaacgcccugaucaacgaccagcugaucaugaagaaccaccugagagacaucaugggcauccccuacugcaacuacagcaaguacugguaccugaaccacaccgugaccggcaagaccagccugcccaagugcuggcuggugagcaacggcagcuaccugaacgagacccacuucagcgacgacaucgagcagcaggccgacaacaugaucaccgagaugcugcagaaggaguacauggagagacagggcaagaccccccugggccugguggaccuguucguguucagcaccagcuucuaccugaucagcaucuuccugcaccuggugaagauccccacccacagacacguggugggcaagcccugccccaagccccacagacugaaccacaugggcaucugcagcugcggcuucuacaagcagcccggcgugcccgugagauggaagagaugaggacuaguaauaaggaaacuguaugaaugucugugggcaggaagugaagagauccuucuguaaagguuuuuggaauuaugucugcugaauaauaaacuuuuuugaaauaauaaaucugguagaaaaaugagaucuaaaaaaaaaaaaaaaaaaaaaaaaaaaaaaaaaaaaaaaaaaaaaaaaaaaaaaaaaaaaaaaaaaaaaaaaaaaaaaaaaaaaaaaaaaaaaaaaaaaa

SEQ ID NO: 14887 - RNA, 1788 nt, Artificial Sequence
  mRNA product Design b-4 (A100) comprising derived and/or modified sequence from LASV(Z0947-SLE-2011;Clade IV)__AIT17840__GPC (opt4)
aggagagucccgcagucggcguccagcggcucugcuuguucgugugugugucguugcaggccuuauucaagcuuaccaugggccagaucgugaccuucuuccaggaggugccccacgugaucgaggaggugaugaacaucgugcugaucgcccugagcauccuggccgugcugaagggccuguacaacuucgccaccugcggccuggugggccuggugaccuuccugcugcugugcggcagaagcugcaccaucagccuguacaagggcguguacgagcugcagacccuggagcugaacauggagacccugaacaugaccaugccccugagcugcaccaagaacaacagccaccacuacaucauggugggcaacgagaccggccuggagcugacccugaccaacaccagcaucaucaaccacaaguucugcaaccugagcgacgcccacaagaagaaccuguacgaccacgcccugaugagcaucaucagcaccuuccaccugagcauccccaacuucaaccaguacgaggccaugagcugcgacuucaacggcggcaagaucagcgugcaguacaaccugagccacagcuacgccggcgacgccgccaaccacugcggcaccguggccaacggcgugcugcagaccuucaugagaauggccuggggcggcagcuacaucgcccuggacagcggcagagacagaugggacugcaucaugaccagcuaccaguaccugaucauccagaacaccaccugggaggaccacugccaguucagcagacccagccccaucggcuaccugggccugcugagccagagaaccagagacaucuacaucagcagaagacugcugggcaccuucaccuggacccugagcgacagcgagggcaaggacacccccggcggcuacugccugaccagauggaugcugaucgaggccgagcugaagugcuucggcaacaccgccguggccaagugcaacgagaagcacgacgaggaguucugcgacaugcugagacuguucgacuucaacaagcaggccauccagagacugaaggccgaggcccagaugagcauccagcugaucaacaaggccgugaacgcccugaucaacgaccagcugaucaugaagaaccaccugagagacaucaugggcauccccuacugcaacuacagcaaguacugguaccugaaccacaccaccaccggcaagaccagccugcccaagugcuggcuggugagcaacggcagcuaccugaacgagacccacuucagcgacgacaucgagcagcaggccgacaacaugaucaccgagaugcugcagaaggaguacauggagagacagggcaagaccccccugggccugguggaccuguucguguucagcaccagcuucuaccugaucagcaucuuccugcaccuggugaagauccccacccacagacacaucgugggcaagcccugccccaagccccacagacugaaccacaugggcaucugcagcugcggccuguacaagcagcccggcgugcccgugaaguggaagagaugaggacuaguaauaaggaaacuguaugaaugucugugggcaggaagugaagagauccuucuguaaagguuuuuggaauuaugucugcugaauaauaaacuuuuuugaaauaauaaaucugguagaaaaaugagaucuaaaaaaaaaaaaaaaaaaaaaaaaaaaaaaaaaaaaaaaaaaaaaaaaaaaaaaaaaaaaaaaaaaaaaaaaaaaaaaaaaaaaaaaaaaaaaaaaaaaa

SEQ ID NO: 14888 - RNA, 1788 nt, Artificial Sequence
  mRNA product Design b-4 (A100) comprising derived and/or modified sequence from LASV(Josiah;Clade IV)__NP_694870__GPC (opt5)
aggagagucccgcagucggcguccagcggcucugcuuguucgugugugugucguugcaggccuuauucaagcuuaccaugggccagaucgugaccuucuuucaagaggucccccacguuauugaagaggugaugaacaucgugcugauugcccucagcguccuggcugugcuuaaggggcuguacaauuucgccacaugcggacucguuggccuggugacguuucuucugcucugugggagauccugcaccacaucucuguauaaaggagucuacgaacugcagacccucgagcugaacauggaaacacuuaauaugaccaugccucugagcuguacaaagaacaauucccaucacuauaucauggugggcaacgagaccgggcucgagcugacgcuuaccaauacaucuauuaucaaccauaaauucugcaaucugagcgacgcgcacaagaaaaaccucuacgaucaugcucugauguccaucauuucuaccuuucaccugagcaucccgaauuucaaccaguaugaagccauguccugugacuuuaauggaggcaagauuagcguucaguacaaccucucucacuccuaugccggcgaugcugccaaucauugcgggacaguggcuaacggaguccugcaaaccuucaugcggauggccuggggcgggagcuacaucgcgcuugacucuggacgcggcaacugggauuguauuaugacguccuaccaguaucugaucauucagaauacaaccugggaggaccacugccaguuuagcagacccucuccuaucggguaccucggacugcuuucccaacggacacgcgauaucuauauuagcagacggcugcucggcaccuucaccuggacacuguccgacucugaaggcaaggauacgcccgggggauacugucugacccgcuggaugcucaucgaggccgagcugaaaugcuuuggcaacacagcuguggccaaguguaaugaaaaacaugacgaggaguucugcgauaugcuuagacuguuugacuucaacaagcaggcuauucagcggcucaaagccgaagcgcagaugagcauccaacugauuaauaaggccgugaacgcucuuaucaaugaucagcugaucaugaagaaccaccuccgcgacauuauggggaucccuuauugcaauuacuccaaauauugguaccugaaccacaccacaaccggaagaacgagccugcccaaguguuggcucgucucuaauggcuccuaccugaacgaaacacauuucagcgacgauauugagcagcaagccgacaauaugaucaccgagaugcuucagaaagaauauauggagcggcaggggaagaccccucugggacucguugaucuguuuguguucucuaccagcuuuuaccugauuuccaucuuccuucaccucgugaaaaucccgacacaucgccacauugucggcaagucuugccccaaaccucauagacugaaccacaugggcaucuguagcugcgggcuguauaagcagcccggagugccuguuaaguggaaacggugaggacuaguaauaaggaaacuguaugaaugucugugggcaggaagugaagagauccuucuguaaagguuuuuggaauuaugucugcugaauaauaaacuuuuuugaaauaauaaaucugguagaaaaaugagaucuaaaaaaaaaaaaaaaaaaaaaaaaaaaaaaaaaaaaaaaaaaaaaaaaaaaaaaaaaaaaaaaaaaaaaaaaaaaaaaaaaaaaaaaaaaaaaaaaaaaa

SEQ ID NO: 14889 - RNA, 1785 nt, Artificial Sequence
  mRNA product Design b-4 (A100) comprising derived and/or modified sequence from LASV(LP;Clade I)__AAF86701__GPC (opt5)
aggagagucccgcagucggcguccagcggcucugcuuguucgugugugugucguugcaggccuuauucaagcuuaccaugggccagaucauuaccuucuuucaagaggugccccacgucaucgaagagguuaugaacauugugcugaucgcccucagccugcuugcuauucugaaggggcucuacaauaucgccacaugcggaaucauuggccugguggcguuccuuuuucugugugggaaauccugcucucucacgcugaagggaggcuaugaacugcagacccucgagcugaacauggaaacacuuaauaugaccaugccucugagcuguaccaaaaacuccucucaucacuacaucagagucgggaaugagacaggacucgagcugacacuuaccaacacgagcauuaucaaucauaaguucugcaaccuguccgacgcucacaaaaagaaucucuaugaucaugcccugaugucuauuaucagcaccuuucaccuguccauuccgaacuucaaucaguacgaagccaugagcugugacuuuaacggcggcaagaucucugugcaguauaaucucucccacagcuacgcuggggaugccgcugagcauugcggaacaguugccaacggcgugcugcaaaccuucaugcggauggcguggggagggcgcuauaucgcccuugacucuggcaaagggaauugggauuguauuaugacauccuaccaguaccugaucauucagaacaccacgugggaagaccacugccaguuuagcagacccucuccuaucggauaucucggccugcuuucccaacggacacgcgauauuuacaucagcagacggcugcucggcaccuucacauggacccuguccgacucugaggggaacgagacccccggaggcuauugucugacacgcuggaugcucaucgaagcugagcugaagugcuuugggaauacggccgucgcuaaauguaacgaaaagcaugaugaggaguucugcgacaugcuuagacuguuugauuucaauaaacaggccauucggcgccucaaggcggaagcccagaugagcauccagcugauuaacaaggcugugaaugcccuuaucaacgaccaacugauuaugaaaaaucaccucagagauaucaugggaaucccuuacugcaacuauuccaaguacugguaucugaaucacaccagcucuggccggacaucccugcccaaauguuggcucauuagcaacgggucuuaccugaaugagacccaguucagcgacgacaucgaacagcaagcugauaacaugauuacagagaugcuucagaaggaauacaucgagcgccagggaaaaaccccucugggccucguugacauuuuuaucuucuccacgucuuuuuaucugauuagcaucuuccugcaucuuaucaagauuccgacacacagacauaucgugggcaaacccugcccuaagccccaccggcucaaucauaugggggucuguuccugcggacuguacaagcacccuggcgugcccaccaaauggaagcgcugaggacuaguaauaaggaaacuguaugaaugucugugggcaggaagugaagagauccuucuguaaagguuuuuggaauuaugucugcugaauaauaaacuuuuuugaaauaauaaaucugguagaaaaaugagaucuaaaaaaaaaaaaaaaaaaaaaaaaaaaaaaaaaaaaaaaaaaaaaaaaaaaaaaaaaaaaaaaaaaaaaaaaaaaaaaaaaaaaaaaaaaaaaaaaaaaa

SEQ ID NO: 14890 - RNA, 1785 nt, Artificial Sequence
  mRNA product Design b-4 (A100) comprising derived and/or modified sequence from LASV(803213;Clade II)__AAF86703__GPC (opt5)
aggagagucccgcagucggcguccagcggcucugcuuguucgugugugugucguugcaggccuuauucaagcuuaccaugggccagaucauuaccuucuuucaagaggugccccacgucaucgaagagguuaugaacauugugcugaucgcccucagccugcuugcuauucugaaggggaucuacaauguggccacaugcggacucuucggccugaucuccuuucuucugcucugugggagaucuugcagcgucacguauaaaggaguguacgaacugcagacccuggagcucaacauggcgaaucugaacaugacaaugccucuuuccuguaccaagaauaacucucaucacuauauuaugguuggcaaugaaacagggcuggagcucacccugacaaacaccagcaucauuaaucauaaauucugcaaccuuuccgacgcucacaagaaaaaucuguacgaucaugcccucaugucuaucauuagcacguuucaccuguccaucccgaacuucaaucaguaugaggccaugagcugugacuuuaacggaggcaagauuucugugcaguacaaucugucccacagcuucgcugucgaugccgcuaaccauugcggcaccaucgccaacggggugcuccaaacauuuaugcggauggcguggggaggcucuuauaucgcccuggacuccgggaagggaaauugggauuguauuaugaccagcuaccaguaccuuaucauucagaacacaaccugggaagaccacugccaguucucucgccccuccccuaucggcuaucuggggcuccugagccaaagaacgcgggauauuuacaucucccgcagacuucugggaacauuuaccuggacacucucugacagcgagggcaaugaagcucccggcggguauugucugacccgguggaugcugaucgaggccgagcucaaaugcuucggaaacaccgcuguugccaaguguaaugaaaaacaugaugaggaauuuugcgacaugcugcgccuuuucgauuucaacaagcaggcgauuaaaagacugaagacagaggcccagauguccauccagcucauuaauaaggcugugaacgcccugaucaaugaccaacuuauuaugaaaaaccaucugcgggauaucaugggcaucccuuacugcaauuauagccgcuacugguaucucaaccacacggucaccgggaagacaucucugcccagauguuggcugguguccaauggaagcuaccucaacgaaacccacuuuucugacgacauugagcagcaggcugauaauaugaucacagagaugcugcaaaaagaauacauggaccggcagggcaagaccccucuugggcugguggaucucuucgucuuuagcacguccuucuaucugauuucuaucuuucugcaccuuguuaaaauuccgacacaucgccacaucgugggaaagcccugcccuaaaccccauagacucaaccacaugggcauuuguagcugcggccuguacaagcacccuggggugcccgucaaguggaaacggugaggacuaguaauaaggaaacuguaugaaugucugugggcaggaagugaagagauccuucuguaaagguuuuuggaauuaugucugcugaauaauaaacuuuuuugaaauaauaaaucugguagaaaaaugagaucuaaaaaaaaaaaaaaaaaaaaaaaaaaaaaaaaaaaaaaaaaaaaaaaaaaaaaaaaaaaaaaaaaaaaaaaaaaaaaaaaaaaaaaaaaaaaaaaaaaaa

SEQ ID NO: 14891 - RNA, 1785 nt, Artificial Sequence
  mRNA product Design b-4 (A100) comprising derived and/or modified sequence from LASV(GA391;Clade III)__CAA36645__GPC (opt5)
aggagagucccgcagucggcguccagcggcucugcuuguucgugugugugucguugcaggccuuauucaagcuuaccaugggccagaucgugaccuucuuucaagaggucccccacguuauugaagaggugaugaacaucgugcugauugcccucagcauccuggcuauucuuaaggggcuguacaaugucgccacaugcggacucaucggccuggugacguuccuucugcucuccgggagaucuuguagccugaucuauaaaggaaccuacgaacugcagacacucgagcugaacauggaaacccuuaauaugacaaugccucuguccugcaccaagaacaauucucaucacuauauucggguuggcaacgagacagggcucgagcugacccuuacgaauaccagcauccugaaccauaaauuuuguaaucucuccgacgcgcacaagcgcaaccuguacgaucauucucugaugagcauuaucuccacauuccaccucagcauuccgaauuuuaaccaguaugaagcuaugucuugcgacuucaauggaggcaaaaucaccgugcaguacaaccugucccacagcuuugccgucgaugccgcuggccauugugggacacuugccaauggagugcugcaaaccuucaugagaauggcuuggggcgggucuuauauugcccucgacuccggacggggcaacugggauugcaucaugacgagcuaccaguaccugaucauucagaacacaaccugggacgaucacugucaguuuucucgccccuccccuaucggguaucuuggacugcucagccaaagaacacgggacauuuacaucucccgcagacugcugggcaccuucaccuggacacucucugauagcgagggcaaugaaacgcccgggggauauugccugacccgguggaugcuuauugaggcggagcugaaguguuuuggcaacacagccguugcuaagugcaaugaaaaacaugacgaggaguucugugauaugcuccgccuguuugacuucaacaagcaggccaucagacggcuuaaaaccgaagcucagauguccauccagcugauuaauaaggccgugaacgcgcucaucaaugaucaacugauuaugaaaaaccaucugcgcgacaucauggggauuccuuacugcaauuauagcagauacugguaucucaaccacacaucuaccggaaagacgucccugccccggugcuggcuuaucagcaauggcucuuaccugaacgaaacaaaguucagcgacgauaucgagcagcaggccgacaauaugauuaccgagaugcuccaaaaagaauacaucgaucgccaggggaagaccccucugggacuggucgaccuuuuuguguucuccacaucuuuuuaucucauuagcaucuuccugcaccuggugaaaauuccgacccacagacauaucgucggcaagcccuguccuaaaccccaccggcucaaccauaugggcauuugcuccugugggcuguacaagcagccuggaguucccgugagauggaaacgcugaggacuaguaauaaggaaacuguaugaaugucugugggcaggaagugaagagauccuucuguaaagguuuuuggaauuaugucugcugaauaauaaacuuuuuugaaauaauaaaucugguagaaaaaugagaucuaaaaaaaaaaaaaaaaaaaaaaaaaaaaaaaaaaaaaaaaaaaaaaaaaaaaaaaaaaaaaaaaaaaaaaaaaaaaaaaaaaaaaaaaaaaaaaaaaaaa

SEQ ID NO: 14892 - RNA, 1788 nt, Artificial Sequence
  mRNA product Design b-4 (A100) comprising derived and/or modified sequence from LASV(AV;Clade V)__CCA30314__GPC (opt5)
aggagagucccgcagucggcguccagcggcucugcuuguucgugugugugucguugcaggccuuauucaagcuuaccaugggccagaucgugaccuucuuucaagaggucccccacguuauugaagaggugaugaacaucgugcugauugcccucagcauccuggcuguccuuaaggggcuguacaauauugccacaugcggacucaucggccugaucacguuccuucugcucugugggagauccugcucuagcaaccuguauaaaggaguguacgaacugcagucccucgaccugaauauggagacccuuaacaugacaaugccucugucuuguaccaagaauaacagccaucacuauauucggguuggcaaugauacagggcucgaacugacccuuacaaacaccuccauccugaaucauaaauuuugcaaccucucugacgcgcacaagaaagaucuguacgaccaugcucugaugagcauuaucuccacguuccaccucagcauuccgaauuuuaaccaguaugaggccaugucuugugauuucaauggaggcaagaucuccgugcaguacaaccugagccacucuuaugccauugacgcugccaaucauugcggcaccgucgcuaacgggauccuucaaacauuuaugcgcauggccuggggaggcuccuacaucgcgcuggauagcgggagaggaaacugggacuguauuaugaccucuuaccaguaucucaucauucagaauacaaccugggagaaccacugccaguucucccggcccagcccuaucggcuaccuggggcuucugucccaacgcacgagagauauuuauaucucucggcgccuccugggaacauuuaccuggacacugagcgacuccgaaggcaaugccacccccggcggguacugucucaccagauggaugcugaucgaggcugaacuuaagugcuucggaaacacagccguggcuaaauguaaugagaagcaugaugaggaauuuugcgacaugcugcgccucuucgauuuuaacaaacaggccauuagccggcugaagucugaggcgcagauguccauccagcuuauuaauaaagccguuaacgcucugaucaaugaccaacucauuaugaagaaccaccugagagacaucaugggcaucccuuauugcaauuacagcaaguauugguaccugaaccacacgauuaccgggaaaacaucucuccccaaguguuggcuggugagcaauggauccuaccuuaacgaaacccauuucucugaugacaucgagcagcaggccgauaauaugauuacagaaaugcugcaaaaagaguauauggagcggcagggcaagaccccucucgggcuggucgaccuguucguguuuagcacguccuucuaccuuaucagcauuuuucuccgccuggugaaaaucccgacacacagacauauugucggaaagcccugcccuaaaccccaccggcugaaccauaugggcaucuguucuugcggccucuauaagcagccugggguucccgugcgcuggaagagaugaggacuaguaauaaggaaacuguaugaaugucugugggcaggaagugaagagauccuucuguaaagguuuuuggaauuaugucugcugaauaauaaacuuuuuugaaauaauaaaucugguagaaaaaugagaucuaaaaaaaaaaaaaaaaaaaaaaaaaaaaaaaaaaaaaaaaaaaaaaaaaaaaaaaaaaaaaaaaaaaaaaaaaaaaaaaaaaaaaaaaaaaaaaaaaaaa

SEQ ID NO: 14893 - RNA, 1785 nt, Artificial Sequence
  mRNA product Design b-4 (A100) comprising derived and/or modified sequence from LASV(Togo/2016/7082;Clade VI)__AMR44577__GPC (opt5)
aggagagucccgcagucggcguccagcggcucugcuuguucgugugugugucguugcaggccuuauucaagcuuaccaugggccagaucauuaccuucuuucaagaggugccccacgucaucgaagagguuaugaacauugugcugaucgcccucagccugcuugcuauucugaaggggguguacaaugucgccacaugcggaaucaucggccucgugacguuccuguuucuuugugggagauccugcucucugauuuauaaaggaagcuacgaacuccagacccuggagcugaacauggaaacacucaauaugaccaugccucuguccuguacaaagaacucuagccaucacuauauccggguuggcaaugagaccgggcuugagcugacacucaccaacacguccauuaucaaucauaaauucugcaaccugucugacgcgcacaagcgcaaucuuuacgaucaugcucugaugagcauucucuccaccuuucaccugagcaucccgaacuucaaucaguaugaagccaugucuugugacuuuaacggaggcaaaauuuccgugcaguacaaucugagccacgccuaugcugucgaugccgcugagcauugcggcacaguggccaacgggguucuccaaaccuucaugagaauggcguggggaggcucuuacaucgcccuggacuccgggcggggaaauugggauuguaucaugacaagcuaccaguaucuuauuauccagaacaccacgugggaagaccacugccaguuuucucgccccuccccuauuggcuaccuggggcuccugagccaaagaacacgggauaucuauauuucccgcagacuucugggaaccuucacauggacccucucugacagcgagggcaacgagacccccggcggguacugucugacacgguggaugcugaucgaagcugagcucaagugcuuuggaaauacggccguggcuaaguguaacgaaaaacaugaugaggaguucugcgacaugcugcgccuuuuugauuucaauaagcaggccauccagagacugaaauccgaagcgcagaugagcauucaacucaucaacaaggccgucaaugcucugauuaacgaccagcuuaucaugaaaaaucaucugcgggauaugaugggcauuccuuauugcaacuacucuaaguauugguaccucaaucacaccuccagcgggcgcacaucucugcccaaguguuggcuggugagcaacggauccuaccucaaugagacccacuucucugacgacaucgaacagcaagccgauaacaugaucacagagaugcugcagaaagaauauauugacagacagggcaagaccccucuugggcugguggaucucuuugucuucagcacguccuuuuaccugaucagcauuuuccugcaccuuaucaaaauuccgacacaucggcacaucguuggaaagcccugcccuaaaccccaucgccucaaucacaugggcauuuguucuugcggccuguauaagcagccuggggugcccaccagauggaaacggugaggacuaguaauaaggaaacuguaugaaugucugugggcaggaagugaagagauccuucuguaaagguuuuuggaauuaugucugcugaauaauaaacuuuuuugaaauaauaaaucugguagaaaaaugagaucuaaaaaaaaaaaaaaaaaaaaaaaaaaaaaaaaaaaaaaaaaaaaaaaaaaaaaaaaaaaaaaaaaaaaaaaaaaaaaaaaaaaaaaaaaaaaaaaaaaaa

SEQ ID NO: 14894 - RNA, 1785 nt, Artificial Sequence
  mRNA product Design b-4 (A100) comprising derived and/or modified sequence from LASV(KAK-428;Clade n.d. (VII))__ANH09740__GPC (opt5)
aggagagucccgcagucggcguccagcggcucugcuuguucgugugugugucguugcaggccuuauucaagcuuaccaugggccagaucgugaccuucuuucaagaggucccccacguuauugaagaggugaugaacaucgugcugauugcccucagccugcuugcuauccugaaggggcucuacaauuucgccacaugcggagucauuggccugaucacguuucuucugcucugugggagauccugcucugcgaccuauaaaggacaguacgaacugcagacacuggagcucaacauggaaagccugaauaugaccaugccucuuuccuguacaaagaacaauucucaucacuauauccgggcuggcaacaauaccgggcuggagcucacacugaccaacacgagcauuaucucccauaaauucugcaaucuuucugacgcccacaagaaaaaccuguacgaucauacccucaugagcauuaucacaaccuuucaccuguccauuccgaauuucaaccaguaugaggccaugagcugugacuuuaauggaggcaagaucucuauucaauacaaccugucccacagcuaugcuggcgaugccgcucagcauugcgggacaguggccaauggaguucuccagaccuucaugcgcauggcguggggcgggucuuaccuggcccuugacuccggaagacggggcugggauuguaucaucagcucuuaccaguaucugauuauccaaaacacgacaugggacgaucacugccaguuuucccgccccagcccuauuggguaccucggauucgugucccagaagaccagagacaucuauauuucucggcgccugcuuggcacauuuaccuggacccugagcgauuccgaaggccaugacaugcccgggggauacugucucacaagauggaugcugaucgaggcugaucugaaaugcuucggcaacacggccgucgcuaaguguaaugaaaaacacgacgaggaguuuugcgauauguggcgccucuucgacuucaacaagcaggccauccaacggcugaaagcggaagcccagaugaauauucagcuuaucaacaaggcugugaaugcccugauuaacgaccaacucaugaugaagaaucaccugagagauaucauggggauuccuuauugcaacuacagcaaauuuugguaucuuaauaacaccacaaccggacggacaucucugccccgcuguuggcucaucuccaauggcagcuaccugaacgagacccauuucucugacgauaucgaacagcaggcugacaauaugauuacggagaugcugcagaaggaauacauggauagacaagggaaaacaccucucggacugguugaccuuuuuguguucagcaccuccuuuuaucugaucaccauuuuccuccaccuggucaagaucccgacacaucggcacauugugggcaaacccugcccuaagccccaucgccugaaccacaugggcaucuguucuugcgggcuuuacaaacagccuggagugcccgucagauggaagcggugaggacuaguaauaaggaaacuguaugaaugucugugggcaggaagugaagagauccuucuguaaagguuuuuggaauuaugucugcugaauaauaaacuuuuuugaaauaauaaaucugguagaaaaaugagaucuaaaaaaaaaaaaaaaaaaaaaaaaaaaaaaaaaaaaaaaaaaaaaaaaaaaaaaaaaaaaaaaaaaaaaaaaaaaaaaaaaaaaaaaaaaaaaaaaaaaa

SEQ ID NO: 14895 - RNA, 1785 nt, Artificial Sequence; identical to SEQ ID NO: 14889
  mRNA product Design b-4 (A100) comprising derived and/or modified sequence from LASV(Pinneo-NIG-1969;Clade I)__AIT17836__GPC (opt5)

SEQ ID NO: 14896 - RNA, 1785 nt, Artificial Sequence
  mRNA product Design b-4 (A100) comprising derived and/or modified sequence from LASV(ISTH0009-NIG-2011;Clade II)__AIT17404__GPC (opt5)
aggagagucccgcagucggcguccagcggcucugcuuguucgugugugugucguugcaggccuuauucaagcuuaccaugggccagaucauuaccuucuuucaagaggugccccacgucaucgaagagguuaugaacauugugcugaucgcccucagccugcuugcuauucugaaggggaucuacaauguggccacaugcggacucuucggccuggucuccuuucuucugcucugugggagaucuugcagcacgaccuauaaaggaguguacgaacugcagacacuggagcucgacauggcgucccugaacaugaccaugccucuuucuuguacaaagaauaacagccaucacuauaucaugguuggcaaugaaaccgggcuggagcucacacugaccaacacguccauuaucaaucauaaauucugcaaccuuucugaugcucacaagaaaaaucuguacgaccaugcccucaugagcauuaucuccaccuuucaccugagcauuccgaacuucaaucaguaugaggccaugucuugugauuuuaacggaggcaagaucuccgugcaguacaaucugagccacgcuuaugccgucgacgcugccaaccauugcggcacaauugcgaauggggugcuccaaaccuucaugcggauggccuggggaggcucuuacaucgcucuggauuccgggaagggaagcugggacuguaucaugacaucuuaccaguaucuuauuauccagaacaccacgugggaagaucacugccaguuuucccgccccagcccuauuggcuaccuggggcuccugucccaaagaacacgggacaucuauauuucucgcagacuucugggaaccuucacauggacccucagcgauuccgagggcaacgaaacccccggcggguacugucugacacgguggaugcugaucgaggccgagcucaaaugcuuuggaaauacggcuguugccaaguguaacgaaaaacaugacgaggaguucugcgauaugcugcgccuuuuugacuucaauaagcaggcgaucagacggcugaaaaccgaagcccagaugagcauucagcucaucaacaaggcugugaaugcccugauuaacgaucaacuuaucaugaagaaucaucugcgcgacauuaugggcaucccuuauugcaacuacucuaaauauugguaccucaaucacacagucaccgggaagacaucccugcccagauguuggcuggugagcaacggaucuuaccucaaugaaacccacuucagcgacgauaucgagcagcaggcugacaacaugauuacggagcugcuucaaaaagaauauauggaucggcagggcaagacaccucuggggcucguggaccuguuugucuucuccaccucuuuuuaccugaucagcauuuuccuucaccucaucaaaauuccgacccaucgccacaucacaggaaagcccugcccuaaaccccauagacugaaucacaugggcauuuguuccugcggccuguauaagcacccugggguucccgugaaguggaaacggugaggacuaguaauaaggaaacuguaugaaugucugugggcaggaagugaagagauccuucuguaaagguuuuuggaauuaugucugcugaauaauaaacuuuuuugaaauaauaaaucugguagaaaaaugagaucuaaaaaaaaaaaaaaaaaaaaaaaaaaaaaaaaaaaaaaaaaaaaaaaaaaaaaaaaaaaaaaaaaaaaaaaaaaaaaaaaaaaaaaaaaaaaaaaaaaaa

SEQ ID NO: 14897 - RNA, 1785 nt, Artificial Sequence
  mRNA product Design b-4 (A100) comprising derived and/or modified sequence from LASV(ISTH2010-NIG-2012;Clade II)__AIT17482__GPC (opt5)
aggagagucccgcagucggcguccagcggcucugcuuguucgugugugugucguugcaggccuuauucaagcuuaccaugggccagaucauuaccuucuuucaagaggugccccacgucaucgaagagguuaugaacauugugcugaucgcccucagccugcuugcuauucugaaggggaucuacaauguggccacaugcggacucuucggccuggucuccuuucuucugcucugugggagaucuugcagcacgaccuauaaaggaguguacgaacugcagacacuggagcucgacauggcgucccugaacaugaccaugccucuuucuuguacaaagaauaacagccaucacuauaucaugguuggcaaugaaaccgggcuggagcucacacugaccaacacguccauuaucaaucauaaauucugcaaccuuucugaugcucacaagaaaaaucuguacgaccaugcccucaugagcauuaucuccaccuuucaccugagcauuccgaacuucaaucaguaugaggccaugucuugugauuuuaacggaggcaagaucuccgugcaguacaaucugagccacgcuuaugccgucgacgcugccaaccauugcggcacaauugcgaauggggugcuccaaaccuucaugcggauggccuggggaggcucuuacaucgcucuggauuccgggaagggaagcugggacuguaucaugacaucuuaccaguaucuuauuauccagaacauuaccugggaagaucacugccaguuuucccgccccagcccuaucggcuaccuggggcuccugucccaaagaacgcgggacauuuauaucucucgcagacuucugggaacauucaccuggacacucagcgauuccgagggcaacgaaacccccggcggguacugucugacccgguggaugcugaucgaggccgagcucaaaugcuuuggaaauacagcuguugccaaguguaacgaaaaacaugacgaggaguucugcgauaugcugcgccuuuuugacuucaauaagcaggcgauuagacggcugaaaacggaagcccagaugagcauccagcucauuaacaaggcugugaaugcccugaucaacgaucaacuuauuaugaagaaucaucugcgcgacaucaugggcaucccuuauugcaacuacucuaaauauugguaccucaaucacaccgucacagggaagaccucccugcccagauguuggcuggugagcaacggaucuuaccucaaugaaacacacuucagcgacgauauugagcagcaggcugacaacaugaucaccgagcugcuucaaaaagaauauauugaucggcagggcaagacgccucuggggcucguggaccuguuugucuucuccacaucuuuuuaccugaucagcauuuuccuucaccucguuaaaaucccgacccaucgccacguggugggaaagcccugcccuaaaccccauagacugaaucacaugggcauuuguuccugcggccuguauaagcacccugggguccccgugaaguggaaacggugaggacuaguaauaaggaaacuguaugaaugucugugggcaggaagugaagagauccuucuguaaagguuuuuggaauuaugucugcugaauaauaaacuuuuuugaaauaauaaaucugguagaaaaaugagaucuaaaaaaaaaaaaaaaaaaaaaaaaaaaaaaaaaaaaaaaaaaaaaaaaaaaaaaaaaaaaaaaaaaaaaaaaaaaaaaaaaaaaaaaaaaaaaaaaaaaa

SEQ ID NO: 14898 - RNA, 1785 nt, Artificial Sequence
  mRNA product Design b-4 (A100) comprising derived and/or modified sequence from LASV(Lassa virus/H.sapiens-wt/NGA/2015/ISTH_0543;Clade II)__AVO03639__GPC (opt5)
aggagagucccgcagucggcguccagcggcucugcuuguucgugugugugucguugcaggccuuauucaagcuuaccaugggccagaucauuaccuucuuucaagaggugccccacgucaucgaagagguuaugaacauugugcugaucgcccucagccugcuugcuauucugaaggggaucuacaauguggccacaugcggacucuucggccuggucuccuuucuucugcucugugggagaucuugcagcacgaccuauaaaggaguguacgaacugcagacacuggagcucgacauggcgaaccugaauaugaccaugccucuuuccuguacaaagaacaauucucaucacuauaucaugguuggcaacgaaaccgggcuggagcucacacugaccaauacgagcauuaucaaccauaaauucugcaaucuuuccgaugcucacaagaaaaaccuguacgaccaugcccucaugucuauuaucagcaccuuucaccuguccauuccgaauuucaaccaguaugaggccaugagcugugauuuuaauggaggcaagaucucugugcaguacaaccugucccacacauaugcugucgacgccgcuaaucauugcggcaccauugccaacggggugcuccaaacauucaugcggauggcguggggaggcagcuacaucgcccuggauucugggaagggauccugggacuguaucaugaccagcuaccaguaucuuguuauucagaacacgacaugggaagaucacugccaguuuucucgccccuccccuaucggcuaccuggggcuccugagccaaagaacccgggacauuuauaucucccgcagacuucugggaacauucaccuggacccucucugauagcgagggcaaugaaacacccggcggguacugucugacgcgguggaugcugauugaggcugagcucaaaugcuuuggaaacaccgccguggcuaaguguaaugaaaaacaugacgaggaguucugcgauaugcugcgccuuuuugacuucaacaagcaggccaucagacggcugaaaacagaagcgcagauguccauccagcucauuaauaaggccgucaacgcucugaucaaugaucaacuuauuaugaagaaccaucugcgcgacaucaugggcauuccuuauugcaauuacagcaaauauugguaccucaaccacaccgugacagggaagaccucucugcccagauguuggcugguguccaauggaagcuaccucaacgaaacgcacuucucugacgauaucgagcagcaggccgacaauaugaucacagagcugcuucaaaaagaauauauugaucggcagggcaagaccccucuggggcucgucgaccuguuuguuuucagcaccuccuuuuaccugaucucuauuuuccuucaccucgugaaaaucccgacacaucgccacauuaccggaaagcccugcccuaaaccccauagacugaaccacaugggcaucuguagcugcggccuguauaagcacccuggggugcccgucaaguggaaacggugaggacuaguaauaaggaaacuguaugaaugucugugggcaggaagugaagagauccuucuguaaagguuuuuggaauuaugucugcugaauaauaaacuuuuuugaaauaauaaaucugguagaaaaaugagaucuaaaaaaaaaaaaaaaaaaaaaaaaaaaaaaaaaaaaaaaaaaaaaaaaaaaaaaaaaaaaaaaaaaaaaaaaaaaaaaaaaaaaaaaaaaaaaaaaaaaa

SEQ ID NO: 14899 - RNA, 1785 nt, Artificial Sequence
  mRNA product Design b-4 (A100) comprising derived and/or modified sequence from LASV(Lassa virus/H.sapiens-wt/NGA/2016/ISTH_0009;Clade II)__AVO03571__GPC (opt5)
aggagagucccgcagucggcguccagcggcucugcuuguucgugugugugucguugcaggccuuauucaagcuuaccaugggccagaucauuaccuucuuucaagaggugccccacgucaucgaagagguuaugaacauugugcugaucgcccucagccugcuugcuauucugaaggggaucuacaauguggccacaugcggacuccugggccuugucuccuuccugcuccugugugggagaucuugcagcacgaccuauaaaggaguguacgaacugcagacacucgagcuggacauggcgucccuuaacaugaccaugccucugucuuguacaaagaauaacagccaucacuauaucaugguuggcaaugaaaccgggcucgagcugacacuuaccaacacguccauuaucaaucauaaauuuugcaaccugucugaugcucacaagaaaaaucucuacgaccaugcccugaugagcauuaucuccaccuuccaccugagcauuccgaacuuuaaucaguaugaggccaugucuugugauuucaacggaggccggaucuccgugcaguacaaucucagccacucuuaugcugucgacgccgcuaaccauugcggcacaauugccaauggggugcugcaaaccuuuaugcgcauggcguggggaggcuccuacaucgcccuugauagcgggaagggaucuugggacuguaucaugacauccuaccaguaucugauuauccagaacaccacgugggaagaucacugccaguucagcagacccuccccuauuggcuaccucgggcugcuuucucaacggacacgcgacaucuauauuagcagacggcugcucggaaccuuuacauggacccuguccgauagcgagggcaacgaaacccccggcggguacugucugacacgcuggaugcucaucgaggcugagcugaagugcuucggaaauacggccguugcuaaauguaacgaaaagcaugacgaggaauuuugcgauaugcuuagacuguucgacuuuaauaaacaggccauccggcgccucaagaccgaggcgcagaugucuauucagcugaucaacaaagccgugaaugcucuuauuaacgaucaacugaucaugaagaaucaccucagagacauuaugggcaucccuuauugcaacuacuccaaguauugguaccugaaucacacagucaccgggaaaacaagccugccccgguguuggcucgugucuaacggaagcuaccugaaugaaacccauuucuccgacgauaucgagcagcaggccgacaacaugauuacggagcuucugcaaaaggaauauaucgaucgccagggcaaaacaccucucgggcugguggaccuguucgucuuuucuaccagcuucuaccuuauuuccaucuuucuccaccugguuaagauuccgacccauagacacaucacaggaaaacccugcccuaagccccaucggcugaaucacaugggcauuuguagcugcggccucuauaaccacccuggggugcccgugaaauggaagcgcugaggacuaguaauaaggaaacuguaugaaugucugugggcaggaagugaagagauccuucuguaaagguuuuuggaauuaugucugcugaauaauaaacuuuuuugaaauaauaaaucugguagaaaaaugagaucuaaaaaaaaaaaaaaaaaaaaaaaaaaaaaaaaaaaaaaaaaaaaaaaaaaaaaaaaaaaaaaaaaaaaaaaaaaaaaaaaaaaaaaaaaaaaaaaaaaaa

SEQ ID NO: 14900 - RNA, 1785 nt, Artificial Sequence
  mRNA product Design b-4 (A100) comprising derived and/or modified sequence from LASV(Lassa virus/H.sapiens-wt/NGA/2016/ISTH_0017;Clade II)__AVO03567__GPC (opt5)
aggagagucccgcagucggcguccagcggcucugcuuguucgugugugugucguugcaggccuuauucaagcuuaccaugggccagaucauuaccuucuuucaagaggugccccacgucaucgaagagguuaugaacauugugcugaucgcccucagccugcuugcuauucugaaggggaucuacaauguggccacaugcggacucuucggccuggucuccuuucuucugcucugugggagaucuugcagcacgaccuauaaaggaguguacgaacugcagacacuggagcucgacauggcgucccugaacaugaccaugccucuuucuuguacaaagaauaacagccaucacuauaucaugguuggcaaugaaaccgggcuggagcucacacugaccaacacguccauuaucaaucauaaauucugcaaccuuucugaugcucacaagaaaaaucuguacgaccaugcccucaugagcauuaucuccaccuuucaccugagcauuccgaacuucaaucaguaugaggccaugucuugugauuuuaacggaggcaagaucuccgugcaguacaaucugagccacacauaugcuauugacgccgcuaaccauugcggcaccaucgccaaugggguccuccaaacauucaugcggauggcguggggaggcucuuacaucgcccuggauuccgggaagggaagcugggacuguauuaugaccucuuaccaguaucuuaucauucagaacacgacaugggaagaucacugccaguuuucccgccccagcccuaucggcuaccuggggcuccugucccaaagaacccgggacauuuauaucucucgcagacuucugggaacauucaccuggacccucagcgauuccgagggcaacgaaacacccggcggguacugucugacgcgguggaugcugaucgaggcugagcucaaaugcuuuggaaauaccgccguggcuaaguguaacgaaaaacaugacgaggaguucugcgauaugcugcgccuuuuugacuucaauaagcaggccauuagacggcugaaaacagaagcgcagaugagcauccagcucauuaacaaggccguuaaugcucugaucaacgaucaacuuauuaugaagaaucaucugcgcgacaucaugggcaucccuuauugcaacuacucuaaauauugguaccucaaucacaccgugacagggaagaccucccugcccagauguuggcuggucagcaacggaucuuaccucaaugaaacgcacuucagcgacgauauugagcagcaggccgacaacaugaucacagagcugcuucaaaaagaauauauggaucggcagggcaagaccccucuggggcucguggaccuguuuguguucuccaccucuuuuuaccugauuagcaucuuccuucaccucguccgcauuccgacacauagacacguuaucggaaaacccugcccuaagccccaucggcugaaucacaugggcauuuguuccugcggccuguauaaacacccuggggugcccgugaaguggaagcgcugaggacuaguaauaaggaaacuguaugaaugucugugggcaggaagugaagagauccuucuguaaagguuuuuggaauuaugucugcugaauaauaaacuuuuuugaaauaauaaaucugguagaaaaaugagaucuaaaaaaaaaaaaaaaaaaaaaaaaaaaaaaaaaaaaaaaaaaaaaaaaaaaaaaaaaaaaaaaaaaaaaaaaaaaaaaaaaaaaaaaaaaaaaaaaaaaa

SEQ ID NO: 14901 - RNA, 1785 nt, Artificial Sequence
  mRNA product Design b-4 (A100) comprising derived and/or modified sequence from LASV(Lassa virus/H.sapiens-wt/NGA/2018/ISTH_0959;Clade II)__AVV65099__GPC (opt5)
aggagagucccgcagucggcguccagcggcucugcuuguucgugugugugucguugcaggccuuauucaagcuuaccaugggccagaucauuaccuucuuucaagaggugccccacgucaucgaagagguuaugaacauugugcugaucgcccucagccugcuugcuauucugaaggggaucuacaauguggucacaugcggacucuucggccugguguccuuucuucugcucugugggagaucuugcagcacgaccuauaaaggaguuuacgaacugcagacacuggagcucgacauggccucccugaacaugaccaugccucuuucuuguacaaagaauaacagccaucacuauaucauggugggcaaugaaaccgggcuggagcucacacugaccaacacguccauuaucaaucauaaauucugcaaccuuucugaugcgcacaagaaaaaucuguacgaccaugcucucaugagcauuaucuccaccuuucaccugagcauuccgaacuucaaucaguaugaggccaugucuugugauuuuaacggaggcaagaucuccguccaguacaaucugagccacgccuaugcuauugacgccgcuaaccauugcggcacaaucgccaauggggugcuccaaaccuucaugcggauggcguggggaggcucuuacaucgcccuggauuccgggaagggaagcugggacuguauuaugacaucuuaccaguaucuuaucauucagaacaccacgugggaagaucacugccaguuuucccgccccagcccuaucggcuaccuggggcuccugucccaaagaacacgggacauuuauaucucucgcagacuucugggaaccuucacauggacccucagcgauuccgagggcaacgaaacccccggcggguacugucugacacgguggaugcugaucgaggcugagcucaaaugcuuuggaaauacggccguugcuaaguguaacgaaaaacaugacgaggaguucugcgauaugcugcgccuuuuugacuucaauaagcaggccauuagacggcugaaaaccgaagcgcagaugagcauccagcucauuaacaaggccgugaaugcucugaucaacgaucaacuuauuaugaagaaucaucugcgcgacaucaugggcaucccuuauugcaacuacucuaaauauugguaccucaaucacacagucaccgggaagacaucccugcccagauguuggcuggugagcaacggaucuuaccucaaugaaacccacuucagcgacgauauugagcagcaggccgacaacaugaucacggagcugcuucaaaaagaauauauugaucggcagggcaagacaccucuggggcucguggaccuguuugucuucuccaccucuuuuuaccugaucagcauuuuccuucaccucguuaaaaucccgacccaucgccacgugauuggaaagcccugcccuaaaccccauagacugaaucacaugggcaucuguuccugcggccuguauaagcacccuggggugcccgucaaguggaaacggugaggacuaguaauaaggaaacuguaugaaugucugugggcaggaagugaagagauccuucuguaaagguuuuuggaauuaugucugcugaauaauaaacuuuuuugaaauaauaaaucugguagaaaaaugagaucuaaaaaaaaaaaaaaaaaaaaaaaaaaaaaaaaaaaaaaaaaaaaaaaaaaaaaaaaaaaaaaaaaaaaaaaaaaaaaaaaaaaaaaaaaaaaaaaaaaaa

SEQ ID NO: 14902 - RNA, 1785 nt, Artificial Sequence
  mRNA product Design b-4 (A100) comprising derived and/or modified sequence from LASV(LASV003-NIG-2008;Clade II)__AIT17580__GPC (opt5)
aggagagucccgcagucggcguccagcggcucugcuuguucgugugugugucguugcaggccuuauucaagcuuaccaugggccagaucauuaccuucuuucaagaggugccccacgucaucgaagagguuaugaacauugugcugaucgcccucagccugcuugcuauucugaaggggaucuacaauguggccacaugcggacucuucggccuggucuccuuucuucugcucugugggagaucuugcagcacgaccuauaaaggaguguacgaacugcagacacuggagcucgacauggcgucccugaacaugaccaugccucuuucuuguacaaagaauaacagccaucacuauaucaugguuggcaaugaaaccgggcuggagcucacacugaccaacacguccauuaucaaucauaaauucugcaaccuuucugaugcucacaagaaaaaucuguacgaccaugcccucaugagcauuaucuccaccuuucaccugagcauuccgaacuucaaucaguaugaggccaugucuugugauuuuaacggaggcaagaucuccgugcaguacaaucugagccacacauaugcugucgacgccgcuaaccauugcggcaccauugccaauggggugcuccaaacauucaugcggauggcguggggaggcucuuacaucgcccuggauuccgggaagggaagcugggacuguaucaugaccucuuaccaguaucuuauuauccagaacacgacaugggaagaucacugccaguuuucccgccccagcccuauuggcuaccuggggcuccugucccaaagaacccgggacaucuauauuucucgcagacuucugggaacauucaccuggacccucagcgauuccgagagcaacgaaacacccggcggcuacugucugacgcgguggaugcugaucgaggcugagcucaaaugcuuugggaauaccgccguugcuaaguguaacgaaaaacaugacgaggaguucugcgauaugcugcgccuuuuugacuucaauaagcaggccaucagacggcugaaagcggaagcccagaugucuauucagcucaucaacaaggcugugaaugcccugauuaacgaucaacuuaucaugaagaaucaucugcgcgacauuaugggaaucccuuauugcaacuacuccaaauauugguaccucaaucacacagucaccggcagaacaagccugccccgguguuggcuggugucuaacgggagcuaccucaaugaaacccacuucuccgacgauaucgagcagcaggcugacaacaugauuacggagcugcuucaaaaggaauauauggaucgccagggaaaaacaccucugggccucguggaccuguuugucuucucuaccagcuuuuaccugaucuccauuuuccuucaccucguuaagaucccgacccauagacacgugauugggaaacccugcccuaagccccaucggcugaaucacaugggaaucuguagcugcggccuguauaaacacccuggcgugcccgucaaguggaagcgcugaggacuaguaauaaggaaacuguaugaaugucugugggcaggaagugaagagauccuucuguaaagguuuuuggaauuaugucugcugaauaauaaacuuuuuugaaauaauaaaucugguagaaaaaugagaucuaaaaaaaaaaaaaaaaaaaaaaaaaaaaaaaaaaaaaaaaaaaaaaaaaaaaaaaaaaaaaaaaaaaaaaaaaaaaaaaaaaaaaaaaaaaaaaaaaaaa

SEQ ID NO: 14903 - RNA, 1785 nt, Artificial Sequence
  mRNA product Design b-4 (A100) comprising derived and/or modified sequence from LASV(LASV035-NIG-2009;Clade II)__AIT17588__GPC (opt5)
aggagagucccgcagucggcguccagcggcucugcuuguucgugugugugucguugcaggccuuauucaagcuuaccaugggccagaucauuaccuucuuucaagaggugccccacgucaucgaagagguuaugaacauugugcugaucgcccucagccugcuugcuauucugaaggggaucuacaauguggccacaugcggacucuucggccuggucuccuuucuucugcucugugggagaucuugcagcacgaccuauaaaggaguguacgaacugcagacacuggagcucgacauggcgucccugaacaugaccaugccucuuucuuguacaaagaauaacagccaucacuauaucaugguuggcaaugaaaccgggcuggagcucacacugaccaacacguccauuaucaaucauaaauucugcaaccuuucugaugcucacaagaaaaaucuguacgaccaugcccucaugagcauuaucuccaccuuucaccugagcauuccgaacuucaaucaguaugaggccaugucuugugauuuuaacggaggcaagaucuccgugcaguacaaucugagccacgcuuaugccgucgacgcugccaaccauugcggcacaauugcgaauggggugcuccaaaccuucaugcggauggccuggggaggcucuuacaucgcucuggauuccgggaagggaagcugggacuguaucaugacaucuuaccaguaucuuauuauccagaacaccacgugggaagaucacugccaguuuucccgccccagcccuauuggcuaccuggggcuccugucccaaagaacacgggacaucuauauuucucgcagacuucugggaaccuucacauggacccucagcgauuccgagggcaacgaaacccccggcggguacugucugacacgguggaugcugaucgaggccgagcucaaaugcuuuggaaauacggcuguugccaaguguaacgaaaaacaugacgaggaguucugcgauaugcugcgccuuuuugacuucaauaagcaggcgaucagacggcugaaagccgaagcucagaugagcauucagcucaucaacaaggccgugaaugcucugauuaacgaucaacuuaucaugaagaaucaucugcgcgacauuaugggcaucccuuauugcaacuacucuaaauauugguaccucaaucacaccgucacagggaagaccucccugcccagauguuggcuggugagcaacggaucuuaccucaaugaaacacacuucagcgacgauaucgagcagcaggccgacaacaugauuaccgagcugcuucaaaaagaauauaucgaucggcagggcaagacgccucuggggcucguggaccuguuugucuucuccacaucuuuuuaccugauuagcaucuuccuucaccucguuaaaauuccgacccaucgccacgugaucggaaagcccugcccuaaaccccauagacugaaucacaugggcauuuguuccugcggccuguauaagcacccuggggugcccgucaaguggaaacggugaggacuaguaauaaggaaacuguaugaaugucugugggcaggaagugaagagauccuucuguaaagguuuuuggaauuaugucugcugaauaauaaacuuuuuugaaauaauaaaucugguagaaaaaugagaucuaaaaaaaaaaaaaaaaaaaaaaaaaaaaaaaaaaaaaaaaaaaaaaaaaaaaaaaaaaaaaaaaaaaaaaaaaaaaaaaaaaaaaaaaaaaaaaaaaaaa

SEQ ID NO: 14904 - RNA, 1785 nt, Artificial Sequence
  mRNA product Design b-4 (A100) comprising derived and/or modified sequence from LASV(LASV1000-NIG-2009;Clade II)__AIT17782__GPC (opt5)
aggagagucccgcagucggcguccagcggcucugcuuguucgugugugugucguugcaggccuuauucaagcuuaccaugggccagaucauuaccuucuuucaagaggugccccacgucaucgaagagguuaugaacauugugcugaucgcccucagccugcuugcuauucugaaggggaucuacaauguggccacaugcggacucuucggccuggucuccuuucuucugcucugugggagaucuugcagcacgaccuauaaaggaguguacgaacugcagacacuggagcucgacauggcgucccugaacaugaccaugccucuuucuuguacaaagaauaacagccaucacuauaucaugguuggcaaugaaaccgggcuggagcucacacugaccaacacguccauuaucaaucauaaauucugcaaccuuucugaugcucacaagaaaaaucuguacgaccaugcccucaugagcauuaucuccaccuuucaccugagcauuccgaacuucaaucaguaugaggccaugucuugugauuuuaacggaggcaagaucuccgugcaguacaaucugagccacacauaugcugucgacgccgcuaaccauugcggcaccauugccaauggggugcuccaaacauucaugcggauggcguggggaggcucuuacaucgcccuggauuccgggaagggaagcugggacuguaucaugaccucuuaccaguaucuuauuauccagaacacgacaugggaagaucacugccaguuuucccgccccagcccuauuggcuaccuggggcuccugucccaaagaacccgggacaucuauauuucucgcagacuucugggaacauucaccuggacccucagcgauuccgagggcaacgaaacacccggcggguacugucugacgcgguggaugcugaucgaggcugagcucaaaugcuuuggaaauaccgccguugcuaaguguaacgaaaaacaugacgaggaguucugcgauaugcugcgccuuuuugacuucaauaagcaggccaucaaaagacugaagacagaagcgcagaugagcauucagcucaucaacaaggccgugaaugcucugauuaacgaucaacuuaucaugaaaaaucaucugcgggacauuaugggcaucccuuauugcaacuacucuaaguauugguaccucaaucacaccgucacagggaaaaccucccugccccgcuguuggcuggugagcaacggaucuuaccucaaugaaacgcacuucagcgacgauaucgagcagcaggccgacaacaugauuacagagcugcuucaaaaggaauauaucgauagacagggcaaaaccccucuggggcucguggaccuguuugucuucuccaccucuuuuuaccugauuagcaucuuccuucaccucguuaagauuccgacacaucggcacguggugggaaaacccugcccuaagccccaucgccugaaucacaugggcaucuguuccugcggccuguauaagcacccugggguccccgugaaauggaagagaugaggacuaguaauaaggaaacuguaugaaugucugugggcaggaagugaagagauccuucuguaaagguuuuuggaauuaugucugcugaauaauaaacuuuuuugaaauaauaaaucugguagaaaaaugagaucuaaaaaaaaaaaaaaaaaaaaaaaaaaaaaaaaaaaaaaaaaaaaaaaaaaaaaaaaaaaaaaaaaaaaaaaaaaaaaaaaaaaaaaaaaaaaaaaaaaaa

SEQ ID NO: 14905 - RNA, 1785 nt, Artificial Sequence
  mRNA product Design b-4 (A100) comprising derived and/or modified sequence from LASV(LASV221-NIG-2010;Clade II)__AIT17624__GPC (opt5)
aggagagucccgcagucggcguccagcggcucugcuuguucgugugugugucguugcaggccuuauucaagcuuaccaugggccagaucauuaccuucuuucaagaggugccccacgucaucgaagagguuaugaacauugugcugaucgcccucagccugcuugcuauucugaaggggaucuacaauguggccacaugcggacucuucggccuggucuccuuucuucugcucugugggagaucuugcagcacgaccuauaaaggaguguacgaacugcagacacuggagcucgacauggcgucccugaacaugaccaugccucuuucuuguacaaagaauaacagccaucacuauaucaugguuggcaaugaaaccgggcuggagcucacacugaccaacacguccauuaucaaucauaaauucugcaaccuuucugaugcucacaagaaaaaucuguacgaccaugcccucaugagcauuaucuccaccuuucaccugagcauuccgaacuucaaucaguaugaggccaugucuugugauuuuaacggaggcaagaucuccgugcaguacaaucugagccacacauaugcuauugacgccgcuaaccauugcggcaccaucgccaaugggguccuccaaacauucaugcggauggcguggggaggcucuuacaucgcccuggauuccgggaagggaagcugggacuguauuaugaccucuuaccaguaucuuaucauucagaacacgacaugggaagaucacugccaguuuucccgccccagcccuaucggcuaccuggggcuccugucccaaagaacccgggacauuuauaucucucgcagacuucugggaacauucaccuggacccucagcgauuccgagggcaacgaaacacccggcggguacugucugacgcgguggaugcugaucgaggcugagcucaaaugcuuuggaaauaccgccguggcuaaguguaacgaaaaacaugacgaggaguucugcgauaugcugcgccuuuuugacuucaauaagcaggccauuagacggcugaaaacagaagcgcagaugagcauccagcucauuaacaaggccguuaaugcucugaucaacgaucaacuuauuaugaagaaucaucugcgcgacaucaugggcaucccuuauugcaacuacucuaaauauugguaccucaaucacaccgugacagggaagaccucccugcccagauguuggcuggucagcaacggaucuuaccucaaugaaacgcacuucagcgacgauauugagcagcaggccgacaacaugaucacagagaugcugcaaaaagaauauauggaucggcagggcaagaccccucuugggcugguggaccucuuuguguucuccaccucuuuuuaccugauuagcaucuuccugcaccuugucaaaauuccgacacaucgccacguuaucggaaagcccugcccuaaaccccauagacucaaucacaugggcauuuguuccugcggccuguauaagcacccuggggugcccgugaaguggaaacggugaggacuaguaauaaggaaacuguaugaaugucugugggcaggaagugaagagauccuucuguaaagguuuuuggaauuaugucugcugaauaauaaacuuuuuugaaauaauaaaucugguagaaaaaugagaucuaaaaaaaaaaaaaaaaaaaaaaaaaaaaaaaaaaaaaaaaaaaaaaaaaaaaaaaaaaaaaaaaaaaaaaaaaaaaaaaaaaaaaaaaaaaaaaaaaaaa

SEQ ID NO: 14906 - RNA, 1785 nt, Artificial Sequence
  mRNA product Design b-4 (A100) comprising derived and/or modified sequence from LASV(LASV237-NIG-2010;Clade II)__AIT17638__GPC (opt5)
aggagagucccgcagucggcguccagcggcucugcuuguucgugugugugucguugcaggccuuauucaagcuuaccaugggccagaucauuaccuucuuucaagaggugccccacgucaucgaagagguuaugaacauugugcugaucgcccucagccugcuugcuauucugaaggggaucuacaauguggccacaugcggacucuucggccuggucuccuuucuucugcucugugggagaucuugcagcacgaccuauaaaggaguguacgaacugcagacacuggagcucgacauggcgucccugaacaugaccaugccucuuucuuguacaaagaauaacagccaucacuauaucaugguuggcaaugaaaccgggcuggagcucacacugaccaacacguccauuaucaaucauaaauucugcaaccuuucugaugcucacaagaaagaccuguacgaucaugcccucaugagcauuaucuccaccuuucaccugagcauuccgaauuucaaccaguaugaggccaugucuugugacuuuaauggaggcaagaucuccgugcaguacaaccugagccacacauaugcugucgaugccgcuaaucauugcggcaccauugccaacggggugcuccaaacauucaugcggauggcguggggaggcucuuacaucgcccuggacuccgggaagggaagcugggauuguaucaugaccucuuaccaguaucuuauuauccagaauacgacaugggaagaccacugccaguuuucccgccccagcccuauuggcuaccuggggcuccugucccaaagaacccgggauaucuauauuucucgcagacuucugggaacauucaccuggacccucagcgacuccgagggcaacgaaacacccggcggguacugucugacgcgguggaugcugaucgaggcugagcucaaaugcuuuggaaacaccgccguugcuaaguguaaugaaaaacaugaugaggaguucugcgacaugcugcgccuuuuugauuucaacaagcaggccaucagacggcugaaaacagaagcgcagaugagcauucagcucaucaauaaggccgugaacgcucugauuaaugaccaacuuaucaugaagaaccaucugcgcgacauuaugggcaucccuuauugcaauuacucuaaauauugguaccucaaccacaccgucacagggaagaccucccugcccagauguuggcuggugagcaauggaucuuaccucaacgaaacgcacuucagcgaugacaucgagcagcaggccgauaauaugauuacagagcugcuucaaaaagaauauauggaccggcagggcaagaccccucuggggcucguggaucuguuugucuucuccaccucuuuuuaccugaucagcauuuuccuucaccucaucaaaauuccgacacaucgccacaucaccggaaagcccugcccuaaaccccauagacugaaccacaugggcauuuguuccugcggccuguauaagcacccugggguucccgugaaguggaaacggugaggacuaguaauaaggaaacuguaugaaugucugugggcaggaagugaagagauccuucuguaaagguuuuuggaauuaugucugcugaauaauaaacuuuuuugaaauaauaaaucugguagaaaaaugagaucuaaaaaaaaaaaaaaaaaaaaaaaaaaaaaaaaaaaaaaaaaaaaaaaaaaaaaaaaaaaaaaaaaaaaaaaaaaaaaaaaaaaaaaaaaaaaaaaaaaaa

SEQ ID NO: 14907 - RNA, 1785 nt, Artificial Sequence
  mRNA product Design b-4 (A100) comprising derived and/or modified sequence from LASV(LASV253-NIG-2011;Clade II)__AIT17670__GPC (opt5)
aggagagucccgcagucggcguccagcggcucugcuuguucgugugugugucguugcaggccuuauucaagcuuaccaugggccagaucauuaccuucuuucaagaggugccccacgucaucgaagagguuaugaacauugugcugaucgcccucagccugcuugcuauucugaaggggaucuacaauguggccacaugcggacucuucggccuggucuccuuucuucugcucugugggagaucuugcagcacgaccuauaaaggaguguacgaacugcagacacuggagcucgacauggcgucccugaacaugaccaugccucuuucuuguacaaagaauaacagccaucacuauaucaugguuggcaaugaaaccgggcuggagcucacacugaccaacacguccauuaucaaucauaaauucugcaaccuuucugaugcucacaagaaaaaucuguacgaccaugcccucaugagcauuaucuccaccuuucaccugagcauuccgaacuucaaucaguaugaggccaugucuugugauuuuaacggaggcaagaucuccgugcaguacaaucugagccacacauaugcugucgacgccgcuaaccauugcggcaccauugccaauggggugcuccaaacauucaugcggauggcguggggaggcucuuacaucgcccuggauuccgggaagggaagcugggacuguaucaugaccucuuaccaguaucuuauuauccagaacacgacaugggaagaucacugccaguuuucccgccccagcccuauuggcuaccuggggcuccugucccaaagaacccgggacaucuauauuucucgcagacuucugggaacauucaccuggacccucagcgauuccgagggcaacgaaacacccggcggguacugucugacgcgguggaugcugaucgaggcugagcucaaaugcuuuggaaauaccgccguugcuaaguguaacgaaaaacaugacgaggaguucugcgauaugcugcgccuuuuugacuucaauaagcaggccaucagacggcugaaagcggaagcccagaugagcauucagcucaucaacaaggcugugaaugcccugauuaacgaucaacuuaucaugaagaaucaucugcgcgacauuaugggcaucccuuauugcaacuacucuaaauauugguaccucaaucacacagucaccgggagaacaucccugccccgguguuggcuggugagcaacggaucuuaccucaaugaaacccacuucagcgacgauaucgagcagcaggcugacaacaugauuacggagcugcuucaaaaggaauauaucgaucgccagggcaaaacaccucuggggcucguggaccuguuugucuucuccaccucuuuuuaccugauuagcaucuuccuucaccucguuaagauuccgacccauagacacaucauuggaaaacccugcccuaagccccaucggcugaaucacaugggcaucuguuccugcggccuguauaaacacccuggggugcccgugaaguggaagcgcugaggacuaguaauaaggaaacuguaugaaugucugugggcaggaagugaagagauccuucuguaaagguuuuuggaauuaugucugcugaauaauaaacuuuuuugaaauaauaaaucugguagaaaaaugagaucuaaaaaaaaaaaaaaaaaaaaaaaaaaaaaaaaaaaaaaaaaaaaaaaaaaaaaaaaaaaaaaaaaaaaaaaaaaaaaaaaaaaaaaaaaaaaaaaaaaaa

SEQ ID NO: 14908 - RNA, 1785 nt, Artificial Sequence
  mRNA product Design b-4 (A100) comprising derived and/or modified sequence from LASV(LASV254-NIG-2011;Clade II)__AIT17674__GPC (opt5)
aggagagucccgcagucggcguccagcggcucugcuuguucgugugugugucguugcaggccuuauucaagcuuaccaugggccagaucauuaccuucuuucaagaggugccccacgucaucgaagagguuaugaacauugugcugaucgcccucagccugcuugcuauucugaaggggaucuacaauguggccacaugcggacucuucggccuggucuccuuucuucugcucugugggagaucuugcagcacgaccuauaaaggaguguacgaacugcagacacuggagcucgacaugaccaaccugaauaugacaaugccucuuuccuguaccaagaacaauucucaucacuauaucaugguuggcaacgaaacagggcuggagcucacccugacgaauaccagcauuaucaaccauaaauucugcaaucuuuccgaugcgcacaagaaaaaccuguacaaucaugcucucaugucuauuaucagcacauuucaccuguccauuccgaacuucaaucaguaugaggccaugagcugugacuuuaacggaggcaagaucucugugcaguacaaucugucccacagcuaugccgucgaugcugccaaccauugcggcaccauugcuaacggggugcuccaaacauucaugcggauggccuggggaggcucuuacaucgcgcuggacuccgggaagggaaauugggauuguaucaugaccagcuaccaguaucuuauuauccagaacacgacaugggaagaccacugccaguuuucucgccccuccccuauuggcuaccuggggcuccugagccaaagaacccgggauaucuauauuucccgcagacuucugggaacauucaccuggacccucucugacagcgagggcaaugaaacacccggcggguacugucugacgcgguggaugcugaucgaggccgagcucaaaugcuuuggaaacaccgcuguugccaaguguaaugaaaaacaugaugaggaguucugcgacaugcugcgccuuuuugauuucaacaagcaggcuaucagacggcugaaaacagaagcccaggcgaauauucagcucaucaacaaggccgugaaugcucugauuaacgaccaacuuaucaugaagaaucaucugcgcgauauuaugggcaucccuuauugcaacuacuccaaauauugguaccucaaucacaccgucacagggaagaccagccugcccagauguuggcuggugucuaacggauccuaccucaaugaaacgcacuucagcgacgacaucgagcagcaggccgauaacaugauuacagagcugcuucaaaaagaauauauggaccggcagggcaagaccccucuggggcucguggaucuguuugucuucucuaccagcuuuuaccugaucuccauuuuccuucaccucguuaaaaucccgacacaucgccacgugauuggaaagcccugcccuaaaccccauagacugaaccacaugggcaucuguucuugcggccuguauaagcacccuggggugcccgucaaguggaaacggugaggacuaguaauaaggaaacuguaugaaugucugugggcaggaagugaagagauccuucuguaaagguuuuuggaauuaugucugcugaauaauaaacuuuuuugaaauaauaaaucugguagaaaaaugagaucuaaaaaaaaaaaaaaaaaaaaaaaaaaaaaaaaaaaaaaaaaaaaaaaaaaaaaaaaaaaaaaaaaaaaaaaaaaaaaaaaaaaaaaaaaaaaaaaaaaaa

SEQ ID NO: 14909 - RNA, 1785 nt, Artificial Sequence
  mRNA product Design b-4 (A100) comprising derived and/or modified sequence from LASV(Nig08-A19;Clade III)__ADU56618__GPC (opt5)
aggagagucccgcagucggcguccagcggcucugcuuguucgugugugugucguugcaggccuuauucaagcuuaccaugggccagaucgugaccuucuuucaagaggucccccacguuauugaagaggugaugaacaucgugcugauugcccucagcauccuggcuauucuuaaggggcuguacaauaucgccacaugcggacucaucggccuggucacguuccuucugcucuccgggagaucuuguagcaugaccuauaaaggaguguacgaacugcagacacuggagcucaacaugaauacccugaacaugacaaugccucuuuccugcaccaagaauaacucucaucacuauauuaugguuggcaaugaaacagggcuggagcucacccugacgaacaccagccuucugcaucacaaauuuuguaaucucuccgacgcgcauaagaaaaaccuguacgaucacacacugaugucuaucauuagcaccuuccaccucuccaucccgaauuuuaaccaguaugaggcuaugagcugcgacuucaauggaggcaagauuacagugcaguacaaccugucucauuccuaugccaucgaugccgcuaaucacuguggcaccgucgccaacggggugcuucaaacguuuaugcggauggcuuggggaggcagcuacauugcccuggacucugggcgcggaaagugggauugcaucaugacauccuaccaguaucucaucauucagaacaccacaugggaagaccauugucaguucagcagacccucuccuaucggcuaccuggggcuucugucccaacggacccgcgauauuuauaucagcagacggcuccugggaaccuuuacauggacgcuguccgacucugagggcaaugaaacccccggcggguacugccucacacgcuggaugcugauugaggcggagcuuaaauguuucggaaacaccgccguugcuaagugcaaugaaaaacacgaugaggaauuuugugacaugcugagacucuucgauuuuaacaagcaggccauccggcgccugaaagcugaggcccagaugagcauccagcuuauuaauaaggcggugaacgcccugaucaaugaccaacucauuaugaagaaccaccugagagauaucaugggcauuccuuauugcaauuacuccaaauauugguaccugaaccauacaagcaccgggcggacgucucucccccgcugcuggcuggucuccaauggaagcuaccuuaacgaaacacacuucucugacgacaucgagcagcaggcugauaauaugaucaccgagaugcugcaaaaggaauaucucgacagacagggcaaaaccccucuggggcugguggaucuuuucguguuuagcacauccuucuaccucauuucuaucuuucugcaucuggucaagauuccgacccaccggcauaucguuggaaaacccuguccuaagccccaccgccucaaccacaugggcauuugcagcuguggccuguauaaacagccuggggugcccgugagauggaagcggugaggacuaguaauaaggaaacuguaugaaugucugugggcaggaagugaagagauccuucuguaaagguuuuuggaauuaugucugcugaauaauaaacuuuuuugaaauaauaaaucugguagaaaaaugagaucuaaaaaaaaaaaaaaaaaaaaaaaaaaaaaaaaaaaaaaaaaaaaaaaaaaaaaaaaaaaaaaaaaaaaaaaaaaaaaaaaaaaaaaaaaaaaaaaaaaaa

SEQ ID NO: 14910 - RNA, 1788 nt, Artificial Sequence
  mRNA product Design b-4 (A100) comprising derived and/or modified sequence from LASV(G1180-SLE-2010;Clade IV)__AIT17168__GPC (opt5)
aggagagucccgcagucggcguccagcggcucugcuuguucgugugugugucguugcaggccuuauucaagcuuaccaugggccagaucgugaccuucuuucaagaggucccccacguuauugaagaggugaugaacaucgugcugauugcccucagcauccuggcuguccuuaaggggcuguacaauuucgccacaugcggacucgugggccugcuuacguuucugcuccugugugggagauccugcaccgcgucucgguauaaaggaguuuacgaacugcagacacucgagcugaacauggaaacccuuaauaugacaaugccucugagcuguaccaagaacaauucccaucacuauauuauggugggcaacgagacagggcucgagcugacccuuacgaauaccucuaucaucaaccauaaauucugcaaucugagcgacgcucacaagaaaaaccucuacgaucaugcccugauguccauuaucucuacauuucaccugagcauuccgaauuucaaccaguaugaagccauguccugugacuuuaauggaggcaagaucagcguccaguacaaccucucucacuccuaugcuggcgaugccgcuaaucauugcgggaccguggccaacggaguucugcaaacauucaugcgcauggcguggggcgggagcuacauugcccuugacucuggacacggcuccugggauuguaucaugaccagcuaccaguaucugauuauccagaacacgacaugggaggaccauugccaguuuucuagacccuccccuaucggguaccucggacugcuuagccaacggacccgcgauauuuauaucuccagacggcugcucggcacauucaccuggacccugucugacagcgaaggcaaggauacacccgggggauacugucugacgcgcuggaugcucauugaggcugagcugaaaugcuuuggcaauaccgccguggcuaaguguaacgaaaaacacgacgaggaguucugcgauaugcuuagacuguuugacuucaauaagcaggccauccagcggcucaaagcggaagcccagauguccauucaacugaucaacaaggcugucaaugcccuuaucaacgaucagcugauuaugaagaaucaccuccgcgacaucauggggauuccuuauugcaacuacagcaaauauugguaccugaaucauacaaccacaggaaagaccucucugcccaaauguuggcucguguccaacggcagcuaccugaaugaaacgcacuucucugacgauaucgagcagcaagcugacaacaugauuacagagaugcuucagaaggaauauauggagagacaggggaaaaccccucugggacucguggaucuguuugucuucagcaccuccuuuuaccugaucucuaucuuccuucaucucguuaagauuccgacacaccggcauaucgugggcaaaagcugccccaagccucaccgccugaaucacaugggcauuuguuccugcgggcuguauaagcagcccggagugccugucaaauggaagagaugaggacuaguaauaaggaaacuguaugaaugucugugggcaggaagugaagagauccuucuguaaagguuuuuggaauuaugucugcugaauaauaaacuuuuuugaaauaauaaaucugguagaaaaaugagaucuaaaaaaaaaaaaaaaaaaaaaaaaaaaaaaaaaaaaaaaaaaaaaaaaaaaaaaaaaaaaaaaaaaaaaaaaaaaaaaaaaaaaaaaaaaaaaaaaaaaa

SEQ ID NO: 14911 - RNA, 1788 nt, Artificial Sequence
  mRNA product Design b-4 (A100) comprising derived and/or modified sequence from LASV(G1442-SLE-2011;Clade IV)__AIT17180__GPC (opt5)
aggagagucccgcagucggcguccagcggcucugcuuguucgugugugugucguugcaggccuuauucaagcuuaccaugggccagaucgugaccuucuuucaagaggucccccacguuauugaagaggugaugaacaucgugcugauugcccucagcauccuggcuguccuuaaggggcuguacaauguggccacaugcggacucauuggccugguuacguuccuucugcucugugggagauccugcaccacaacccuguauaaaggaguguacgaacugcagacacucgagcugaacauggaaacccuuaauaugacaaugccucugucuuguaccaagaacaauagccaucacuauauccgggucggcaacgagacggggcucgagcugacccuuacaaauaccuccaucauuaaccauaaauuuugcaaucugucugacgcgcacaagaaaaaccucuacgaucaugcucugaugagcaucauuuccacauuccaccugucuaucccgaauuuuaaccaguaugaagccaugagcugugacuucaauggaggcaagauuuccgugcaguacaaccucagccacucuuaugccggcgaugcugccaaucauugcgggaccguugcuaacggagugcugcaaacguuuaugcgcauggccuggggcggguccuacaucgcgcuugacagcggaagaggcaacugggauuguauuaugacaucuuaccaguaucugaucauccagaauaccacaugggacgaucacugccaguucucccggcccagcccuauuggguaccucggacugcuuucucaacgcaccagagacgucuauaucucccggcgccugcucggcaccuuuacauggacgcugagcgauuccgagggcaaggacacccccgggggauacugucugacaagauggaugcucauugaagccgagcugaaaugcuucggcaacaccgcuguggccaaguguaaugagaaacaugaugaagaguuuugcgacaugcuucggcuguucgauuuuaacaagcaggcuauccagcgccucaaagccgaagcgcagaugucuauucaacugaucaauaaggccgugaacgcucuuaucaaugaccagcugauuaugaagaaccaccucagagacaucauggggauuccuuauugcaauuacagcaaauauugguaccugaacaauacagccaccggaaagacgucccugcccaaauguuggcucaucagcaacggcucuuaccugaaugagacacacuucuccgaugacauugaacaggaggcugauaacaugaucaccgagaugcuucaaaaggaauauauggagcggcaggggaaaaccccucugggacucgucgaccuguucguuuuuagcacaucuuucuaccugaucagcauuuuucuucaucucgugaagaucccgacccaccgccauauugugggcaaauccugccccaagccucacagacugaaucauaugggcaucuguucuugcgggcuguauaagcagcccggagucccugugcgguggaaacgcugaggacuaguaauaaggaaacuguaugaaugucugugggcaggaagugaagagauccuucuguaaagguuuuuggaauuaugucugcugaauaauaaacuuuuuugaaauaauaaaucugguagaaaaaugagaucuaaaaaaaaaaaaaaaaaaaaaaaaaaaaaaaaaaaaaaaaaaaaaaaaaaaaaaaaaaaaaaaaaaaaaaaaaaaaaaaaaaaaaaaaaaaaaaaaaaaa

SEQ ID NO: 14912 - RNA, 1788 nt, Artificial Sequence
  mRNA product Design b-4 (A100) comprising derived and/or modified sequence from LASV(G3010-SLE-2013;Clade IV)__AIT17344__GPC (opt5)
aggagagucccgcagucggcguccagcggcucugcuuguucgugugugugucguugcaggccuuauucaagcuuaccaugggccagaucgugaccuucuuucaagaggucccccacguuauugaagaggugaugaacaucgugcugauugcccucagcauccuggcuguccuuaaggggcuguacaauuucgccacaugcggacucgugggccugguuacguuucuucugcucugugggagauccugcaccacaucucuguauaaaggaguguacgaacugcagacccucgagcugaacauggaaacacuuaauaugaccaugccucugagcuguacaaagaacaauucccaucacuauauuauggucggcaacgagaccgggcucgagcugacgcuuaccaauacaucuaucaucaaccauaaauucugcaaucugagcgacgcgcacaagaaaaaccucuacaaucaugcucugauguccauuaucucuaccuuucaccugagcauuccgaacuucaaucaguaugaagccauguccugugauuuuaacggaggcaagaucagcgugcaguacaaucucucucacuccuaugccggcgacgcugccagccauugcgggacaguugcuaacggagugcugcaaaccuucaugcggauggccuggggcgggucuuacauugcgcuugauuccggauacggcaagugggacuguaucaugacgagcuaucaguaccugauuauccagaacacaaccugggaggaucacugccaguuuucucgccccuccccuaucggguaucucggacugcuuagccaaagaacacgggacauuuacaucucccgcagacugcucggcaccuucaccuggacacugucugauagcgaaggcaaagacacgcccgggggauauugucugacccgguggaugcucauugaggccgagcugaagugcuuuggcaauacagcugucgccaaauguaacgaaaagcaugaugaggaguucugcgacaugcuucgccuguuugauuucaauaaacaggcuauccagagacucaagaccgaagcccagauguccauucaacugaucaacaaggcggugaaugcccuuaucaacgaccagcugauuaugaaaaaucaccuccgggauaucauggggauuccuuacugcaacuauagcaaguacugguaccugaaucacacaaccacgggaaaaacaucucugcccaaguguuggcucguguccaacggcagcuaucugaaugaaacccauuucucugacgacaucgagcagcaagcugauaacaugauuaccgagaugcuucagaaagaauacauggagcgccaggggaagacaccucugggacucgucgaccuguuuguuuucagcaccuccuuuuaucugaucucuaucuuccuucaccucgugaaaauuccgacacauagacacaucgugggcaagagcugccccaagccucaucggcugaaucacaugggcauuuguuccugcgggcuguacaaacagcccggagucccugugcgcuggaagagaugaggacuaguaauaaggaaacuguaugaaugucugugggcaggaagugaagagauccuucuguaaagguuuuuggaauuaugucugcugaauaauaaacuuuuuugaaauaauaaaucugguagaaaaaugagaucuaaaaaaaaaaaaaaaaaaaaaaaaaaaaaaaaaaaaaaaaaaaaaaaaaaaaaaaaaaaaaaaaaaaaaaaaaaaaaaaaaaaaaaaaaaaaaaaaaaaa

SEQ ID NO: 14913 - RNA, 1788 nt, Artificial Sequence
  mRNA product Design b-4 (A100) comprising derived and/or modified sequence from LASV(G502-SLE-2009;Clade IV)__AIT17126__GPC (opt5)
aggagagucccgcagucggcguccagcggcucugcuuguucgugugugugucguugcaggccuuauucaagcuuaccaugggccagaucgugaccuucuuucaagaggucccccacguuauugaagaggugaugaacaucgugcugauugcccucagcauccuggcuguccuuaaggggcuguacaauuucgccacaugcggacucgugggccugcuuacguuucugcuccugugugggagauccugcaccacaggacuguauaaaggcguuuacgaacuccagacccuggagcuuaacauggaaacacugaauaugaccaugccucucucuuguacaaagaacaauagccaucacuauauuaugguggggaacgagaccggacuggagcuuacgcugaccaauacauccaucaucaaccauaaauucugcaaucucucugacgcgcacaagaaaaaccuguacgaucaugcucugaugagcauuaucuccaccuuucaccucucuauuccgaauuucaaccaguaugaagccaugagcugugacuuuaauggcggcaagaucuccguccaguacaaccugagccacucuuaugccggggaugcugccgaccauugcggaacaguggcuaauggcguucuucaaaccuucaugcggauggccuggggaggguccuacauugcgcuggauagcggccgcgggagaugggacuguaucaugacgucuuaccaguaucucauuauccagaacacaaccugggaggaucacugccaguuuucccggcccagcccuaucggauaccugggccuucugucucaacgcacaagagacauuuauaucucccggcgccuccugggcaccuucaccuggacacugagcgauuccgaagggaaggacacgcccggaggcuacugucucaccagauggaugcugauugaggccgagcuuaaaugcuuugggaacacagcuguggccaaguguaaugaaaaacaugaugaggaguucugcgacaugcugcggcucuuugauuucaacaagcaggcuauccagcgccugaaagccgaagcgcagaugucuauucaacuuaucaauaaggccgucaacgcucugaucaaugaccagcucgugaugaagaaccaccugagagacauuaugggaaucccuuauugcaauuacagccgguauugguaccugaaccacaccacaaccggccgcacgucccuccccaaauguuggcuggugagcaaugggucuuaccuuaacgaaacacauuucuccgaugacauugagcagcaagccgauaauaugaucaccgagaugcugcagaaggaauauauggagagacagggaaaaaccccucucggccuggucgaccuguuuguuuucagcacaucuuuuuaccuuauuagcaucuuccuccaccuggugaagaucccgacccaucggcacauugugggcaaauccugccccaagccucaucgccugaaccacauggggaucuguucuugcggacucuauaaacagcccggcgucccugugaaguggaagagaugaggacuaguaauaaggaaacuguaugaaugucugugggcaggaagugaagagauccuucuguaaagguuuuuggaauuaugucugcugaauaauaaacuuuuuugaaauaauaaaucugguagaaaaaugagaucuaaaaaaaaaaaaaaaaaaaaaaaaaaaaaaaaaaaaaaaaaaaaaaaaaaaaaaaaaaaaaaaaaaaaaaaaaaaaaaaaaaaaaaaaaaaaaaaaaaaa

SEQ ID NO: 14914 - RNA, 1788 nt, Artificial Sequence
  mRNA product Design b-4 (A100) comprising derived and/or modified sequence from LASV(G733-SLE-2010;Clade IV)__AIT17154__GPC (opt5)
aggagagucccgcagucggcguccagcggcucugcuuguucgugugugugucguugcaggccuuauucaagcuuaccaugggccagaucgugaccuucuuucaagaggucccccacguuauugaagaggugaugaacaucgugcugauugcccucagcauccuggcuguccuuaaggggcuguacaauuucgccacaugcggaauugugggccucguuuccuuucugcuucugugugggagaucuugcacgaccagccucuauaaaggaguguacgaacugcagacacuggagcucaacauggaaacccugaauaugacaaugccucuuuccuguaccaagaacaauucucaucacuauaucauggucggcaacgagacagggcuggagcucacccugacgaauaccagcaucauuaaccauaaauucugcaaucuuuccgacgcgcacaagaaaaaccuguacgaucaugcucucaugucuaucauuagcacauuucaccuguccaucccgaauuucaaccaguaugaagccaugagcugugacuuuaauggaggcaagauuucugugcaguacaaccugucccacagcuaugccggcgaugcugccaaucauugcgggaccaucgcuaacggaguucuccaaacauucaugcggauggccuggggcgggucuuacauugcgcuggacuccggacgcgauagaugggacuguaucaugaccagcuaccaguaucuuaucauucagaacacgacaugggaggaucacugccaguuuucucggcccuccccuaucggcuaccuggggcuccugagccaacgcaccagagacauuuauaucucccggcgccuucugggaacauucaccuggacccucucugauagcgaaggcaaggacacacccggcggguacugucugacgagauggaugcugauugaggccgagcucaaaugcuuuggaaauaccgcuguggccaaguguaacgaaaaacaugaugaggaguucugcgacaugcugcggcuuuuugauuucaauaagcaggcuauccagcgccugaaagccgaagcgcagauguccauccaacucauuaacaaggccgucaaugcucugaucaacgaccagcuuauuaugaagaaucaccugagagacaucaugggcauuccuuauugcaacuacagcaaauauugguaccucaaucacacaaccacagggaagaccucucugcccaaauguuggcugguguccaacggaagcuaccucaaugaaacgcauuucucugaugacaucgagcagcaagccgauaacaugaucacagagaugcugcagaaggaauauauggagcggcagggcaaaaccccucuugggcugguggaccucuuugucuucagcaccuccuuuuaccugauuucuaucuuccugcaccuuguuaagauuccgacacaucgccacguggugggaaaaagcugccccaagccucauagacucaaucacaugggcaucuguuccugcggccuguaugggcagcccggagucccugugaaguggaaacggugaggacuaguaauaaggaaacuguaugaaugucugugggcaggaagugaagagauccuucuguaaagguuuuuggaauuaugucugcugaauaauaaacuuuuuugaaauaauaaaucugguagaaaaaugagaucuaaaaaaaaaaaaaaaaaaaaaaaaaaaaaaaaaaaaaaaaaaaaaaaaaaaaaaaaaaaaaaaaaaaaaaaaaaaaaaaaaaaaaaaaaaaaaaaaaaaa

SEQ ID NO: 14915 - RNA, 1788 nt, Artificial Sequence
  mRNA product Design b-4 (A100) comprising derived and/or modified sequence from MOPV/LASV reassortant(IGS-1;Clade IV)__AFY05576__GPC (opt5)
aggagagucccgcagucggcguccagcggcucugcuuguucgugugugugucguugcaggccuuauucaagcuuaccaugggccagaucgugaccuucuuucaagaggucccccacguuauugaagaggugaugaacaucgugcugauugcccucagcguccuggcugugcuuaaggggcuguacaauuucgccacaugcggacucguuggccuggugacguuucuucugcucugugggagauccugcaccacaucucuguauaaaggagucuacgaacugcagacccucgagcugaacauggaaacacuuaauaugaccaugccucugagcuguacaaagaacaauucccaucacuauaucauggugggcaacgagaccgggcucgagcugacgcuuaccaauacaucuauuaucaaccauaaauucugcaaucugagcgacgcgcacaagaaaaaccucuacgaucaugcucugauguccaucauuucuaccuuucaccugagcaucccgaauuucaaccaguaugaagccauguccugugacuuuaauggaggcaagauuagcguucaguacaaccucucucacuccuaugccggcgaugcugccaaucauugcgggacaguggcuaacggaguccugcaaaccuucaugcggauggccuggggcgggagcuacaucgcgcuugacucuggacgcggcaacugggauuguauuaugacguccuaccaguaucugaucauucagaauacaaccugggaggaccacugccaguuuagcagacccucuccuaucggguaccucggacugcuuucccaacggacacgcgauaucuauauuagcagacggcugcucggcaccuucaccuggacacuguccgacucugaaggcgaggauacgcccgggggauacugucugacccgcuggaugcucaucgaggccgaacugaagugcuuuggcaacacagcuguggccaaauguaaugagaagcaugacgaagaguucugcgauaugcuuagacuguuugacuucaacaaacaggcuauucagcggcucaaggccgaagcgcagaugagcauccaacugauuaauaaagccgugaacgcucuuaucaaugaucagcugaucaugaagaaccaccuccgcgacauuauggggaucccuuauugcaauuacuccaaguauugguaccugaaccacaccacaaccggaagaacgagccugcccaaauguuggcucgucucuaauggcuccuaccugaacgagacacauuucagcgacgauauugagcagcaagccgacaauaugaucaccgaaaugcuucagaaggaguauauggaacggcaggggaaaaccccucugggacucguugaucuguuuguguucucuaccagcuuuuaccugauuuccaucuuccuucaccucgugaagaucccgacacaucgccacauugucggcaaaucuugccccaagccucauagacugaaccacaugggcaucuguagcugcgggcuguauaaacagcccggagugccuguuaaguggaagcggugaggacuaguaauaaggaaacuguaugaaugucugugggcaggaagugaagagauccuucuguaaagguuuuuggaauuaugucugcugaauaauaaacuuuuuugaaauaauaaaucugguagaaaaaugagaucuaaaaaaaaaaaaaaaaaaaaaaaaaaaaaaaaaaaaaaaaaaaaaaaaaaaaaaaaaaaaaaaaaaaaaaaaaaaaaaaaaaaaaaaaaaaaaaaaaaaa

SEQ ID NO: 14916 - RNA, 1788 nt, Artificial Sequence
  mRNA product Design b-4 (A100) comprising derived and/or modified sequence from LASV(LM765-SLE-2012;Clade IV)__AIT17814__GPC (opt5)
aggagagucccgcagucggcguccagcggcucugcuuguucgugugugugucguugcaggccuuauucaagcuuaccaugggccagaucgugaccuucuuucaagaggucccccacguuauugaagaggugaugaacaucgugcugauugcccucagcauccuggcuguccuuaaggggcuguacaauuucgccacaugcggacucgugggccugguuacguuucuucugcucugugggagauccugcaccacaucucuguauaaaggaguguacgaacugcagacccucgagcugaacauggaaacacuuaauaugaccaugccucugagcuguacaaagaacaauucccaucacuauauuauggucggcaacgagaccgggcucgagcugacgcuuaccaauacaucuaucaucgaccauaaauucugcaaccugagcgaugcgcaccggaagaaucucuacgaccaugcucugauguccauuaucucuaccuuucaccugagcauuccgaacuucaaucaguaugaagccauguccugugauuuuaacggaggcaaaaucagcgugcaguacaaucucucucacuccuaugccaaggacgcugccgaucauugcggcacaguugcuaacggggugcugcaaaccuucaugcgcauggccuggggaggcagcuacauugcgcuugacucugggagaggacggugggauuguaucaugacguccuaccaguaucugauuauccagaauacaaccugggaggaccacugccaguuuagccgccccucuccuaucggcuaccucgggcugcuuucccaaagaacacgggauauuuauaucagccgcagacugcucggaaccuucaccuggacacuguccgacucugaaggcaaggauacgcccggcggguacugucugacccgguggaugcucauugaggccgagcugaaaugcuuuggaaacacagcugucgccaaguguaacgaaaaacaugacgaggaguucugcgauaugcuucgccuguuugacuucaauaagcaggcuauccagagacucaaagccgaagcgcagaugagcauucaacugaucaacaaggccgugaaugcucuuaucaacgaccagcugauuaugaagaaucaccuccgggauaucaugggcauuccuuauugcaacuacuccaaauauugguaccugaaucacaccacaaccgggaagacgagccugcccaaauguuggcucgugucuaacggauccuaccugaaugaaacacauuucagcgacgauaucgagcagcaagccgacaacaugauuaccgagaugcuucagaaggaauauauggagcgccagggcaaaaccccucuggggcucgucgaucuguuuguuuucucuaccagcuuuuaccugaucuccaucuuccuucaccucgugaagauuccgacacauagacacaucgugggaaaacccugcccuaagccccaucggcugaaucacaugggcauuuguucuugcggccuguauaagcagccugggguccccgugaaauggaagcgcugaggacuaguaauaaggaaacuguaugaaugucugugggcaggaagugaagagauccuucuguaaagguuuuuggaauuaugucugcugaauaauaaacuuuuuugaaauaauaaaucugguagaaaaaugagaucuaaaaaaaaaaaaaaaaaaaaaaaaaaaaaaaaaaaaaaaaaaaaaaaaaaaaaaaaaaaaaaaaaaaaaaaaaaaaaaaaaaaaaaaaaaaaaaaaaaaa

SEQ ID NO: 14917 - RNA, 1788 nt, Artificial Sequence
  mRNA product Design b-4 (A100) comprising derived and/or modified sequence from LASV(LM776-SLE-2012;Clade IV)__AIT17824__GPC (opt5)
aggagagucccgcagucggcguccagcggcucugcuuguucgugugugugucguugcaggccuuauucaagcuuaccaugggccagaucgugaccuucuuucaagaggucccccacguuauugaagaggugaugaacaucgugcugauugcccucagcauccuggcuguccuuaaggggcuguacaauuucgccacaugcggacucgugggccugguuacguuucuucugcucugugggagauccugcaccacaucuguguauaaaggagucuacgaacugcagacccuggagcucaacauggaaacacugaauaugaccaugccucuuagcuguacaaagaacaauucccaucacuauauuauggugggcaacgagaccgggcuggagcucacgcugaccaauacaucuaucaucaaccauaaauucugcaaucuuagcgacgcgcacaagaaaaaccuguacgaucaugcucucauguccauuaucucuaccuuucaccugagcauuccgaauuucaaccaguaugaagccauguccugugacuuuaauggaggcaagaucagcguucaguacaaccugucucacuccuaugccggcgaugcugccaaucauugcgggacaguggcuaacggaguccuccaaaccuucaugcggauggccuggggcgggagcuacauugcgcuggacucuggacacggcaagugggauuguaucaugacguccuaccaguaucuuauuauccagaacacaaccugggaggaccauugccaguuuagccgccccucuccuaucggguaccugggacuccugucccaaagaacacgggauauuuauaucagccgcagacuucugggcaccuucaccuggacacucuccgacucugaaggcaaagauacgcccgggggauacugucugacccgguggaugcugauugaggccgagcucaagugcuuuggcaauacagcuguggccaaauguaacgaaaagcacgacgaggaguucugcgauaugcugcgccuuuuugacuucaauaaacaggcuauccagagacugaaggccgaagcgcagaugagcauucaacucaucaacaaggccgugaaugcucugaucaacgaucagcuuauuaugaaaaaucaucugcgggacaucauggggauuccuuauugcaacuacuccaaguauugguaccucaaucacaccacaaccggaaaaacgagccugcccaaguguuggcuggucucuaacggcuccuaccucaaugaaacacacuucagcgacgauaucgagcagcaagccgacaacaugauuaccgagaugcugcagaaagaauauauggagcgccaggggaagaccccucuuggacugguugaucucuuuguguucucuaccagcuuuuaccugaucuccaucuuccugcaucuugugaaaauuccgacacacagacauaucgucggcaagucuugccccaagccucaccggcucaaucacaugggcauuuguagcugcgggcuguauaaacagcccggagugccuguucgcuggaagagaugaggacuaguaauaaggaaacuguaugaaugucugugggcaggaagugaagagauccuucuguaaagguuuuuggaauuaugucugcugaauaauaaacuuuuuugaaauaauaaaucugguagaaaaaugagaucuaaaaaaaaaaaaaaaaaaaaaaaaaaaaaaaaaaaaaaaaaaaaaaaaaaaaaaaaaaaaaaaaaaaaaaaaaaaaaaaaaaaaaaaaaaaaaaaaaaaa

SEQ ID NO: 14918 - RNA, 1788 nt, Artificial Sequence
  mRNA product Design b-4 (A100) comprising derived and/or modified sequence from LASV(Mad39;Clade IV)__ANH09722__GPC (opt5)
aggagagucccgcagucggcguccagcggcucugcuuguucgugugugugucguugcaggccuuauucaagcuuaccaugggccagaucgugaccuucuuucaagaggucccccacguuauugaagaggugaugaacaucgugcugauugcccucagcauccuggcuguccuuaaggggcuguacaauguggccacaugcggacucauuggccugguuacguuccuucugcucugugggagauccugcaccacaacccuguauaaaggaguguacgaacugcaggcgcucgagcugaacauggaaacacuuaauaugaccaugccucugucuuguacaaagaacaauagccaucacuauauccgggucggcaacgagaccgggcucgagcugacgcuuaccaauacaucccugaucaaccauaaauuuugcaaucucucugacgcucacaagaaaaaccuguacgaucaugcccugaugagcauuaucuccaccuuccaccucucuauuccgaauuuuaaccaguaugaagccaugagcugugacuucaaugauggaaagaucuccgugcaguacaaccugagccacacauaugcuggcgacaccgccaaucauugcggcacgguugcuaacggggugcuucaaacauuuaugcgcauggccuggggaggcucuuacauugcgcuggauuccgggagaggaggcugggacuguaucaugaccagcuaccaguaucucauuauccagaacacaaccugggaggaucacugccaguucucucggcccuccccuaucggguaccugggacuucugagccaacgcaccagagacauuuauaucucucggcgccuccugggcacauuuacguggacccuguccgauagcgaaggcaaggacacacccgggggauacugucucaccagauggaugcugauugaggccgagcuuaaaugcuucggcaauacagcugucgccaaguguaacgaaaaacaugaugaggaauuuugcgacaugcugcgccucuucgauuuuaauaagcaggcuauccagcggcugaaagccgaggcgcagauguccauucaacuuaucaacaaggccgugaaugcucugaucaacgaccagcucauuaugaagaaucaccugagagacaucauggggauuccuuauugcaacuacucuaaauauugguaccugaaucacaccgugacgggaaagacaagccuccccaaauguuggcuggucuccaacggcagcuaccuuaaugaaacccauuucucugaugacaucgagcagcaagccgauaacaugauuaccgagaugcugcagaaggaauauauggagcggcaggggaaaacaccucucggacugguugaccuguucguguuuuccaccagcuucuaccuuaucucuaucuuucuccaccuggugaagauuccgacacaucgccacgucgugggcaaacccugcccuaagccccauagacugaaucacaugggcaucuguagcugcggguucuauaagcagccuggaguucccgugcgguggaaacgcugaggacuaguaauaaggaaacuguaugaaugucugugggcaggaagugaagagauccuucuguaaagguuuuuggaauuaugucugcugaauaauaaacuuuuuugaaauaauaaaucugguagaaaaaugagaucuaaaaaaaaaaaaaaaaaaaaaaaaaaaaaaaaaaaaaaaaaaaaaaaaaaaaaaaaaaaaaaaaaaaaaaaaaaaaaaaaaaaaaaaaaaaaaaaaaaaa

SEQ ID NO: 14919 - RNA, 1788 nt, Artificial Sequence
  mRNA product Design b-4 (A100) comprising derived and/or modified sequence from LASV(Z0947-SLE-2011;Clade IV)__AIT17840__GPC (opt5)
aggagagucccgcagucggcguccagcggcucugcuuguucgugugugugucguugcaggccuuauucaagcuuaccaugggccagaucgugaccuucuuucaagaggucccccacguuauugaagaggugaugaacaucgugcugauugcccucagcauccuggcuguccuuaaggggcuguacaauuucgccacaugcggacucgugggccugguuacguuucuucugcucugugggagauccugcaccauuucucuguauaaaggaguguacgaacugcagacacucgagcugaacauggaaacccuuaauaugacaaugccucugagcuguaccaagaacaauucccaucacuauaucauggucggcaacgagacagggcucgagcugacccuuacgaauaccucuaucauuaaccauaaauucugcaaucugagcgacgcgcacaagaaaaaccucuacgaucaugcucugauguccaucauuucuacauuucaccugagcaucccgaauuucaaccaguaugaagccauguccugugacuuuaauggaggcaagauuagcgugcaguacaaccucucucacuccuaugccggcgaugcugccaaucauugcgggaccguugcuaacggagugcugcaaacauucaugcggauggccuggggcgggagcuacaucgcgcuugacucuggacgcgauagaugggacuguauuaugaccuccuaccaguaucugaucauccagaacacgacaugggaggaucacugccaguuuagccggcccucuccuauuggcuaccucgggcugcuuucccaacgcaccagagacaucuauauuagccggcgccugcucggaacauucaccuggacccuguccgauucugaaggcaaggacacacccggcggguacugucugacgagauggaugcucaucgaggccgagcugaaaugcuuuggaaauaccgcugucgccaaguguaacgaaaaacaugaugaggaguucugcgacaugcuucggcuguuugauuucaauaagcaggcuauucagcgccucaaagccgaagcgcagaugagcauccaacugaucaacaaggccgugaaugcucuuauuaacgaccagcugaucaugaagaaucaccucagagacauuaugggcaucccuuauugcaacuacuccaaauauugguaccugaaucacacaaccacagggaagaccagccugcccaaauguuggcucgugucuaacggauccuaccugaaugaaacgcauuucagcgaugacauugagcagcaagccgauaacaugaucacagagaugcuucagaaggaauauauggagcggcagggcaaaaccccucuggggcucgucgaccuguuuguuuucucuaccagcuuuuaccugaucuccauuuuccuucaccucgugaagaucccgacacaucgccacauugugggaaaacccugcccuaagccccauagacugaaucacaugggcaucuguucuugcggccuguauaagcagccugggguccccgugaaauggaagcggugaggacuaguaauaaggaaacuguaugaaugucugugggcaggaagugaagagauccuucuguaaagguuuuuggaauuaugucugcugaauaauaaacuuuuuugaaauaauaaaucugguagaaaaaugagaucuaaaaaaaaaaaaaaaaaaaaaaaaaaaaaaaaaaaaaaaaaaaaaaaaaaaaaaaaaaaaaaaaaaaaaaaaaaaaaaaaaaaaaaaaaaaaaaaaaaaa

SEQ ID NO: 14920 - RNA, 1658 nt, Artificial Sequence
  mRNA product Design i-3 (hSL-A64-N5) comprising derived and/or modified sequence from LASV(Josiah;Clade IV)__NP_694870__GPC (opt1) R8471/R8473
aggagaaagcuuaccaugggccagaucgugaccuucuuccaggaggucccccacgugaucgaggaggugaugaacaucguccugaucgcccucagcgugcuggccgugcugaaggggcucuacaacuucgcgaccugcggccuggucgggcuggugacguuccuccugcugugcggccgcuccugcaccaccagccucuacaaggggguguacgagcugcagacccuggagcucaacauggagacgcugaacaugaccaugccgcuguccugcaccaagaacaacagccaccacuacaucauggucggcaacgagaccggccucgagcugacgcugaccaacaccuccaucaucaaccacaaguucugcaaccucagcgacgcccacaagaagaaccuguacgaccacgcccugauguccaucaucagcaccuuccaccucuccauccccaacuucaaccaguacgaggccaugagcugcgacuucaacgggggcaagaucuccgugcaguacaaccugagccacuccuacgccggggacgcggccaaccacugcggcacgguggccaacgggguccugcagaccuucaugcggauggccuggggcggcagcuacaucgcgcucgacuccgggcgcggcaacugggacugcaucaugaccagcuaccaguaccugaucauccagaacaccacgugggaggaccacugccaguucucccggcccagccccaucggguaccugggccuccugucccagcgcacccgggacaucuacaucagccgccggcugcucggcaccuucaccuggacgcugagcgacuccgaggggaaggacaccccgggcggguacugccugacccgcuggaugcucaucgaggccgagcugaagugcuucggcaacaccgccguggccaagugcaacgagaagcacgacgaggaguucugcgacaugcugcggcuguucgacuucaacaagcaggccauccagcgccugaaggcggaggcccagaugagcauccagcugaucaacaaggccgugaacgcccucaucaacgaccagcugaucaugaagaaccaccuccgggacaucauggggauccccuacugcaacuacuccaaguacugguaccucaaccacacgaccaccggccgcaccagccugcccaagugcuggcuggucuccaacggcagcuaccucaacgagacgcacuucuccgacgacaucgagcagcaggccgacaacaugaucaccgagaugcugcagaaggaguacauggagcggcaggggaagacgccccugggccucguggaccuguucguguucagcaccuccuucuaccugaucagcaucuuccugcaccucgucaagaucccgacccaccgccacaucguggggaaguccugccccaagccccaccggcugaaccacaugggcaucugcagcugcgggcuguacaagcagcccggcgugccggucaaguggaagcgcugaggacuaguuauaagacugacuagcccgaugggccucccaacgggcccuccuccccuccuugcaccgagauuaaucaaaggcucuuuucagagccaccaaaaaaaaaaaaaaaaaaaaaaaaaaaaaaaaaaaaaaaaaaaaaaaaaaaaaaaaaaaaaaaaagaauu

SEQ ID NO: 14921 - RNA, 1655 nt, Artificial Sequence
  mRNA product Design i-3 (hSL-A64-N5) comprising derived and/or modified sequence from LASV(LP;Clade I)__AAF86701__GPC (opt1)
aggagaaagcuuaccaugggccagaucaucaccuucuuccaggaggugccccacgucaucgaggaggugaugaacaucgugcugaucgcccucagccugcuggccauccucaaggggcuguacaacaucgcgaccugcggcaucaucgggcuggucgccuuccucuuccugugcggcaaguccugcagccugacgcucaagggcggguacgagcugcagacccuggagcucaacauggagacccugaacaugaccaugccgcuguccugcacgaagaacagcucccaccacuacauccgcgugggcaacgagaccgggcucgagcugacccugaccaacacgagcaucaucaaccacaaguucugcaaccucuccgacgcccacaagaagaaccuguacgaccacgcccugaugagcaucaucuccaccuuccaccucagcauccccaacuucaaccaguacgaggccauguccugcgacuucaacggcgggaagaucagcgugcaguacaaccugucccacagcuacgcgggcgacgccgccgagcacugcgggaccgucgccaacggcgugcugcagaccuucaugcggauggcguggggcgggcgcuacaucgcccucgacuccggcaaggggaacugggacugcaucaugacgagcuaccaguaccugaucauccagaacaccaccugggaggaccacugccaguucucccggcccagccccaucggcuaccugggccuccugucccagcgcacccgggacaucuacaucagccgccggcugcucgggacguucaccuggacccugagcgacuccgagggcaacgagacccccgggggcuacugccugacgcgcuggaugcucaucgaggccgagcugaagugcuucgggaacaccgccguggccaagugcaacgagaagcacgacgaggaguucugcgacaugcugcggcuguucgacuucaacaagcaggcgauccgccggcugaaggccgaggcccagaugagcauccagcugaucaacaaggccgucaacgcccucaucaacgaccagcugaucaugaagaaccaccuccgcgacaucaugggcauccccuacugcaacuacuccaaguacugguaccucaaccacaccagcuccggccggaccagccugcccaagugcuggcugaucuccaacgggagcuaccucaacgagacgcaguucuccgacgacaucgagcagcaggcggacaacaugaucaccgagaugcugcagaaggaguacaucgagcgccagggcaagaccccgcuggggcucguggacaucuucaucuucagcaccuccuucuaccugaucagcaucuuccugcaccugaucaagaucccgacgcaccggcacaucgugggcaagcccugccccaagccccaccgccucaaccacaugggggucugcuccugcggccuguacaagcacccgggcgugcccaccaaguggaagcggugaggacuaguuauaagacugacuagcccgaugggccucccaacgggcccuccuccccuccuugcaccgagauuaaucaaaggcucuuuucagagccaccaaaaaaaaaaaaaaaaaaaaaaaaaaaaaaaaaaaaaaaaaaaaaaaaaaaaaaaaaaaaaaaaagaauu

SEQ ID NO: 14922 - RNA, 1655 nt, Artificial Sequence
  mRNA product Design i-3 (hSL-A64-N5) comprising derived and/or modified sequence from LASV(803213;Clade II)__AAF86703__GPC (opt1)
aggagaaagcuuaccaugggccagaucaucaccuucuuccaggaggugccccacgucaucgaggaggugaugaacaucgugcugaucgcccucagccugcuggccauccucaaggggaucuacaacgucgcgaccugcggccuguucgggcugaucuccuuccuccugcugugcggccgcagcugcuccgugacguacaaggggguguacgagcuccagacccuggagcugaacauggccaaccucaacaugaccaugccgcugagcugcaccaagaacaacucccaccacuacaucauggucggcaacgagacgggccuggagcucacccugaccaacaccagcaucaucaaccacaaguucugcaaccuguccgacgcccacaagaagaaccucuacgaccacgcccugaugagcaucaucuccacguuccaccugagcauccccaacuucaaccaguacgaggccauguccugcgacuucaacgggggcaagaucagcgugcaguacaaccucucccacagcuucgcgguggacgccgccaaccacugcgggaccaucgccaacggcguccugcagaccuucaugcggauggcguggggcggguccuacaucgcccuggacagcggcaaggggaacugggacugcaucaugaccuccuaccaguaccucaucauccagaacacgaccugggaggaccacugccaguucagccgccccucccccaucggcuaccuggggcugcucagccagcggacccgcgacaucuacaucagccggcgccugcugggcaccuucacguggacccucuccgacagcgagggcaacgaggcccccgggggcuacugccugacccgguggaugcugaucgaggccgagcucaagugcuucgggaacaccgccguggcgaagugcaacgagaagcacgacgaggaguucugcgacaugcugcgccuguucgacuucaacaagcaggccaucaagcggcucaagacggaggcccagauguccauccagcugaucaacaaggccgugaacgcccugaucaacgaccagcucaucaugaagaaccaccuccgcgacaucaugggcauccccuacugcaacuacagccgguacugguaccugaaccacaccgucaccgggaagaccucccugccccgcugcuggcuggugagcaacggcuccuaccugaacgagacgcacuucagcgacgacaucgagcagcaggcggacaacaugaucaccgagaugcuccagaaggaguacauggaccggcagggcaagaccccgcuggggcugguggaccucuucgucuucuccaccagcuucuaccugaucuccaucuuccugcaccuggugaagaucccgacgcaccgccacaucgugggcaagcccugccccaagccccaccggcucaaccacauggggaucugcagcugcggccuguacaagcacccggggguccccgugaaguggaagcgcugaggacuaguuauaagacugacuagcccgaugggccucccaacgggcccuccuccccuccuugcaccgagauuaaucaaaggcucuuuucagagccaccaaaaaaaaaaaaaaaaaaaaaaaaaaaaaaaaaaaaaaaaaaaaaaaaaaaaaaaaaaaaaaaaagaauu

SEQ ID NO: 14923 - RNA, 1655 nt, Artificial Sequence
  mRNA product Design i-3 (hSL-A64-N5) comprising derived and/or modified sequence from LASV(GA391;Clade III)__CAA36645__GPC (opt1)
aggagaaagcuuaccaugggccagaucgugaccuucuuccaggaggucccccacgugaucgaggaggugaugaacaucguccugaucgcccucagcauccuggccauccugaaggggcucuacaacguggcgaccugcggccugaucgggcuggugacguuccuccugcuguccggccgcagcugcucccucaucuacaaggggaccuacgagcugcagacccuggagcucaacauggagacccugaacaugacgaugccgcugagcugcaccaagaacaacucccaccacuacauccgggucggcaacgagaccggccucgagcugacccugacgaacaccagcauccucaaccacaaguucugcaaccuguccgacgcccacaagcgcaaccuguacgaccacagccucauguccaucaucagcaccuuccaccuguccauccccaacuucaaccaguacgaggccaugagcugcgacuucaacgggggcaagaucaccgugcaguacaaccugucccacagcuucgccguggacgccgcggggcacugcggcacgcucgccaacgggguccugcagaccuucaugcggauggccuggggcggcuccuacaucgcccuggacagcgggcgcggcaacugggacugcaucaugaccuccuaccaguaccucaucauccagaacaccacgugggacgaccacugccaguucagccggcccucccccaucggguaccugggccugcucagccagcgcacccgggacaucuacaucagccgccggcugcugggcaccuucaccuggacgcucuccgacagcgaggggaacgagaccccgggcggguacugccugacccgcuggaugcugaucgaggcggagcucaagugcuucggcaacaccgccguggccaagugcaacgagaagcacgacgaggaguucugcgacaugcugcggcuguucgacuucaacaagcaggccauccgccggcucaagacggaggcccagauguccauccagcugaucaacaaggcggugaacgcccugaucaacgaccagcucaucaugaagaaccaccuccgcgacaucauggggauccccuacugcaacuacagccgguacugguaccugaaccacaccuccaccggcaagaccagccugccccgcugcuggcugaucuccaacggcagcuaccugaacgagacgaaguucuccgacgacaucgagcagcaggccgacaacaugaucaccgagaugcuccagaaggaguacaucgaccggcaggggaagacgccccugggccuggucgaccuguucguguucagcaccuccuucuaccucaucagcaucuuccugcaccuggugaagaucccgacccaccgccacaucgucgggaagcccugccccaagccccaccggcucaaccacaugggcaucugcuccugcgggcuguacaagcagccgggcgugcccgugcgcuggaagcggugaggacuaguuauaagacugacuagcccgaugggccucccaacgggcccuccuccccuccuugcaccgagauuaaucaaaggcucuuuucagagccaccaaaaaaaaaaaaaaaaaaaaaaaaaaaaaaaaaaaaaaaaaaaaaaaaaaaaaaaaaaaaaaaaagaauu

SEQ ID NO: 14924 - RNA, 1658 nt, Artificial Sequence
  mRNA product Design i-3 (hSL-A64-N5) comprising derived and/or modified sequence from LASV(AV;Clade V)__CCA30314__GPC (opt1)
aggagaaagcuuaccaugggccagaucgugaccuucuuccaggaggucccccacgugaucgaggaggugaugaacaucguccugaucgcccucagcauccuggccgugcugaaggggcucuacaacaucgcgaccugcggccugaucgggcugaucacguuccuccugcugugcggccgcuccugcagcuccaaccucuacaaggggguguacgagcugcagagccuggaccucaacauggagacccugaacaugaccaugccgcuguccugcaccaagaacaacagccaccacuacauccgggucggcaacgacacgggccucgagcugacccugaccaacaccuccauccucaaccacaaguucugcaaccugagcgacgcccacaagaaggaccuguacgaccacgcccucauguccaucaucagcacguuccaccuguccauccccaacuucaaccaguacgaggccaugagcugcgacuucaacgggggcaagaucuccgugcaguacaaccugagccacuccuacgccaucgacgcggccaaccacugcgggaccguggccaacggcauccuccagaccuucaugcgcauggccuggggcgggagcuacaucgcgcuggacuccggccgggggaacugggacugcaucaugaccagcuaccaguaccugaucauccagaacacgaccugggagaaccacugccaguucucccgccccagccccaucggcuaccucgggcugcugagccagcggacccgcgacaucuacaucucccggcgccuccugggcaccuucacguggacccugagcgacuccgagggcaacgccacccccgggggcuacugccucacccgguggaugcugaucgaggccgagcugaagugcuucgggaacacggccgucgccaagugcaacgagaagcacgacgaggaguucugcgacaugcuccgccuguucgacuucaacaagcaggcgaucagccggcugaaguccgaggcccagaugagcauccagcucaucaacaaggccgugaacgcccugaucaacgaccagcugaucaugaagaaccaccuccgcgacaucaugggcauccccuacugcaacuacuccaaguacugguaccugaaccacaccaucaccgggaagaccagccugcccaagugcuggcucguguccaacggcagcuaccugaacgagacgcacuucuccgacgacaucgagcagcaggccgacaacaugaucaccgagaugcugcagaaggaguacauggagcggcagggcaagaccccgcucgggcuggucgaccuguucguguucagcaccuccuucuaccugaucagcaucuuccuccgccuggugaagaucccgacgcaccggcacaucgucggcaagcccugccccaagccccaccgccugaaccacauggggaucugcuccugcggccucuacaagcagccgggggugcccgugcgguggaagcgcugaggacuaguuauaagacugacuagcccgaugggccucccaacgggcccuccuccccuccuugcaccgagauuaaucaaaggcucuuuucagagccaccaaaaaaaaaaaaaaaaaaaaaaaaaaaaaaaaaaaaaaaaaaaaaaaaaaaaaaaaaaaaaaaaagaauu

SEQ ID NO: 14925 - RNA, 1655 nt, Artificial Sequence
  mRNA product Design i-3 (hSL-A64-N5) comprising derived and/or modified sequence from LASV(Togo/2016/7082;Clade VI)__AMR44577__GPC (opt1)
aggagaaagcuuaccaugggccagaucaucaccuucuuccaggaggugccccacgucaucgaggaggugaugaacaucgugcugaucgcccucagccugcuggccauccucaagggggucuacaacguggcgaccugcggcaucaucgggcuggugacguuccuguuccucugcggccgcuccugcagccugaucuacaagggguccuacgagcugcagacccucgagcugaacauggagacccugaacaugaccaugccgcucagcugcacgaagaacuccagccaccacuacauccgggucggcaacgagaccggccuggagcugacccucaccaacacguccaucaucaaccacaaguucugcaaccugagcgacgcccacaagcgcaaccuguacgaccacgcccucauguccauccugagcaccuuccaccuguccauccccaacuucaaccaguacgaggccaugagcugcgacuucaacgggggcaagaucuccgugcaguacaaccucagccacgccuacgcgguggacgccgccgagcacugcgggaccgucgccaacggcgugcugcagaccuucaugcggauggcguggggcggguccuacaucgcccuggacagcggccgcgggaacugggacugcaucaugacguccuaccaguaccucaucauccagaacaccaccugggaggaccacugccaguucagccggcccucccccaucggcuaccuggggcugcucagccagcgcacccgggacaucuacaucagccgccggcugcugggcacguucaccuggacccucuccgacagcgagggcaacgagacccccgggggcuacugccugacgcgcuggaugcugaucgaggccgagcucaagugcuucgggaacaccgccguggccaagugcaacgagaagcacgacgaggaguucugcgacaugcugcggcuguucgacuucaacaagcaggcgauccagcgccucaaguccgaggcccagaugagcauccagcugaucaacaaggccgucaacgcccugaucaacgaccagcucaucaugaagaaccaccuccgggacaugaugggcauccccuacugcaacuacuccaaguacugguaccugaaccacaccagcuccgggcgcaccagccugcccaagugcuggcugguguccaacggcagcuaccugaacgagacgcacuucuccgacgacaucgagcagcaggccgacaacaugaucaccgagaugcuccagaaggaguacaucgaccggcagggcaagaccccgcuggggcugguggaccucuucgucuucagcaccuccuucuaccugaucagcaucuuccugcaccugaucaagaucccgacgcaccgccacaucgugggcaagcccugccccaagccccaccggcucaaccacauggggaucugcuccugcggccuguacaagcagccgggggugcccacccgcuggaagcggugaggacuaguuauaagacugacuagcccgaugggccucccaacgggcccuccuccccuccuugcaccgagauuaaucaaaggcucuuuucagagccaccaaaaaaaaaaaaaaaaaaaaaaaaaaaaaaaaaaaaaaaaaaaaaaaaaaaaaaaaaaaaaaaaagaauu

SEQ ID NO: 14926 - RNA, 1655 nt, Artificial Sequence
  mRNA product Design i-3 (hSL-A64-N5) comprising derived and/or modified sequence from LASV(KAK-428;Clade n.d. (VII))__ANH09740__GPC (opt1)
aggagaaagcuuaccaugggccagaucgugaccuucuuccaggaggucccccacgugaucgaggaggugaugaacaucguccugaucgcccucagccugcuggccauccucaaggggcuguacaacuucgcgaccugcggcgugaucgggcugaucacguuccuccugcugugcggccgcuccugcagcgccaccuacaaggggcaguacgagcuccagacccuggagcugaacauggagucccucaacaugaccaugccgcugagcugcacgaagaacaacucccaccacuacauccgggccggcaacaacaccggccuggagcucacccugaccaacacgagcaucaucucccacaaguucugcaaccugagcgacgcccacaagaagaaccucuacgaccacacccugauguccaucaucaccaccuuccaccugagcauccccaacuucaaccaguacgaggccauguccugcgacuucaacgggggcaagaucagcauccaguacaaccucucccacagcuacgcgggggacgccgcccagcacugcggcacgguggccaacgggguccugcagaccuucaugcgcauggcguggggcggcuccuaccuggcccucgacagcgggcggcgcggcugggacugcaucaucuccagcuaccaguaccugaucauccagaacaccaccugggacgaccacugccaguucucccggcccagccccaucggguaccugggcuucgugagccagaagacgcgcgacaucuacaucucccggcgccuccugggcaccuucaccuggacccugagcgacuccgaggggcacgacaugccgggcggguacugccucacgcgguggaugcugaucgaggccgaccugaagugcuucggcaacaccgccguggccaagugcaacgagaagcacgacgaggaguucugcgacauguggcgccucuucgacuucaacaagcaggcgauccagcggcugaaggccgaggcccagaugaacauccagcugaucaacaaggccgucaacgcccucaucaacgaccagcugaugaugaagaaccaccuccgcgacaucauggggauccccuacugcaacuacagcaaguucugguaccugaacaacaccaccacgggccggaccucccugccccgcugcuggcugaucagcaacggcuccuaccucaacgagacccacuucagcgacgacaucgagcagcaggcggacaacaugaucaccgagaugcugcagaaggaguacauggaccggcaggggaagacgccccugggccucguggaccuguucguguucuccaccagcuucuaccugaucaccaucuuccuccaccuggucaagaucccgacccaccgccacaucguggggaagcccugccccaagccccaccggcugaaccacaugggcaucugcuccugcgggcuguacaagcagccgggcgugcccguccgcuggaagcggugaggacuaguuauaagacugacuagcccgaugggccucccaacgggcccuccuccccuccuugcaccgagauuaaucaaaggcucuuuucagagccaccaaaaaaaaaaaaaaaaaaaaaaaaaaaaaaaaaaaaaaaaaaaaaaaaaaaaaaaaaaaaaaaaagaauu

SEQ ID NO: 14927 - RNA, 1655 nt, Artificial Sequence; identical to SEQ ID NO: 14921
  mRNA product Design i-3 (hSL-A64-N5) comprising derived and/or modified sequence from LASV(Pinneo-NIG-1969;Clade I)__AIT17836__GPC (opt1)

SEQ ID NO: 14928 - RNA, 1655 nt, Artificial Sequence
  mRNA product Design i-3 (hSL-A64-N5) comprising derived and/or modified sequence from LASV(ISTH0009-NIG-2011;Clade II)__AIT17404__GPC (opt1)
aggagaaagcuuaccaugggccagaucaucaccuucuuccaggaggugccccacgucaucgaggaggugaugaacaucgugcugaucgcccucagccugcuggccauccucaaggggaucuacaacgucgcgaccugcggccuguucgggcugguguccuuccuccugcugugcggccgcagcugcuccacgaccuacaaggggguguacgagcuccagacccuggagcuggacauggccagccucaacaugaccaugccgcuguccugcacgaagaacaacagccaccacuacaucauggucggcaacgagaccggccuggagcucacccugaccaacacguccaucaucaaccacaaguucugcaaccugagcgacgcccacaagaagaaccucuacgaccacgcccugauguccaucaucagcaccuuccaccuguccauccccaacuucaaccaguacgaggccaugagcugcgacuucaacgggggcaagaucuccgugcaguacaaccucagccacgcguacgccguggacgccgccaaccacugcgggaccaucgcgaacggcguccugcagaccuucaugcggauggccuggggcggguccuacaucgcccuggacagcggcaagggguccugggacugcaucaugacgagcuaccaguaccucaucauccagaacaccaccugggaggaccacugccaguucucccgccccagccccaucggcuaccuggggcugcucagccagcggacccgcgacaucuacaucucccggcgccugcugggcacguucaccuggacccucagcgacuccgagggcaacgagacccccgggggcuacugccugacgcgguggaugcugaucgaggccgagcucaagugcuucgggaacaccgccguggcgaagugcaacgagaagcacgacgaggaguucugcgacaugcugcgccuguucgacuucaacaagcaggccauccggcgccucaagaccgaggcccagaugagcauccagcugaucaacaaggccgugaacgcccugaucaacgaccagcucaucaugaagaaccaccuccgggacaucaugggcaucccguacugcaacuacuccaaguacugguaccugaaccacaccgucacggggaagaccagccugccccgcugcuggcugguguccaacggcagcuaccugaacgagacccacuucuccgacgacaucgagcagcaggcggacaacaugaucaccgagcuccugcagaaggaguacauggaccggcagggcaagacgccccuggggcucguggaccuguucgucuucagcaccuccuucuaccugaucagcaucuuccugcaccucaucaagaucccgacccaccgccacaucaccggcaagcccugccccaagccccaccggcugaaccacauggggaucugcuccugcggccuguacaagcacccgggggugcccgugaaguggaagcgcugaggacuaguuauaagacugacuagcccgaugggccucccaacgggcccuccuccccuccuugcaccgagauuaaucaaaggcucuuuucagagccaccaaaaaaaaaaaaaaaaaaaaaaaaaaaaaaaaaaaaaaaaaaaaaaaaaaaaaaaaaaaaaaaaagaauu

SEQ ID NO: 14929 - RNA, 1655 nt, Artificial Sequence
  mRNA product Design i-3 (hSL-A64-N5) comprising derived and/or modified sequence from LASV(ISTH2010-NIG-2012;Clade II)__AIT17482__GPC (opt1)
aggagaaagcuuaccaugggccagaucaucaccuucuuccaggaggugccccacgucaucgaggaggugaugaacaucgugcugaucgcccucagccugcuggccauccucaaggggaucuacaacgucgcgaccugcggccuguucgggcugguguccuuccuccugcugugcggccgcagcugcuccacgaccuacaaggggguguacgagcuccagacccuggagcuggacauggccagccucaacaugaccaugccgcuguccugcacgaagaacaacagccaccacuacaucauggucggcaacgagaccggccuggagcucacccugaccaacacguccaucaucaaccacaaguucugcaaccugagcgacgcccacaagaagaaccucuacgaccacgcccugauguccaucaucagcaccuuccaccuguccauccccaacuucaaccaguacgaggccaugagcugcgacuucaacgggggcaagaucuccgugcaguacaaccucagccacgcguacgccguggacgccgccaaccacugcgggaccaucgcgaacggcguccugcagaccuucaugcggauggccuggggcggguccuacaucgcccuggacagcggcaagggguccugggacugcaucaugacgagcuaccaguaccucaucauccagaacaucaccugggaggaccacugccaguucucccgccccagccccaucggcuaccuggggcugcucagccagcggacccgcgacaucuacaucucccggcgccugcugggcaccuucacguggacccucagcgacuccgagggcaacgagacccccgggggcuacugccugacccgguggaugcugaucgaggccgagcucaagugcuucgggaacacggccguggcgaagugcaacgagaagcacgacgaggaguucugcgacaugcugcgccuguucgacuucaacaagcaggccauccggcgccucaagaccgaggcccagaugagcauccagcugaucaacaaggccgugaacgcccugaucaacgaccagcucaucaugaagaaccaccuccgggacaucaugggcauccccuacugcaacuacuccaaguacugguaccugaaccacaccgucaccgggaagacgagccugccccgcugcuggcugguguccaacggcagcuaccugaacgagacccacuucuccgacgacaucgagcagcaggcggacaacaugaucaccgagcuccugcagaaggaguacaucgaccggcagggcaagaccccgcuggggcucguggaccuguucgucuucagcacguccuucuaccugaucagcaucuuccugcaccucgugaagaucccgacccaccgccacguggucggcaagcccugccccaagccccaccggcugaaccacauggggaucugcuccugcggccuguacaagcacccgggggugcccgugaaguggaagcgcugaggacuaguuauaagacugacuagcccgaugggccucccaacgggcccuccuccccuccuugcaccgagauuaaucaaaggcucuuuucagagccaccaaaaaaaaaaaaaaaaaaaaaaaaaaaaaaaaaaaaaaaaaaaaaaaaaaaaaaaaaaaaaaaaagaauu

SEQ ID NO: 14930 - RNA, 1655 nt, Artificial Sequence
  mRNA product Design i-3 (hSL-A64-N5) comprising derived and/or modified sequence from LASV(Lassa virus/H.sapiens-wt/NGA/2015/ISTH_0543;Clade II)__AVO03639__GPC (opt1)
aggagaaagcuuaccaugggccagaucaucaccuucuuccaggaggugccccacgucaucgaggaggugaugaacaucgugcugaucgcccucagccugcuggccauccucaaggggaucuacaacgucgcgaccugcggccuguucgggcugguguccuuccuccugcugugcggccgcagcugcuccacgaccuacaaggggguguacgagcuccagacccuggagcuggacauggccaaccucaacaugaccaugccgcugagcugcacgaagaacaacucccaccacuacaucauggucggcaacgagaccggccuggagcucacccugaccaacacgagcaucaucaaccacaaguucugcaaccuguccgacgcccacaagaagaaccucuacgaccacgcccugaugagcaucaucuccaccuuccaccugagcauccccaacuucaaccaguacgaggccauguccugcgacuucaacgggggcaagaucagcgugcaguacaaccucucccacaccuacgcgguggacgccgccaaccacugcgggaccaucgccaacggcguccugcagacguucaugcggauggcguggggcgggagcuacaucgcccuggacuccggcaaggggagcugggacugcaucaugaccuccuaccaguaccucgugauccagaacaccaccugggaggaccacugccaguucagccgccccucccccaucggcuaccuggggcugcucagccagcggacgcgcgacaucuacaucagccggcgccugcugggcaccuucaccuggacccucuccgacagcgagggcaacgagacgcccgggggcuacugccugacccgguggaugcugaucgaggccgagcucaagugcuucgggaacaccgccguggccaagugcaacgagaagcacgacgaggaguucugcgacaugcugcgccuguucgacuucaacaagcaggcgauccggcgccucaagaccgaggcccagauguccauccagcugaucaacaaggccgucaacgcccugaucaacgaccagcucaucaugaagaaccaccuccgggacaucaugggcauccccuacugcaacuacagcaaguacugguaccugaaccacacggugaccgggaagaccucccugccccgcugcuggcuggugagcaacggcuccuaccugaacgagacccacuucagcgacgacaucgagcagcaggccgacaacaugaucacggagcuccugcagaaggaguacaucgaccggcagggcaagaccccgcuggggcucgucgaccuguucguguucuccaccagcuucuaccugaucuccaucuuccugcaccucgugaagaucccgacccaccgccacaucacgggcaagcccugccccaagccccaccggcugaaccacauggggaucugcagcugcggccuguacaagcacccggggguccccgugaaguggaagcgcugaggacuaguuauaagacugacuagcccgaugggccucccaacgggcccuccuccccuccuugcaccgagauuaaucaaaggcucuuuucagagccaccaaaaaaaaaaaaaaaaaaaaaaaaaaaaaaaaaaaaaaaaaaaaaaaaaaaaaaaaaaaaaaaaagaauu

SEQ ID NO: 14931 - RNA, 1655 nt, Artificial Sequence
  mRNA product Design i-3 (hSL-A64-N5) comprising derived and/or modified sequence from LASV(Lassa virus/H.sapiens-wt/NGA/2016/ISTH_0009;Clade II)__AVO03571__GPC (opt1)
aggagaaagcuuaccaugggccagaucaucaccuucuuccaggaggugccccacgucaucgaggaggugaugaacaucgugcugaucgcccucagccugcuggccauccucaaggggaucuacaacgucgcgaccugcggccugcuggggcucguguccuuccugcugcucugcggccgcagcugcuccacgaccuacaaggggguguacgagcugcagacccuggagcucgacauggccagccugaacaugaccaugccgcuguccugcacgaagaacaacagccaccacuacaucauggucggcaacgagaccggccucgagcugacccugaccaacacguccaucaucaaccacaaguucugcaaccucagcgacgcccacaagaagaaccuguacgaccacgcccugauguccaucaucagcaccuuccaccucuccauccccaacuucaaccaguacgaggccaugagcugcgacuucaacgggggccggaucuccgugcaguacaaccugagccacuccuacgcgguggacgccgccaaccacugcgggaccaucgccaacggcguccugcagaccuucaugcgcauggcguggggcgggagcuacaucgcccucgacuccggcaaggggagcugggacugcaucaugacguccuaccaguaccugaucauccagaacaccaccugggaggaccacugccaguucagccggcccagccccaucggcuaccuggggcuccugucccagcgcacccgggacaucuacaucagccgccggcugcucggcacguucaccuggacccuguccgacagcgagggcaacgagacccccgggggcuacugccugacgcgcuggaugcucaucgaggccgagcugaagugcuucgggaacaccgccguggccaagugcaacgagaagcacgacgaggaguucugcgacaugcugcggcuguucgacuucaacaagcaggcgauccgccggcugaagaccgaggcccagauguccauccagcugaucaacaaggccgugaacgcccucaucaacgaccagcugaucaugaagaaccaccuccgcgacaucaugggcaucccguacugcaacuacagcaaguacugguaccucaaccacaccgucacggggaagaccucccugccccggugcuggcuggugagcaacggcuccuaccucaacgagacccacuucagcgacgacaucgagcagcaggccgacaacaugaucaccgagcugcugcagaaggaguacaucgaccgccagggcaagacgccccucgggcugguggaccuguucgucuucuccaccagcuucuaccugaucuccaucuuccuccaccuggugaagaucccgacccaccggcacaucaccggcaagcccugccccaagccccaccgccugaaccacauggggaucugcagcugcggccucuacaaccacccgggggugcccgucaaguggaagcggugaggacuaguuauaagacugacuagcccgaugggccucccaacgggcccuccuccccuccuugcaccgagauuaaucaaaggcucuuuucagagccaccaaaaaaaaaaaaaaaaaaaaaaaaaaaaaaaaaaaaaaaaaaaaaaaaaaaaaaaaaaaaaaaaagaauu

SEQ ID NO: 14932 - RNA, 1655 nt, Artificial Sequence
  mRNA product Design i-3 (hSL-A64-N5) comprising derived and/or modified sequence from LASV(Lassa virus/H.sapiens-wt/NGA/2016/ISTH_0017;Clade II)__AVO03567__GPC (opt1)
aggagaaagcuuaccaugggccagaucaucaccuucuuccaggaggugccccacgucaucgaggaggugaugaacaucgugcugaucgcccucagccugcuggccauccucaaggggaucuacaacgucgcgaccugcggccuguucgggcugguguccuuccuccugcugugcggccgcagcugcuccacgaccuacaaggggguguacgagcuccagacccuggagcuggacauggccagccucaacaugaccaugccgcuguccugcacgaagaacaacagccaccacuacaucauggucggcaacgagaccggccuggagcucacccugaccaacacguccaucaucaaccacaaguucugcaaccugagcgacgcccacaagaagaaccucuacgaccacgcccugauguccaucaucagcaccuuccaccuguccauccccaacuucaaccaguacgaggccaugagcugcgacuucaacgggggcaagaucuccgugcaguacaaccucagccacaccuacgcgaucgacgccgccaaccacugcgggaccaucgccaacggcgugcugcagacguucaugcggauggcguggggcggguccuacaucgcccuggacagcggcaagggguccugggacugcaucaugaccagcuaccaguaccucaucauccagaacaccaccugggaggaccacugccaguucucccgccccagccccaucggcuaccuggggcugcucagccagcggacgcgcgacaucuacaucucccggcgccugcugggcaccuucaccuggacccucagcgacuccgagggcaacgagacgcccgggggcuacugccugacccgguggaugcugaucgaggccgagcucaagugcuucgggaacaccgccgucgccaagugcaacgagaagcacgacgaggaguucugcgacaugcugcgccuguucgacuucaacaagcaggcgauccggcgccucaagaccgaggcccagaugagcauccagcugaucaacaaggccgugaacgcccugaucaacgaccagcucaucaugaagaaccaccuccgggacaucaugggcauccccuacugcaacuacuccaaguacugguaccugaaccacacggugaccgggaagaccagccugccccgcugcuggcuggucuccaacggcagcuaccugaacgagacccacuucuccgacgacaucgagcagcaggccgacaacaugaucacggagcuccugcagaaggaguacauggaccggcagggcaagaccccgcuggggcucguggaccuguucguguucagcaccuccuucuaccugaucagcaucuuccugcaccucguccgcaucccgacccaccggcacgugaucggcaagcccugccccaagccccaccgccugaaccacauggggaucugcuccugcggccuguacaagcacccgggggugcccgucaaguggaagcggugaggacuaguuauaagacugacuagcccgaugggccucccaacgggcccuccuccccuccuugcaccgagauuaaucaaaggcucuuuucagagccaccaaaaaaaaaaaaaaaaaaaaaaaaaaaaaaaaaaaaaaaaaaaaaaaaaaaaaaaaaaaaaaaaagaauu

SEQ ID NO: 14933 - RNA, 1655 nt, Artificial Sequence
  mRNA product Design i-3 (hSL-A64-N5) comprising derived and/or modified sequence from LASV(Lassa virus/H.sapiens-wt/NGA/2018/ISTH_0959;Clade II)__AVV65099__GPC (opt1)
aggagaaagcuuaccaugggccagaucaucaccuucuuccaggaggugccccacgucaucgaggaggugaugaacaucgugcugaucgcccucagccugcuggccauccucaaggggaucuacaacgucgugaccugcggccuguucgggcugguguccuuccuccugcugugcggccgcagcugcuccacgaccuacaagggggucuacgagcuccagacccuggagcuggacauggcgagccucaacaugaccaugccgcuguccugcacgaagaacaacagccaccacuacaucauggugggcaacgagaccggccuggagcucacccugaccaacacguccaucaucaaccacaaguucugcaaccugagcgacgcccacaagaagaaccucuacgaccacgcccugauguccaucaucagcaccuuccaccuguccauccccaacuucaaccaguacgaggccaugagcugcgacuucaacgggggcaagaucuccgugcaguacaaccucagccacgccuacgcgaucgacgccgccaaccacugcgggaccaucgccaacggcguccugcagaccuucaugcggauggcguggggcggguccuacaucgcccuggacagcggcaagggguccugggacugcaucaugacgagcuaccaguaccucaucauccagaacaccaccugggaggaccacugccaguucucccgccccagccccaucggcuaccuggggcugcucagccagcggacccgcgacaucuacaucucccggcgccugcugggcacguucaccuggacccucagcgacuccgagggcaacgagacccccgggggcuacugccugacgcgguggaugcugaucgaggccgagcucaagugcuucgggaacaccgccguggccaagugcaacgagaagcacgacgaggaguucugcgacaugcugcgccuguucgacuucaacaagcaggcgauccggcgccucaagaccgaggcccagaugagcauccagcugaucaacaaggccgugaacgcccugaucaacgaccagcucaucaugaagaaccaccuccgggacaucaugggcaucccguacugcaacuacuccaaguacugguaccugaaccacaccgucacggggaagaccagccugccccgcugcuggcugguguccaacggcagcuaccugaacgagacccacuucuccgacgacaucgagcagcaggccgacaacaugaucaccgagcuccugcagaaggaguacaucgaccggcagggcaagacgccccuggggcucguggaccuguucgucuucagcaccuccuucuaccugaucagcaucuuccugcaccucgugaagaucccgacccaccgccacgugaucggcaagcccugccccaagccccaccggcugaaccacauggggaucugcuccugcggccuguacaagcacccggggguccccgugaaguggaagcgcugaggacuaguuauaagacugacuagcccgaugggccucccaacgggcccuccuccccuccuugcaccgagauuaaucaaaggcucuuuucagagccaccaaaaaaaaaaaaaaaaaaaaaaaaaaaaaaaaaaaaaaaaaaaaaaaaaaaaaaaaaaaaaaaaagaauu

SEQ ID NO: 14934 - RNA, 1655 nt, Artificial Sequence
  mRNA product Design i-3 (hSL-A64-N5) comprising derived and/or modified sequence from LASV(LASV003-NIG-2008;Clade II)__AIT17580__GPC (opt1)
aggagaaagcuuaccaugggccagaucaucaccuucuuccaggaggugccccacgucaucgaggaggugaugaacaucgugcugaucgcccucagccugcuggccauccucaaggggaucuacaacgucgcgaccugcggccuguucgggcugguguccuuccuccugcugugcggccgcagcugcuccacgaccuacaaggggguguacgagcuccagacccuggagcuggacauggccagccucaacaugaccaugccgcuguccugcacgaagaacaacagccaccacuacaucauggucggcaacgagaccggccuggagcucacccugaccaacacguccaucaucaaccacaaguucugcaaccugagcgacgcccacaagaagaaccucuacgaccacgcccugauguccaucaucagcaccuuccaccuguccauccccaacuucaaccaguacgaggccaugagcugcgacuucaacgggggcaagaucuccgugcaguacaaccucagccacaccuacgcgguggacgccgccaaccacugcgggaccaucgccaacggcguccugcagacguucaugcggauggcguggggcggguccuacaucgcccuggacagcggcaagggguccugggacugcaucaugaccagcuaccaguaccucaucauccagaacaccaccugggaggaccacugccaguucucccgccccagccccaucggcuaccuggggcugcucagccagcggacgcgcgacaucuacaucucccggcgccugcugggcaccuucaccuggacccucagcgacuccgagagcaacgagacgccgggcggguacugccugacccgguggaugcugaucgaggccgagcucaagugcuucggcaacaccgccguggccaagugcaacgagaagcacgacgaggaguucugcgacaugcugcgccuguucgacuucaacaagcaggcgauccggcgccucaaggccgaggcccagauguccauccagcugaucaacaaggccgugaacgcccugaucaacgaccagcucaucaugaagaaccaccuccgggacaucauggggauccccuacugcaacuacagcaaguacugguaccugaaccacaccgucacgggccgcaccucccugccccggugcuggcuggugagcaacggguccuaccugaacgagacccacuucagcgacgacaucgagcagcaggcggacaacaugaucaccgagcuccugcagaaggaguacauggaccgccagggcaagacgccccugggccucguggaccuguucgucuucuccaccagcuucuaccugaucuccaucuuccugcaccucgugaagaucccgacccaccggcacgugaucgggaagcccugccccaagccccaccgccugaaccacaugggcaucugcagcugcgggcuguacaagcacccgggcguccccgugaaguggaagcggugaggacuaguuauaagacugacuagcccgaugggccucccaacgggcccuccuccccuccuugcaccgagauuaaucaaaggcucuuuucagagccaccaaaaaaaaaaaaaaaaaaaaaaaaaaaaaaaaaaaaaaaaaaaaaaaaaaaaaaaaaaaaaaaaagaauu

SEQ ID NO: 14935 - RNA, 1655 nt, Artificial Sequence
  mRNA product Design i-3 (hSL-A64-N5) comprising derived and/or modified sequence from LASV(LASV035-NIG-2009;Clade II)__AIT17588__GPC (opt1)
aggagaaagcuuaccaugggccagaucaucaccuucuuccaggaggugccccacgucaucgaggaggugaugaacaucgugcugaucgcccucagccugcuggccauccucaaggggaucuacaacgucgcgaccugcggccuguucgggcugguguccuuccuccugcugugcggccgcagcugcuccacgaccuacaaggggguguacgagcuccagacccuggagcuggacauggccagccucaacaugaccaugccgcuguccugcacgaagaacaacagccaccacuacaucauggucggcaacgagaccggccuggagcucacccugaccaacacguccaucaucaaccacaaguucugcaaccugagcgacgcccacaagaagaaccucuacgaccacgcccugauguccaucaucagcaccuuccaccuguccauccccaacuucaaccaguacgaggccaugagcugcgacuucaacgggggcaagaucuccgugcaguacaaccucagccacgcguacgccguggacgccgccaaccacugcgggaccaucgcgaacggcguccugcagaccuucaugcggauggccuggggcggguccuacaucgcccuggacagcggcaagggguccugggacugcaucaugacgagcuaccaguaccucaucauccagaacaccaccugggaggaccacugccaguucucccgccccagccccaucggcuaccuggggcugcucagccagcggacccgcgacaucuacaucucccggcgccugcugggcacguucaccuggacccucagcgacuccgagggcaacgagacccccgggggcuacugccugacgcgguggaugcugaucgaggccgagcucaagugcuucgggaacaccgccguggcgaagugcaacgagaagcacgacgaggaguucugcgacaugcugcgccuguucgacuucaacaagcaggccauccggcgccucaaggccgaggcccagaugagcauccagcugaucaacaaggccgugaacgcgcugaucaacgaccagcucaucaugaagaaccaccuccgggacaucaugggcauccccuacugcaacuacuccaaguacugguaccugaaccacaccgucaccgggaagacgagccugccccgcugcuggcugguguccaacggcagcuaccugaacgagacccacuucuccgacgacaucgagcagcaggccgacaacaugaucaccgagcuccugcagaaggaguacaucgaccggcagggcaagaccccgcuggggcucguggaccuguucgucuucagcacguccuucuaccugaucagcaucuuccugcaccucgugaagaucccgacccaccgccacgugaucggcaagcccugccccaagccccaccggcugaaccacauggggaucugcuccugcggccuguacaagcacccggggguccccgugaaguggaagcgcugaggacuaguuauaagacugacuagcccgaugggccucccaacgggcccuccuccccuccuugcaccgagauuaaucaaaggcucuuuucagagccaccaaaaaaaaaaaaaaaaaaaaaaaaaaaaaaaaaaaaaaaaaaaaaaaaaaaaaaaaaaaaaaaaagaauu

SEQ ID NO: 14936 - RNA, 1655 nt, Artificial Sequence
  mRNA product Design i-3 (hSL-A64-N5) comprising derived and/or modified sequence from LASV(LASV1000-NIG-2009;Clade II)__AIT17782__GPC (opt1)
aggagaaagcuuaccaugggccagaucaucaccuucuuccaggaggugccccacgucaucgaggaggugaugaacaucgugcugaucgcccucagccugcuggccauccucaaggggaucuacaacgucgcgaccugcggccuguucgggcugguguccuuccuccugcugugcggccgcagcugcuccacgaccuacaaggggguguacgagcuccagacccuggagcuggacauggccagccucaacaugaccaugccgcuguccugcacgaagaacaacagccaccacuacaucauggucggcaacgagaccggccuggagcucacccugaccaacacguccaucaucaaccacaaguucugcaaccugagcgacgcccacaagaagaaccucuacgaccacgcccugauguccaucaucagcaccuuccaccuguccauccccaacuucaaccaguacgaggccaugagcugcgacuucaacgggggcaagaucuccgugcaguacaaccucagccacaccuacgcgguggacgccgccaaccacugcgggaccaucgccaacggcguccugcagacguucaugcggauggcguggggcggguccuacaucgcccuggacagcggcaagggguccugggacugcaucaugaccagcuaccaguaccucaucauccagaacaccaccugggaggaccacugccaguucucccgccccagccccaucggcuaccuggggcugcucagccagcggacgcgcgacaucuacaucucccggcgccugcugggcaccuucaccuggacccucagcgacuccgagggcaacgagacgcccgggggcuacugccugacccgguggaugcugaucgaggccgagcucaagugcuucgggaacaccgccguggccaagugcaacgagaagcacgacgaggaguucugcgacaugcugcgccuguucgacuucaacaagcaggcgaucaagcggcucaagaccgaggcccagaugagcauccagcugaucaacaaggccgugaacgcccugaucaacgaccagcucaucaugaagaaccaccuccgcgacaucaugggcauccccuacugcaacuacuccaaguacugguaccugaaccacacggucaccgggaagaccagccugccccggugcuggcugguguccaacggcagcuaccugaacgagacccacuucuccgacgacaucgagcagcaggccgacaacaugaucacggagcuccugcagaaggaguacaucgaccgccagggcaagaccccgcuggggcucguggaccuguucgucuucagcaccuccuucuaccugaucagcaucuuccugcaccucgugaagaucccgacccaccggcacguggucggcaagcccugccccaagccccaccgccugaaccacauggggaucugcuccugcggccuguacaagcacccgggggugcccgugaaguggaagcggugaggacuaguuauaagacugacuagcccgaugggccucccaacgggcccuccuccccuccuugcaccgagauuaaucaaaggcucuuuucagagccaccaaaaaaaaaaaaaaaaaaaaaaaaaaaaaaaaaaaaaaaaaaaaaaaaaaaaaaaaaaaaaaaaagaauu

SEQ ID NO: 14937 - RNA, 1655 nt, Artificial Sequence
  mRNA product Design i-3 (hSL-A64-N5) comprising derived and/or modified sequence from LASV(LASV221-NIG-2010;Clade II)__AIT17624__GPC (opt1)
aggagaaagcuuaccaugggccagaucaucaccuucuuccaggaggugccccacgucaucgaggaggugaugaacaucgugcugaucgcccucagccugcuggccauccucaaggggaucuacaacgucgcgaccugcggccuguucgggcugguguccuuccuccugcugugcggccgcagcugcuccacgaccuacaaggggguguacgagcuccagacccuggagcuggacauggccagccucaacaugaccaugccgcuguccugcacgaagaacaacagccaccacuacaucauggucggcaacgagaccggccuggagcucacccugaccaacacguccaucaucaaccacaaguucugcaaccugagcgacgcccacaagaagaaccucuacgaccacgcccugauguccaucaucagcaccuuccaccuguccauccccaacuucaaccaguacgaggccaugagcugcgacuucaacgggggcaagaucuccgugcaguacaaccucagccacaccuacgcgaucgacgccgccaaccacugcgggaccaucgccaacggcgugcugcagacguucaugcggauggcguggggcggguccuacaucgcccuggacagcggcaagggguccugggacugcaucaugaccagcuaccaguaccucaucauccagaacaccaccugggaggaccacugccaguucucccgccccagccccaucggcuaccuggggcugcucagccagcggacgcgcgacaucuacaucucccggcgccugcugggcaccuucaccuggacccucagcgacuccgagggcaacgagacgcccgggggcuacugccugacccgguggaugcugaucgaggccgagcucaagugcuucgggaacaccgccgucgccaagugcaacgagaagcacgacgaggaguucugcgacaugcugcgccuguucgacuucaacaagcaggcgauccggcgccucaagaccgaggcccagaugagcauccagcugaucaacaaggccgugaacgcccugaucaacgaccagcucaucaugaagaaccaccuccgggacaucaugggcauccccuacugcaacuacuccaaguacugguaccugaaccacacggugaccgggaagaccagccugccccgcugcuggcuggucuccaacggcagcuaccugaacgagacccacuucuccgacgacaucgagcagcaggccgacaacaugaucacggagaugcuccagaaggaguacauggaccggcagggcaagaccccgcuggggcugguggaccucuucguguucagcaccuccuucuaccugaucagcaucuuccugcaccuggucaagaucccgacccaccgccacgugaucggcaagcccugccccaagccccaccggcucaaccacauggggaucugcuccugcggccuguacaagcacccgggggugcccgucaaguggaagcgcugaggacuaguuauaagacugacuagcccgaugggccucccaacgggcccuccuccccuccuugcaccgagauuaaucaaaggcucuuuucagagccaccaaaaaaaaaaaaaaaaaaaaaaaaaaaaaaaaaaaaaaaaaaaaaaaaaaaaaaaaaaaaaaaaagaauu

SEQ ID NO: 14938 - RNA, 1655 nt, Artificial Sequence
  mRNA product Design i-3 (hSL-A64-N5) comprising derived and/or modified sequence from LASV(LASV237-NIG-2010;Clade II)__AIT17638__GPC (opt1)
aggagaaagcuuaccaugggccagaucaucaccuucuuccaggaggugccccacgucaucgaggaggugaugaacaucgugcugaucgcccucagccugcuggccauccucaaggggaucuacaacgucgcgaccugcggccuguucgggcugguguccuuccuccugcugugcggccgcagcugcuccacgaccuacaaggggguguacgagcuccagacccuggagcuggacauggccagccucaacaugaccaugccgcuguccugcacgaagaacaacagccaccacuacaucauggucggcaacgagaccggccuggagcucacccugaccaacacguccaucaucaaccacaaguucugcaaccugagcgacgcccacaagaaggaccucuacgaccacgcccugauguccaucaucagcaccuuccaccuguccauccccaacuucaaccaguacgaggccaugagcugcgacuucaacgggggcaagaucuccgugcaguacaaccucagccacaccuacgcgguggacgccgccaaccacugcgggaccaucgccaacggcguccugcagacguucaugcggauggcguggggcggguccuacaucgcccuggacagcggcaagggguccugggacugcaucaugaccagcuaccaguaccucaucauccagaacaccaccugggaggaccacugccaguucucccgccccagccccaucggcuaccuggggcugcucagccagcggacgcgcgacaucuacaucucccggcgccugcugggcaccuucaccuggacccucagcgacuccgagggcaacgagacgcccgggggcuacugccugacccgguggaugcugaucgaggccgagcucaagugcuucgggaacaccgccguggccaagugcaacgagaagcacgacgaggaguucugcgacaugcugcgccuguucgacuucaacaagcaggcgauccggcgccucaagaccgaggcccagaugagcauccagcugaucaacaaggccgugaacgcccugaucaacgaccagcucaucaugaagaaccaccuccgggacaucaugggcauccccuacugcaacuacuccaaguacugguaccugaaccacacggucaccgggaagaccagccugccccgcugcuggcugguguccaacggcagcuaccugaacgagacccacuucuccgacgacaucgagcagcaggccgacaacaugaucacggagcuccugcagaaggaguacauggaccggcagggcaagaccccgcuggggcucguggaccuguucgucuucagcaccuccuucuaccugaucagcaucuuccugcaccucaucaagaucccgacccaccgccacaucacgggcaagcccugccccaagccccaccggcugaaccacauggggaucugcuccugcggccuguacaagcacccgggggugcccgugaaguggaagcgcugaggacuaguuauaagacugacuagcccgaugggccucccaacgggcccuccuccccuccuugcaccgagauuaaucaaaggcucuuuucagagccaccaaaaaaaaaaaaaaaaaaaaaaaaaaaaaaaaaaaaaaaaaaaaaaaaaaaaaaaaaaaaaaaaagaauu

SEQ ID NO: 14939 - RNA, 1655 nt, Artificial Sequence
  mRNA product Design i-3 (hSL-A64-N5) comprising derived and/or modified sequence from LASV(LASV253-NIG-2011;Clade II)__AIT17670__GPC (opt1)
aggagaaagcuuaccaugggccagaucaucaccuucuuccaggaggugccccacgucaucgaggaggugaugaacaucgugcugaucgcccucagccugcuggccauccucaaggggaucuacaacgucgcgaccugcggccuguucgggcugguguccuuccuccugcugugcggccgcagcugcuccacgaccuacaaggggguguacgagcuccagacccuggagcuggacauggccagccucaacaugaccaugccgcuguccugcacgaagaacaacagccaccacuacaucauggucggcaacgagaccggccuggagcucacccugaccaacacguccaucaucaaccacaaguucugcaaccugagcgacgcccacaagaagaaccucuacgaccacgcccugauguccaucaucagcaccuuccaccuguccauccccaacuucaaccaguacgaggccaugagcugcgacuucaacgggggcaagaucuccgugcaguacaaccucagccacaccuacgcgguggacgccgccaaccacugcgggaccaucgccaacggcguccugcagacguucaugcggauggcguggggcggguccuacaucgcccuggacagcggcaagggguccugggacugcaucaugaccagcuaccaguaccucaucauccagaacaccaccugggaggaccacugccaguucucccgccccagccccaucggcuaccuggggcugcucagccagcggacgcgcgacaucuacaucucccggcgccugcugggcaccuucaccuggacccucagcgacuccgagggcaacgagacgcccgggggcuacugccugacccgguggaugcugaucgaggccgagcucaagugcuucgggaacaccgccguggccaagugcaacgagaagcacgacgaggaguucugcgacaugcugcgccuguucgacuucaacaagcaggcgauccggcgccucaaggccgaggcccagaugagcauccagcugaucaacaaggccgugaacgcccugaucaacgaccagcucaucaugaagaaccaccuccgggacaucaugggcaucccguacugcaacuacuccaaguacugguaccugaaccacaccgucacggggcgcaccagccugccccggugcuggcugguguccaacggcagcuaccugaacgagacccacuucuccgacgacaucgagcagcaggcggacaacaugaucaccgagcuccugcagaaggaguacaucgaccgccagggcaagacgccccuggggcucguggaccuguucgucuucagcaccuccuucuaccugaucagcaucuuccugcaccucgugaagaucccgacccaccggcacaucaucggcaagcccugccccaagccccaccgccugaaccacauggggaucugcuccugcggccuguacaagcacccgggggugcccgucaaguggaagcggugaggacuaguuauaagacugacuagcccgaugggccucccaacgggcccuccuccccuccuugcaccgagauuaaucaaaggcucuuuucagagccaccaaaaaaaaaaaaaaaaaaaaaaaaaaaaaaaaaaaaaaaaaaaaaaaaaaaaaaaaaaaaaaaaagaauu

SEQ ID NO: 14940 - RNA, 1655 nt, Artificial Sequence
  mRNA product Design i-3 (hSL-A64-N5) comprising derived and/or modified sequence from LASV(LASV254-NIG-2011;Clade II)__AIT17674__GPC (opt1)
aggagaaagcuuaccaugggccagaucaucaccuucuuccaggaggugccccacgucaucgaggaggugaugaacaucgugcugaucgcccucagccugcuggccauccucaaggggaucuacaacgucgcgaccugcggccuguucgggcugguguccuuccuccugcugugcggccgcagcugcuccacgaccuacaaggggguguacgagcuccagacccuggagcuggacaugaccaaccucaacaugacgaugccgcugagcugcaccaagaacaacucccaccacuacaucauggucggcaacgagaccggccuggagcucacccugacgaacaccagcaucaucaaccacaaguucugcaaccuguccgacgcccacaagaagaaccucuacaaccacgcccugaugagcaucaucuccaccuuccaccugagcauccccaacuucaaccaguacgaggccauguccugcgacuucaacgggggcaagaucagcgugcaguacaaccucucccacagcuacgccguggacgcggccaaccacugcgggaccaucgccaacggcguccugcagacguucaugcggauggccuggggcggguccuacaucgcgcuggacagcggcaaggggaacugggacugcaucaugaccuccuaccaguaccucaucauccagaacaccaccugggaggaccacugccaguucagccgccccucccccaucggcuaccuggggcugcucagccagcggacgcgcgacaucuacaucagccggcgccugcugggcaccuucaccuggacccucuccgacagcgagggcaacgagacgcccgggggcuacugccugacccgguggaugcugaucgaggccgagcucaagugcuucgggaacaccgccguggccaagugcaacgagaagcacgacgaggaguucugcgacaugcugcgccuguucgacuucaacaagcaggccauccggcgccucaagaccgaggcgcaggccaacauccagcugaucaacaaggccgugaacgcccugaucaacgaccagcucaucaugaagaaccaccuccgggacaucaugggcauccccuacugcaacuacuccaaguacugguaccugaaccacacggucaccgggaagaccagccugccccgcugcuggcugguguccaacggcagcuaccugaacgagacccacuucuccgacgacaucgagcagcaggccgacaacaugaucacggagcuccugcagaaggaguacauggaccggcagggcaagaccccgcuggggcucguggaccuguucgucuucagcaccuccuucuaccugaucagcaucuuccugcaccucgugaagaucccgacccaccgccacgugaucggcaagcccugccccaagccccaccggcugaaccacauggggaucugcuccugcggccuguacaagcacccggggguccccgugaaguggaagcgcugaggacuaguuauaagacugacuagcccgaugggccucccaacgggcccuccuccccuccuugcaccgagauuaaucaaaggcucuuuucagagccaccaaaaaaaaaaaaaaaaaaaaaaaaaaaaaaaaaaaaaaaaaaaaaaaaaaaaaaaaaaaaaaaaagaauu

SEQ ID NO: 14941 - RNA, 1655 nt, Artificial Sequence
  mRNA product Design i-3 (hSL-A64-N5) comprising derived and/or modified sequence from LASV(Nig08-A19;Clade III)__ADU56618__GPC (opt1)
aggagaaagcuuaccaugggccagaucgugaccuucuuccaggaggucccccacgugaucgaggaggugaugaacaucguccugaucgcccucagcauccuggccauccugaaggggcucuacaacaucgcgaccugcggccugaucgggcuggugacguuccuccugcuguccggccgcagcugcuccaugaccuacaaggggguguacgagcuccagacccuggagcugaacaugaacacccucaacaugacgaugccgcugagcugcaccaagaacaacucccaccacuacaucauggucggcaacgagaccggccuggagcucacccugacgaacaccagccugcuccaccacaaguucugcaaccuguccgacgcccacaagaagaaccuguacgaccacacccucaugagcaucaucuccaccuuccaccugagcauccccaacuucaaccaguacgaggccauguccugcgacuucaacgggggcaagaucacggugcaguacaaccugagccacuccuacgccaucgacgccgcgaaccacugcgggaccguggccaacggcguccuccagaccuucaugcggauggccuggggcgggagcuacaucgcccuggacuccggccgcgggaagugggacugcaucaugaccagcuaccaguaccugaucauccagaacacgaccugggaggaccacugccaguucucccggcccagccccaucggcuaccucgggcugcugucccagcgcacccgggacaucuacaucagccgccggcuccugggcaccuucacguggacccugagcgacuccgagggcaacgagacccccgggggcuacugccucacccgcuggaugcugaucgaggcggagcugaagugcuucgggaacacggccguggccaagugcaacgagaagcacgacgaggaguucugcgacaugcuccggcuguucgacuucaacaagcaggccauccgccggcugaaggccgaggcgcagaugagcauccagcucaucaacaaggccgugaacgcccugaucaacgaccagcugaucaugaagaaccaccuccgcgacaucaugggcauccccuacugcaacuacuccaaguacugguaccugaaccacaccagcaccgggcggaccucccugccccgcugcuggcucgucagcaacggcuccuaccugaacgagacgcacuucagcgacgacaucgagcagcaggccgacaacaugaucaccgagaugcugcagaaggaguaccucgaccggcagggcaagaccccgcuggggcugguggaccuguucguguucuccaccagcuucuaccucaucuccaucuuccugcaccuggucaagaucccgacgcaccgccacaucgugggcaagcccugccccaagccccaccggcucaaccacauggggaucugcagcugcggccuguacaagcagccgggggugcccguccgcuggaagcggugaggacuaguuauaagacugacuagcccgaugggccucccaacgggcccuccuccccuccuugcaccgagauuaaucaaaggcucuuuucagagccaccaaaaaaaaaaaaaaaaaaaaaaaaaaaaaaaaaaaaaaaaaaaaaaaaaaaaaaaaaaaaaaaaagaauu

SEQ ID NO: 14942 - RNA, 1658 nt, Artificial Sequence
  mRNA product Design i-3 (hSL-A64-N5) comprising derived and/or modified sequence from LASV(G1180-SLE-2010;Clade IV)__AIT17168__GPC (opt1)
aggagaaagcuuaccaugggccagaucgugaccuucuuccaggaggucccccacgugaucgaggaggugaugaacaucguccugaucgcccucagcauccuggccgugcugaaggggcucuacaacuucgcgaccugcggccugguggggcugcucaccuuccugcugcucugcggccgcuccugcaccgccagccgguacaagggggucuacgagcugcagacccuggagcucaacauggagacccugaacaugacgaugccgcuguccugcaccaagaacaacagccaccacuacaucauggugggcaacgagaccggccucgagcugacccugacgaacaccuccaucaucaaccacaaguucugcaaccucagcgacgcccacaagaagaaccuguacgaccacgcccugauguccaucaucagcaccuuccaccucuccauccccaacuucaaccaguacgaggccaugagcugcgacuucaacgggggcaagaucuccgugcaguacaaccugagccacuccuacgcgggggacgccgccaaccacugcggcaccgucgccaacggggugcugcagacguucaugcgcauggcguggggcggcagcuacaucgcccucgacuccgggcacggcagcugggacugcaucaugaccuccuaccaguaccugaucauccagaacaccaccugggaggaccacugccaguucagccggcccucccccaucggguaccugggccuccugagccagcgcacgcgggacaucuacaucagccgccggcugcucggcaccuucaccuggacccuguccgacagcgaggggaaggacacgccgggcggguacugccugacccgcuggaugcucaucgaggccgagcugaagugcuucggcaacaccgccguggccaagugcaacgagaagcacgacgaggaguucugcgacaugcugcggcuguucgacuucaacaagcaggcgauccagcgccugaaggccgaggcccagauguccauccagcugaucaacaaggccgucaacgcccucaucaacgaccagcugaucaugaagaaccaccuccgggacaucauggggauccccuacugcaacuacagcaaguacugguaccucaaccacaccacgaccggcaagaccucccugcccaagugcuggcuggugagcaacggcuccuaccucaacgagacccacuucagcgacgacaucgagcagcaggcggacaacaugaucacggagaugcugcagaaggaguacauggagcgccaggggaagacgccccugggccucguggaccuguucgucuucuccaccagcuucuaccugaucuccaucuuccugcaccucgugaagaucccgacccaccggcacaucgugggcaagagcugccccaagccccaccgccugaaccacauggggaucugcuccugcgggcuguacaagcagcccggcgucccggugaaguggaagcggugaggacuaguuauaagacugacuagcccgaugggccucccaacgggcccuccuccccuccuugcaccgagauuaaucaaaggcucuuuucagagccaccaaaaaaaaaaaaaaaaaaaaaaaaaaaaaaaaaaaaaaaaaaaaaaaaaaaaaaaaaaaaaaaaagaauu

SEQ ID NO: 14943 - RNA, 1658 nt, Artificial Sequence
  mRNA product Design i-3 (hSL-A64-N5) comprising derived and/or modified sequence from LASV(G1442-SLE-2011;Clade IV)__AIT17180__GPC (opt1)
aggagaaagcuuaccaugggccagaucgugaccuucuuccaggaggucccccacgugaucgaggaggugaugaacaucguccugaucgcccucagcauccuggccgugcugaaggggcucuacaacguggcgaccugcggccugaucgggcuggucacguuccuccugcugugcggccgcuccugcaccaccacccucuacaaggggguguacgagcugcagacgcuggagcucaacauggagacccugaacaugaccaugccgcugagcugcaccaagaacaacucccaccacuacauccgggugggcaacgagacgggccucgagcugacccugaccaacaccagcaucaucaaccacaaguucugcaaccucuccgacgcccacaagaagaaccuguacgaccacgcccugaugagcaucaucuccacguuccaccucagcauccccaacuucaaccaguacgaggccauguccugcgacuucaacgggggcaagaucagcguccaguacaaccugucccacagcuacgccggggacgcggccaaccacugcggcaccguggccaacggggugcugcagaccuucaugcgcauggccuggggcggcuccuacaucgcgcucgacagcgggcggggcaacugggacugcaucaugaccuccuaccaguaccugaucauccagaacacgaccugggacgaccacugccaguucagccgccccucccccaucggguaccugggccuccugagccagcggacccgcgacgucuacaucucccggcgccugcucggcaccuucacguggacccugagcgacagcgaggggaaggacaccccgggcggguacugccugacccgguggaugcucaucgaggccgagcugaagugcuucggcaacacggccguggccaagugcaacgagaagcacgacgaggaguucugcgacaugcugcgccucuucgacuucaacaagcaggccauccagcggcugaaggcggaggcccagauguccauccagcugaucaacaaggccgugaacgcccucaucaacgaccagcugaucaugaagaaccaccuccgcgacaucauggggauccccuacugcaacuacagcaaguacugguaccugaacaacaccgccaccggcaagaccucccugcccaagugcuggcugaucagcaacggcuccuaccucaacgagacgcacuucagcgacgacaucgagcaggaggcggacaacaugaucaccgagaugcugcagaaggaguacauggagcggcaggggaagacgccccugggccucgucgaccuguucguguucuccaccagcuucuaccugaucuccaucuuccugcaccucgugaagaucccgacccaccgccacaucgucggcaagagcugccccaagccccaccggcugaaccacauggggaucugcuccugcgggcuguacaagcagcccggcgugccggugcgcuggaagcggugaggacuaguuauaagacugacuagcccgaugggccucccaacgggcccuccuccccuccuugcaccgagauuaaucaaaggcucuuuucagagccaccaaaaaaaaaaaaaaaaaaaaaaaaaaaaaaaaaaaaaaaaaaaaaaaaaaaaaaaaaaaaaaaaagaauu

SEQ ID NO: 14944 - RNA, 1658 nt, Artificial Sequence
  mRNA product Design i-3 (hSL-A64-N5) comprising derived and/or modified sequence from LASV(G3010-SLE-2013;Clade IV)__AIT17344__GPC (opt1)
aggagaaagcuuaccaugggccagaucgugaccuucuuccaggaggucccccacgugaucgaggaggugaugaacaucguccugaucgcccucagcauccuggccgugcugaaggggcucuacaacuucgcgaccugcggccugguggggcuggucacguuccuccugcugugcggccgcuccugcaccaccagccucuacaaggggguguacgagcugcagacccuggagcucaacauggagacgcugaacaugaccaugccgcuguccugcaccaagaacaacagccaccacuacaucauggugggcaacgagaccggccucgagcugacgcugaccaacaccuccaucaucaaccacaaguucugcaaccucagcgacgcccacaagaagaaccuguacaaccacgcccugauguccaucaucagcaccuuccaccucuccauccccaacuucaaccaguacgaggccaugagcugcgacuucaacgggggcaagaucuccguccaguacaaccugagccacuccuacgccggggacgcggccagccacugcggcacgguggccaacggggugcugcagaccuucaugcggauggccuggggcggcuccuacaucgcgcucgacagcggguacggcaagugggacugcaucaugaccuccuaccaguaccugaucauccagaacaccacgugggaggaccacugccaguucagccgccccucccccaucggguaccugggccuccugagccagcggacccgcgacaucuacaucagccggcgccugcucggcaccuucaccuggacgcuguccgacagcgaggggaaggacaccccgggcggguacugccugacccgguggaugcucaucgaggccgagcugaagugcuucggcaacaccgccgucgccaagugcaacgagaagcacgacgaggaguucugcgacaugcugcgccucuucgacuucaacaagcaggccauccagcggcugaagacggaggcgcagauguccauccagcugaucaacaaggccgugaacgcccucaucaacgaccagcugaucaugaagaaccaccuccgcgacaucauggggauccccuacugcaacuacagcaaguacugguaccugaaccacaccaccaccggcaagacgucccugcccaagugcuggcuggugagcaacggcuccuaccucaacgagacccacuucagcgacgacaucgagcagcaggccgacaacaugaucaccgagaugcugcagaaggaguacauggagcggcaggggaagacgccccugggccucgucgaccuguucguguucuccaccagcuucuaccugaucuccaucuuccugcaccucgugaagaucccgacccaccgccacaucgucggcaagagcugccccaagccccaccggcugaaccacauggggaucugcuccugcgggcuguacaagcagcccggcgugccggugcgcuggaagcggugaggacuaguuauaagacugacuagcccgaugggccucccaacgggcccuccuccccuccuugcaccgagauuaaucaaaggcucuuuucagagccaccaaaaaaaaaaaaaaaaaaaaaaaaaaaaaaaaaaaaaaaaaaaaaaaaaaaaaaaaaaaaaaaaagaauu

SEQ ID NO: 14945 - RNA, 1658 nt, Artificial Sequence
  mRNA product Design i-3 (hSL-A64-N5) comprising derived and/or modified sequence from LASV(G502-SLE-2009;Clade IV)__AIT17126__GPC (opt1)
aggagaaagcuuaccaugggccagaucgugaccuucuuccaggaggucccccacgugaucgaggaggugaugaacaucguccugaucgcccucagcauccuggccgugcugaaggggcucuacaacuucgcgaccugcggccugguggggcugcucacguuccugcugcucugcggccgcuccugcaccaccgggcuguacaagggcgucuacgagcugcagacccucgagcugaacauggagacgcugaacaugaccaugccgcucagcugcaccaagaacaacucccaccacuacaucauggugggcaacgagaccgggcuggagcugacgcucaccaacaccagcaucaucaaccacaaguucugcaaccuguccgacgcccacaagaagaaccuguacgaccacgcccucaugagcaucaucuccaccuuccaccugagcauccccaacuucaaccaguacgaggccauguccugcgacuucaacggcgggaagaucagcgugcaguacaaccugucccacagcuacgccggcgacgcggccgaccacugcgggacggucgccaacggcgugcuccagaccuucaugcggauggccuggggcggguccuacaucgcgcuggacagcggccgcgggcggugggacugcaucaugaccuccuaccaguaccugaucauccagaacaccacgugggaggaccacugccaguucagccgccccucccccaucggcuaccucggccugcugagccagcggacccgcgacaucuacaucucccggcgccuccuggggaccuucaccuggacgcugagcgacagcgagggcaaggacacccccgggggcuacugccucacccgguggaugcugaucgaggccgagcugaagugcuucgggaacaccgccguggccaagugcaacgagaagcacgacgaggaguucugcgacaugcuccgccuguucgacuucaacaagcaggccauccagcggcugaaggcggaggcccagauguccauccagcucaucaacaaggccgucaacgcccugaucaacgaccagcuggugaugaagaaccaccuccgcgacaucaugggcauccccuacugcaacuacagccgguacugguaccugaaccacacgaccaccggccgcaccucccugcccaagugcuggcucgugagcaacggguccuaccugaacgagacgcacuucagcgacgacaucgagcagcaggccgacaacaugaucaccgagaugcugcagaaggaguacauggagcggcagggcaagaccccgcucgggcuggucgaccuguucguguucuccaccagcuucuaccugaucuccaucuuccuccaccuggugaagaucccgacgcaccgccacaucgucggcaagagcugccccaagccccaccggcugaaccacauggggaucugcuccugcggccucuacaagcagcccggcgugccggugaaguggaagcgcugaggacuaguuauaagacugacuagcccgaugggccucccaacgggcccuccuccccuccuugcaccgagauuaaucaaaggcucuuuucagagccaccaaaaaaaaaaaaaaaaaaaaaaaaaaaaaaaaaaaaaaaaaaaaaaaaaaaaaaaaaaaaaaaaagaauu

SEQ ID NO: 14946 - RNA, 1658 nt, Artificial Sequence
  mRNA product Design i-3 (hSL-A64-N5) comprising derived and/or modified sequence from LASV(G733-SLE-2010;Clade IV)__AIT17154__GPC (opt1)
aggagaaagcuuaccaugggccagaucgugaccuucuuccaggaggucccccacgugaucgaggaggugaugaacaucguccugaucgcccucagcauccuggccgugcugaaggggcucuacaacuucgcgaccugcggcaucguggggcuggucuccuuccugcuccugugcggccgcagcugcacgaccucccuguacaaggggguguacgagcuccagacccuggagcugaacauggagacccucaacaugacgaugccgcugagcugcaccaagaacaacucccaccacuacaucauggugggcaacgagaccggccuggagcucacccugacgaacaccagcaucaucaaccacaaguucugcaaccuguccgacgcccacaagaagaaccucuacgaccacgcccugaugagcaucaucuccaccuuccaccugagcauccccaacuucaaccaguacgaggccauguccugcgacuucaacgggggcaagaucagcguccaguacaaccucucccacagcuacgccggggacgcggccaaccacugcggcaccaucgccaacggggugcugcagacguucaugcggauggccuggggcggcuccuacaucgcgcuggacagcgggcgcgaccggugggacugcaucaugaccuccuaccaguaccucaucauccagaacaccaccugggaggaccacugccaguucagccgccccucccccaucggcuaccuggggcugcucagccagcggacgcgcgacaucuacaucagccggcgccugcugggcaccuucaccuggacccucuccgacagcgagggcaaggacacgcccgggggcuacugccugacccgguggaugcugaucgaggccgagcucaagugcuucgggaacaccgccguggccaagugcaacgagaagcacgacgaggaguucugcgacaugcugcgccuguucgacuucaacaagcaggccauccagcggcucaaggcggaggcccagauguccauccagcugaucaacaaggccgucaacgcccugaucaacgaccagcucaucaugaagaaccaccuccgcgacaucaugggcauccccuacugcaacuacagcaaguacugguaccugaaccacaccacgaccgggaagaccucccugcccaagugcuggcuggugagcaacggcuccuaccugaacgagacccacuucagcgacgacaucgagcagcaggccgacaacaugaucacggagaugcuccagaaggaguacauggagcggcagggcaagaccccgcuggggcugguggaccucuucgucuucuccaccagcuucuaccugaucuccaucuuccugcaccuggugaagaucccgacccaccgccacguggucggcaagagcugccccaagccccaccggcucaaccacauggggaucugcuccugcggccuguacgggcagcccggcgugccggugaaguggaagcgcugaggacuaguuauaagacugacuagcccgaugggccucccaacgggcccuccuccccuccuugcaccgagauuaaucaaaggcucuuuucagagccaccaaaaaaaaaaaaaaaaaaaaaaaaaaaaaaaaaaaaaaaaaaaaaaaaaaaaaaaaaaaaaaaaagaauu

SEQ ID NO: 14947 - RNA, 1658 nt, Artificial Sequence
  mRNA product Design i-3 (hSL-A64-N5) comprising derived and/or modified sequence from MOPV/LASV reassortant(IGS-1;Clade IV)__AFY05576__GPC (opt1)
aggagaaagcuuaccaugggccagaucgugaccuucuuccaggaggucccccacgugaucgaggaggugaugaacaucguccugaucgcccucagcgugcuggccgugcugaaggggcucuacaacuucgcgaccugcggccuggucgggcuggugacguuccuccugcugugcggccgcuccugcaccaccagccucuacaaggggguguacgagcugcagacccuggagcucaacauggagacgcugaacaugaccaugccgcuguccugcaccaagaacaacagccaccacuacaucauggucggcaacgagaccggccucgagcugacgcugaccaacaccuccaucaucaaccacaaguucugcaaccucagcgacgcccacaagaagaaccuguacgaccacgcccugauguccaucaucagcaccuuccaccucuccauccccaacuucaaccaguacgaggccaugagcugcgacuucaacgggggcaagaucuccgugcaguacaaccugagccacuccuacgccggggacgcggccaaccacugcggcacgguggccaacgggguccugcagaccuucaugcggauggccuggggcggcagcuacaucgcgcucgacuccgggcgcggcaacugggacugcaucaugaccagcuaccaguaccugaucauccagaacaccacgugggaggaccacugccaguucucccggcccagccccaucggguaccugggccuccugucccagcgcacccgggacaucuacaucagccgccggcugcucggcaccuucaccuggacgcugagcgacuccgagggggaggacaccccgggcggguacugccugacccgcuggaugcucaucgaggccgagcugaagugcuucggcaacaccgccguggccaagugcaacgagaagcacgacgaggaguucugcgacaugcugcggcuguucgacuucaacaagcaggccauccagcgccugaaggcggaggcccagaugagcauccagcugaucaacaaggccgugaacgcccucaucaacgaccagcugaucaugaagaaccaccuccgggacaucauggggauccccuacugcaacuacuccaaguacugguaccucaaccacacgaccaccggccgcaccagccugcccaagugcuggcuggucuccaacggcagcuaccucaacgagacgcacuucuccgacgacaucgagcagcaggccgacaacaugaucaccgagaugcugcagaaggaguacauggagcggcaggggaagacgccccugggccucguggaccuguucguguucagcaccuccuucuaccugaucagcaucuuccugcaccucgucaagaucccgacccaccgccacaucguggggaaguccugccccaagccccaccggcugaaccacaugggcaucugcagcugcgggcuguacaagcagcccggcgugccggucaaguggaagcgcugaggacuaguuauaagacugacuagcccgaugggccucccaacgggcccuccuccccuccuugcaccgagauuaaucaaaggcucuuuucagagccaccaaaaaaaaaaaaaaaaaaaaaaaaaaaaaaaaaaaaaaaaaaaaaaaaaaaaaaaaaaaaaaaaagaauu

SEQ ID NO: 14948 - RNA, 1658 nt, Artificial Sequence
  mRNA product Design i-3 (hSL-A64-N5) comprising derived and/or modified sequence from LASV(LM765-SLE-2012;Clade IV)__AIT17814__GPC (opt1)
aggagaaagcuuaccaugggccagaucgugaccuucuuccaggaggucccccacgugaucgaggaggugaugaacaucguccugaucgcccucagcauccuggccgugcugaaggggcucuacaacuucgcgaccugcggccugguggggcuggucacguuccuccugcugugcggccgcuccugcaccaccagccucuacaaggggguguacgagcugcagacccuggagcucaacauggagacgcugaacaugaccaugccgcuguccugcaccaagaacaacagccaccacuacaucauggugggcaacgagaccggccucgagcugacgcugaccaacaccuccaucaucgaccacaaguucugcaaccucagcgacgcccaccggaagaaccuguacgaccacgcccugauguccaucaucagcaccuuccaccucuccauccccaacuucaaccaguacgaggccaugagcugcgacuucaacgggggcaagaucuccguccaguacaaccugagccacuccuacgccaaggacgcggccgaccacugcgggacgguggccaacggcgugcugcagaccuucaugcgcauggccuggggcgggagcuacaucgcgcucgacuccggccgggggcgcugggacugcaucaugaccagcuaccaguaccugaucauccagaacaccacgugggaggaccacugccaguucucccggcccagccccaucggcuaccuggggcuccugucccagcgcacccgggacaucuacaucagccgccggcugcucggcaccuucaccuggacgcugagcgacuccgagggcaaggacacccccgggggcuacugccugacccgcuggaugcucaucgaggccgagcugaagugcuucgggaacaccgccgucgccaagugcaacgagaagcacgacgaggaguucugcgacaugcugcggcuguucgacuucaacaagcaggccauccagcgccugaaggcggaggcccagaugagcauccagcugaucaacaaggccgugaacgcccucaucaacgaccagcugaucaugaagaaccaccuccgggacaucaugggcauccccuacugcaacuacuccaaguacugguaccucaaccacacgaccaccgggaagaccagccugcccaagugcuggcugguguccaacggcagcuaccucaacgagacgcacuucuccgacgacaucgagcagcaggccgacaacaugaucaccgagaugcugcagaaggaguacauggagcgccagggcaagaccccgcuggggcucgucgaccuguucguguucagcaccuccuucuaccugaucagcaucuuccugcaccucgugaagaucccgacgcaccggcacaucgucggcaagcccugccccaagccccaccgccugaaccacauggggaucugcuccugcggccuguacaagcagccgggggugcccgugaaguggaagcggugaggacuaguuauaagacugacuagcccgaugggccucccaacgggcccuccuccccuccuugcaccgagauuaaucaaaggcucuuuucagagccaccaaaaaaaaaaaaaaaaaaaaaaaaaaaaaaaaaaaaaaaaaaaaaaaaaaaaaaaaaaaaaaaaagaauu

SEQ ID NO: 14949 - RNA, 1658 nt, Artificial Sequence
  mRNA product Design i-3 (hSL-A64-N5) comprising derived and/or modified sequence from LASV(LM776-SLE-2012;Clade IV)__AIT17824__GPC (opt1)
aggagaaagcuuaccaugggccagaucgugaccuucuuccaggaggucccccacgugaucgaggaggugaugaacaucguccugaucgcccucagcauccuggccgugcugaaggggcucuacaacuucgcgaccugcggccugguggggcuggucacguuccuccugcugugcggccgcuccugcaccaccagcguguacaaggggguguacgagcuccagacccuggagcugaacauggagacgcucaacaugaccaugccgcuguccugcaccaagaacaacagccaccacuacaucauggucggcaacgagaccggccuggagcucacgcugaccaacaccuccaucaucaaccacaaguucugcaaccugagcgacgcccacaagaagaaccucuacgaccacgcccugauguccaucaucagcaccuuccaccuguccauccccaacuucaaccaguacgaggccaugagcugcgacuucaacgggggcaagaucuccgugcaguacaaccucagccacuccuacgccggggacgcggccaaccacugcggcacgguggccaacgggguccugcagaccuucaugcggauggccuggggcggcagcuacaucgcgcuggacuccgggcacggcaagugggacugcaucaugaccagcuaccaguaccucaucauccagaacaccacgugggaggaccacugccaguucucccgccccagccccaucggguaccugggccugcucucccagcggacccgcgacaucuacaucagccggcgccugcugggcaccuucaccuggacgcucagcgacuccgaggggaaggacaccccgggcggguacugccugacccgguggaugcugaucgaggccgagcucaagugcuucggcaacaccgccguggccaagugcaacgagaagcacgacgaggaguucugcgacaugcugcgccuguucgacuucaacaagcaggccauccagcggcucaaggcggaggcccagaugagcauccagcugaucaacaaggccgugaacgcccugaucaacgaccagcucaucaugaagaaccaccuccgcgacaucauggggauccccuacugcaacuacuccaaguacugguaccugaaccacacgaccaccggcaagaccagccugcccaagugcuggcuggucuccaacggcagcuaccugaacgagacgcacuucuccgacgacaucgagcagcaggccgacaacaugaucaccgagaugcuccagaaggaguacauggagcggcaggggaagacgccccugggccugguggaccucuucguguucagcaccuccuucuaccugaucagcaucuuccugcaccuggucaagaucccgacccaccgccacaucguggggaaguccugccccaagccccaccggcucaaccacaugggcaucugcagcugcgggcuguacaagcagcccggcgugccgguccgcuggaagcggugaggacuaguuauaagacugacuagcccgaugggccucccaacgggcccuccuccccuccuugcaccgagauuaaucaaaggcucuuuucagagccaccaaaaaaaaaaaaaaaaaaaaaaaaaaaaaaaaaaaaaaaaaaaaaaaaaaaaaaaaaaaaaaaaagaauu

SEQ ID NO: 14950 - RNA, 1658 nt, Artificial Sequence
  mRNA product Design i-3 (hSL-A64-N5) comprising derived and/or modified sequence from LASV(Mad39;Clade IV)__ANH09722__GPC (opt1)
aggagaaagcuuaccaugggccagaucgugaccuucuuccaggaggucccccacgugaucgaggaggugaugaacaucguccugaucgcccucagcauccuggccgugcugaaggggcucuacaacguggcgaccugcggccugaucgggcuggucacguuccuccugcugugcggccgcuccugcaccaccacccucuacaaggggguguacgagcugcaggcccuggagcucaacauggagacgcugaacaugaccaugccgcugagcugcaccaagaacaacucccaccacuacauccgggugggcaacgagaccggccucgagcugacgcugaccaacaccagccucaucaaccacaaguucugcaaccuguccgacgcccacaagaagaaccuguacgaccacgcccucaugagcaucaucuccaccuuccaccugagcauccccaacuucaaccaguacgaggccauguccugcgacuucaacgacgggaagaucagcguccaguacaaccugucccacacguacgcgggcgacaccgccaaccacugcgggaccguggccaacggcgugcuccagaccuucaugcgcauggccuggggcgggagcuacaucgcgcuggacuccggccgcgggggcugggacugcaucaugacgagcuaccaguaccugaucauccagaacaccaccugggaggaccacugccaguucucccggcccagccccaucggguaccucggccugcugucccagcggacccgcgacaucuacaucagccggcgccuccugggcacguucaccuggacccuguccgacagcgaggggaaggacaccccgggcggguacugccucacgcgguggaugcugaucgaggccgagcugaagugcuucggcaacaccgccgucgccaagugcaacgagaagcacgacgaggaguucugcgacaugcuccgccuguucgacuucaacaagcaggccauccagcggcugaaggcggaggcccagaugagcauccagcucaucaacaaggccgugaacgcccugaucaacgaccagcugaucaugaagaaccaccuccgcgacaucauggggauccccuacugcaacuacuccaaguacugguaccugaaccacaccgugaccggcaagacgagccugcccaagugcuggcucgucuccaacggcagcuaccugaacgagacccacuucuccgacgacaucgagcagcaggccgacaacaugaucaccgagaugcugcagaaggaguacauggagcggcaggggaagacgccccucggccugguggaccuguucguguucagcaccuccuucuaccugaucagcaucuuccuccaccuggucaagaucccgacccaccgccacgugguggggaagcccugccccaagccccaccggcugaaccacaugggcaucugcuccugcggguucuacaagcagccgggcguccccgugcgcuggaagcggugaggacuaguuauaagacugacuagcccgaugggccucccaacgggcccuccuccccuccuugcaccgagauuaaucaaaggcucuuuucagagccaccaaaaaaaaaaaaaaaaaaaaaaaaaaaaaaaaaaaaaaaaaaaaaaaaaaaaaaaaaaaaaaaaagaauu

SEQ ID NO: 14951 - RNA, 1658 nt, Artificial Sequence
  mRNA product Design i-3 (hSL-A64-N5) comprising derived and/or modified sequence from LASV(Z0947-SLE-2011;Clade IV)__AIT17840__GPC (opt1)
aggagaaagcuuaccaugggccagaucgugaccuucuuccaggaggucccccacgugaucgaggaggugaugaacaucguccugaucgcccucagcauccuggccgugcugaaggggcucuacaacuucgcgaccugcggccugguggggcuggucacguuccuccugcugugcggccgcuccugcaccaucagccucuacaaggggguguacgagcugcagacccuggagcucaacauggagacccugaacaugacgaugccgcuguccugcaccaagaacaacagccaccacuacaucauggugggcaacgagaccggccucgagcugacccugacgaacaccuccaucaucaaccacaaguucugcaaccucagcgacgcccacaagaagaaccuguacgaccacgcccugauguccaucaucagcaccuuccaccucuccauccccaacuucaaccaguacgaggccaugagcugcgacuucaacgggggcaagaucuccguccaguacaaccugagccacuccuacgccggggacgcggccaaccacugcggcaccguggccaacggggugcugcagacguucaugcggauggccuggggcggcagcuacaucgcgcucgacuccgggcgcgaccggugggacugcaucaugaccagcuaccaguaccugaucauccagaacaccaccugggaggaccacugccaguucucccgccccagccccaucggcuaccuggggcuccugucccagcggacgcgcgacaucuacaucagccggcgccugcucggcaccuucaccuggacccugagcgacuccgagggcaaggacacgcccgggggcuacugccugacccgguggaugcucaucgaggccgagcugaagugcuucgggaacaccgccgucgccaagugcaacgagaagcacgacgaggaguucugcgacaugcugcgccucuucgacuucaacaagcaggccauccagcggcugaaggcggaggcccagaugagcauccagcugaucaacaaggccgugaacgcccucaucaacgaccagcugaucaugaagaaccaccuccgcgacaucaugggcauccccuacugcaacuacuccaaguacugguaccugaaccacaccacgaccgggaagaccagccugcccaagugcuggcugguguccaacggcagcuaccucaacgagacccacuucuccgacgacaucgagcagcaggccgacaacaugaucacggagaugcugcagaaggaguacauggagcggcagggcaagaccccgcuggggcucgucgaccuguucguguucagcaccuccuucuaccugaucagcaucuuccugcaccucgugaagaucccgacccaccgccacaucgucggcaagcccugccccaagccccaccggcugaaccacauggggaucugcuccugcggccuguacaagcagccgggggugcccgugaaguggaagcgcugaggacuaguuauaagacugacuagcccgaugggccucccaacgggcccuccuccccuccuugcaccgagauuaaucaaaggcucuuuucagagccaccaaaaaaaaaaaaaaaaaaaaaaaaaaaaaaaaaaaaaaaaaaaaaaaaaaaaaaaaaaaaaaaaagaauu

SEQ ID NO: 14952 - RNA, 1658 nt, Artificial Sequence
  mRNA product Design i-3 (hSL-A64-N5) comprising derived and/or modified sequence from LASV(Josiah;Clade IV)__NP_694870__GPC (opt4)
aggagaaagcuuaccaugggccagaucgugaccuucuuccaggaggugccccacgugaucgaggaggugaugaacaucgugcugaucgcccugagcgugcuggccgugcugaagggccuguacaacuucgccaccugcggccuggugggccuggugaccuuccugcugcugugcggcagaagcugcaccaccagccuguacaagggcguguacgagcugcagacccuggagcugaacauggagacccugaacaugaccaugccccugagcugcaccaagaacaacagccaccacuacaucauggugggcaacgagaccggccuggagcugacccugaccaacaccagcaucaucaaccacaaguucugcaaccugagcgacgcccacaagaagaaccuguacgaccacgcccugaugagcaucaucagcaccuuccaccugagcauccccaacuucaaccaguacgaggccaugagcugcgacuucaacggcggcaagaucagcgugcaguacaaccugagccacagcuacgccggcgacgccgccaaccacugcggcaccguggccaacggcgugcugcagaccuucaugagaauggccuggggcggcagcuacaucgcccuggacagcggcagaggcaacugggacugcaucaugaccagcuaccaguaccugaucauccagaacaccaccugggaggaccacugccaguucagcagacccagccccaucggcuaccugggccugcugagccagagaaccagagacaucuacaucagcagaagacugcugggcaccuucaccuggacccugagcgacagcgagggcaaggacacccccggcggcuacugccugaccagauggaugcugaucgaggccgagcugaagugcuucggcaacaccgccguggccaagugcaacgagaagcacgacgaggaguucugcgacaugcugagacuguucgacuucaacaagcaggccauccagagacugaaggccgaggcccagaugagcauccagcugaucaacaaggccgugaacgcccugaucaacgaccagcugaucaugaagaaccaccugagagacaucaugggcauccccuacugcaacuacagcaaguacugguaccugaaccacaccaccaccggcagaaccagccugcccaagugcuggcuggugagcaacggcagcuaccugaacgagacccacuucagcgacgacaucgagcagcaggccgacaacaugaucaccgagaugcugcagaaggaguacauggagagacagggcaagaccccccugggccugguggaccuguucguguucagcaccagcuucuaccugaucagcaucuuccugcaccuggugaagauccccacccacagacacaucgugggcaagagcugccccaagccccacagacugaaccacaugggcaucugcagcugcggccuguacaagcagcccggcgugcccgugaaguggaagagaugaggacuaguuauaagacugacuagcccgaugggccucccaacgggcccuccuccccuccuugcaccgagauuaaucaaaggcucuuuucagagccaccaaaaaaaaaaaaaaaaaaaaaaaaaaaaaaaaaaaaaaaaaaaaaaaaaaaaaaaaaaaaaaaaagaauu

SEQ ID NO: 14953 - RNA, 1655 nt, Artificial Sequence
  mRNA product Design i-3 (hSL-A64-N5) comprising derived and/or modified sequence from LASV(LP;Clade I)__AAF86701__GPC (opt4)
aggagaaagcuuaccaugggccagaucaucaccuucuuccaggaggugccccacgugaucgaggaggugaugaacaucgugcugaucgcccugagccugcuggccauccugaagggccuguacaacaucgccaccugcggcaucaucggccugguggccuuccuguuccugugcggcaagagcugcagccugacccugaagggcggcuacgagcugcagacccuggagcugaacauggagacccugaacaugaccaugccccugagcugcaccaagaacagcagccaccacuacaucagagugggcaacgagaccggccuggagcugacccugaccaacaccagcaucaucaaccacaaguucugcaaccugagcgacgcccacaagaagaaccuguacgaccacgcccugaugagcaucaucagcaccuuccaccugagcauccccaacuucaaccaguacgaggccaugagcugcgacuucaacggcggcaagaucagcgugcaguacaaccugagccacagcuacgccggcgacgccgccgagcacugcggcaccguggccaacggcgugcugcagaccuucaugagaauggccuggggcggcagauacaucgcccuggacagcggcaagggcaacugggacugcaucaugaccagcuaccaguaccugaucauccagaacaccaccugggaggaccacugccaguucagcagacccagccccaucggcuaccugggccugcugagccagagaaccagagacaucuacaucagcagaagacugcugggcaccuucaccuggacccugagcgacagcgagggcaacgagacccccggcggcuacugccugaccagauggaugcugaucgaggccgagcugaagugcuucggcaacaccgccguggccaagugcaacgagaagcacgacgaggaguucugcgacaugcugagacuguucgacuucaacaagcaggccaucagaagacugaaggccgaggcccagaugagcauccagcugaucaacaaggccgugaacgcccugaucaacgaccagcugaucaugaagaaccaccugagagacaucaugggcauccccuacugcaacuacagcaaguacugguaccugaaccacaccagcagcggcagaaccagccugcccaagugcuggcugaucagcaacggcagcuaccugaacgagacccaguucagcgacgacaucgagcagcaggccgacaacaugaucaccgagaugcugcagaaggaguacaucgagagacagggcaagaccccccugggccugguggacaucuucaucuucagcaccagcuucuaccugaucagcaucuuccugcaccugaucaagauccccacccacagacacaucgugggcaagcccugccccaagccccacagacugaaccacaugggcgugugcagcugcggccuguacaagcaccccggcgugcccaccaaguggaagagaugaggacuaguuauaagacugacuagcccgaugggccucccaacgggcccuccuccccuccuugcaccgagauuaaucaaaggcucuuuucagagccaccaaaaaaaaaaaaaaaaaaaaaaaaaaaaaaaaaaaaaaaaaaaaaaaaaaaaaaaaaaaaaaaaagaauu

SEQ ID NO: 14954 - RNA, 1655 nt, Artificial Sequence
  mRNA product Design i-3 (hSL-A64-N5) comprising derived and/or modified sequence from LASV(803213;Clade II)__AAF86703__GPC (opt4)
aggagaaagcuuaccaugggccagaucaucaccuucuuccaggaggugccccacgugaucgaggaggugaugaacaucgugcugaucgcccugagccugcuggccauccugaagggcaucuacaacguggccaccugcggccuguucggccugaucagcuuccugcugcugugcggcagaagcugcagcgugaccuacaagggcguguacgagcugcagacccuggagcugaacauggccaaccugaacaugaccaugccccugagcugcaccaagaacaacagccaccacuacaucauggugggcaacgagaccggccuggagcugacccugaccaacaccagcaucaucaaccacaaguucugcaaccugagcgacgcccacaagaagaaccuguacgaccacgcccugaugagcaucaucagcaccuuccaccugagcauccccaacuucaaccaguacgaggccaugagcugcgacuucaacggcggcaagaucagcgugcaguacaaccugagccacagcuucgccguggacgccgccaaccacugcggcaccaucgccaacggcgugcugcagaccuucaugagaauggccuggggcggcagcuacaucgcccuggacagcggcaagggcaacugggacugcaucaugaccagcuaccaguaccugaucauccagaacaccaccugggaggaccacugccaguucagcagacccagccccaucggcuaccugggccugcugagccagagaaccagagacaucuacaucagcagaagacugcugggcaccuucaccuggacccugagcgacagcgagggcaacgaggcccccggcggcuacugccugaccagauggaugcugaucgaggccgagcugaagugcuucggcaacaccgccguggccaagugcaacgagaagcacgacgaggaguucugcgacaugcugagacuguucgacuucaacaagcaggccaucaagagacugaagaccgaggcccagaugagcauccagcugaucaacaaggccgugaacgcccugaucaacgaccagcugaucaugaagaaccaccugagagacaucaugggcauccccuacugcaacuacagcagauacugguaccugaaccacaccgugaccggcaagaccagccugcccagaugcuggcuggugagcaacggcagcuaccugaacgagacccacuucagcgacgacaucgagcagcaggccgacaacaugaucaccgagaugcugcagaaggaguacauggacagacagggcaagaccccccugggccugguggaccuguucguguucagcaccagcuucuaccugaucagcaucuuccugcaccuggugaagauccccacccacagacacaucgugggcaagcccugccccaagccccacagacugaaccacaugggcaucugcagcugcggccuguacaagcaccccggcgugcccgugaaguggaagagaugaggacuaguuauaagacugacuagcccgaugggccucccaacgggcccuccuccccuccuugcaccgagauuaaucaaaggcucuuuucagagccaccaaaaaaaaaaaaaaaaaaaaaaaaaaaaaaaaaaaaaaaaaaaaaaaaaaaaaaaaaaaaaaaaagaauu

SEQ ID NO: 14955 - RNA, 1655 nt, Artificial Sequence
  mRNA product Design i-3 (hSL-A64-N5) comprising derived and/or modified sequence from LASV(GA391;Clade III)__CAA36645__GPC (opt4)
aggagaaagcuuaccaugggccagaucgugaccuucuuccaggaggugccccacgugaucgaggaggugaugaacaucgugcugaucgcccugagcauccuggccauccugaagggccuguacaacguggccaccugcggccugaucggccuggugaccuuccugcugcugagcggcagaagcugcagccugaucuacaagggcaccuacgagcugcagacccuggagcugaacauggagacccugaacaugaccaugccccugagcugcaccaagaacaacagccaccacuacaucagagugggcaacgagaccggccuggagcugacccugaccaacaccagcauccugaaccacaaguucugcaaccugagcgacgcccacaagagaaaccuguacgaccacagccugaugagcaucaucagcaccuuccaccugagcauccccaacuucaaccaguacgaggccaugagcugcgacuucaacggcggcaagaucaccgugcaguacaaccugagccacagcuucgccguggacgccgccggccacugcggcacccuggccaacggcgugcugcagaccuucaugagaauggccuggggcggcagcuacaucgcccuggacagcggcagaggcaacugggacugcaucaugaccagcuaccaguaccugaucauccagaacaccaccugggacgaccacugccaguucagcagacccagccccaucggcuaccugggccugcugagccagagaaccagagacaucuacaucagcagaagacugcugggcaccuucaccuggacccugagcgacagcgagggcaacgagacccccggcggcuacugccugaccagauggaugcugaucgaggccgagcugaagugcuucggcaacaccgccguggccaagugcaacgagaagcacgacgaggaguucugcgacaugcugagacuguucgacuucaacaagcaggccaucagaagacugaagaccgaggcccagaugagcauccagcugaucaacaaggccgugaacgcccugaucaacgaccagcugaucaugaagaaccaccugagagacaucaugggcauccccuacugcaacuacagcagauacugguaccugaaccacaccagcaccggcaagaccagccugcccagaugcuggcugaucagcaacggcagcuaccugaacgagaccaaguucagcgacgacaucgagcagcaggccgacaacaugaucaccgagaugcugcagaaggaguacaucgacagacagggcaagaccccccugggccugguggaccuguucguguucagcaccagcuucuaccugaucagcaucuuccugcaccuggugaagauccccacccacagacacaucgugggcaagcccugccccaagccccacagacugaaccacaugggcaucugcagcugcggccuguacaagcagcccggcgugcccgugagauggaagagaugaggacuaguuauaagacugacuagcccgaugggccucccaacgggcccuccuccccuccuugcaccgagauuaaucaaaggcucuuuucagagccaccaaaaaaaaaaaaaaaaaaaaaaaaaaaaaaaaaaaaaaaaaaaaaaaaaaaaaaaaaaaaaaaaagaauu

SEQ ID NO: 14956 - RNA, 1658 nt, Artificial Sequence
  mRNA product Design i-3 (hSL-A64-N5) comprising derived and/or modified sequence from LASV(AV;Clade V)__CCA30314__GPC (opt4)
aggagaaagcuuaccaugggccagaucgugaccuucuuccaggaggugccccacgugaucgaggaggugaugaacaucgugcugaucgcccugagcauccuggccgugcugaagggccuguacaacaucgccaccugcggccugaucggccugaucaccuuccugcugcugugcggcagaagcugcagcagcaaccuguacaagggcguguacgagcugcagagccuggaccugaacauggagacccugaacaugaccaugccccugagcugcaccaagaacaacagccaccacuacaucagagugggcaacgacaccggccuggagcugacccugaccaacaccagcauccugaaccacaaguucugcaaccugagcgacgcccacaagaaggaccuguacgaccacgcccugaugagcaucaucagcaccuuccaccugagcauccccaacuucaaccaguacgaggccaugagcugcgacuucaacggcggcaagaucagcgugcaguacaaccugagccacagcuacgccaucgacgccgccaaccacugcggcaccguggccaacggcauccugcagaccuucaugagaauggccuggggcggcagcuacaucgcccuggacagcggcagaggcaacugggacugcaucaugaccagcuaccaguaccugaucauccagaacaccaccugggagaaccacugccaguucagcagacccagccccaucggcuaccugggccugcugagccagagaaccagagacaucuacaucagcagaagacugcugggcaccuucaccuggacccugagcgacagcgagggcaacgccacccccggcggcuacugccugaccagauggaugcugaucgaggccgagcugaagugcuucggcaacaccgccguggccaagugcaacgagaagcacgacgaggaguucugcgacaugcugagacuguucgacuucaacaagcaggccaucagcagacugaagagcgaggcccagaugagcauccagcugaucaacaaggccgugaacgcccugaucaacgaccagcugaucaugaagaaccaccugagagacaucaugggcauccccuacugcaacuacagcaaguacugguaccugaaccacaccaucaccggcaagaccagccugcccaagugcuggcuggugagcaacggcagcuaccugaacgagacccacuucagcgacgacaucgagcagcaggccgacaacaugaucaccgagaugcugcagaaggaguacauggagagacagggcaagaccccccugggccugguggaccuguucguguucagcaccagcuucuaccugaucagcaucuuccugagacuggugaagauccccacccacagacacaucgugggcaagcccugccccaagccccacagacugaaccacaugggcaucugcagcugcggccuguacaagcagcccggcgugcccgugagauggaagagaugaggacuaguuauaagacugacuagcccgaugggccucccaacgggcccuccuccccuccuugcaccgagauuaaucaaaggcucuuuucagagccaccaaaaaaaaaaaaaaaaaaaaaaaaaaaaaaaaaaaaaaaaaaaaaaaaaaaaaaaaaaaaaaaaagaauu

SEQ ID NO: 14957 - RNA, 1655 nt, Artificial Sequence
  mRNA product Design i-3 (hSL-A64-N5) comprising derived and/or modified sequence from LASV(Togo/2016/7082;Clade VI)__AMR44577__GPC (opt4)
aggagaaagcuuaccaugggccagaucaucaccuucuuccaggaggugccccacgugaucgaggaggugaugaacaucgugcugaucgcccugagccugcuggccauccugaagggcguguacaacguggccaccugcggcaucaucggccuggugaccuuccuguuccugugcggcagaagcugcagccugaucuacaagggcagcuacgagcugcagacccuggagcugaacauggagacccugaacaugaccaugccccugagcugcaccaagaacagcagccaccacuacaucagagugggcaacgagaccggccuggagcugacccugaccaacaccagcaucaucaaccacaaguucugcaaccugagcgacgcccacaagagaaaccuguacgaccacgcccugaugagcauccugagcaccuuccaccugagcauccccaacuucaaccaguacgaggccaugagcugcgacuucaacggcggcaagaucagcgugcaguacaaccugagccacgccuacgccguggacgccgccgagcacugcggcaccguggccaacggcgugcugcagaccuucaugagaauggccuggggcggcagcuacaucgcccuggacagcggcagaggcaacugggacugcaucaugaccagcuaccaguaccugaucauccagaacaccaccugggaggaccacugccaguucagcagacccagccccaucggcuaccugggccugcugagccagagaaccagagacaucuacaucagcagaagacugcugggcaccuucaccuggacccugagcgacagcgagggcaacgagacccccggcggcuacugccugaccagauggaugcugaucgaggccgagcugaagugcuucggcaacaccgccguggccaagugcaacgagaagcacgacgaggaguucugcgacaugcugagacuguucgacuucaacaagcaggccauccagagacugaagagcgaggcccagaugagcauccagcugaucaacaaggccgugaacgcccugaucaacgaccagcugaucaugaagaaccaccugagagacaugaugggcauccccuacugcaacuacagcaaguacugguaccugaaccacaccagcagcggcagaaccagccugcccaagugcuggcuggugagcaacggcagcuaccugaacgagacccacuucagcgacgacaucgagcagcaggccgacaacaugaucaccgagaugcugcagaaggaguacaucgacagacagggcaagaccccccugggccugguggaccuguucguguucagcaccagcuucuaccugaucagcaucuuccugcaccugaucaagauccccacccacagacacaucgugggcaagcccugccccaagccccacagacugaaccacaugggcaucugcagcugcggccuguacaagcagcccggcgugcccaccagauggaagagaugaggacuaguuauaagacugacuagcccgaugggccucccaacgggcccuccuccccuccuugcaccgagauuaaucaaaggcucuuuucagagccaccaaaaaaaaaaaaaaaaaaaaaaaaaaaaaaaaaaaaaaaaaaaaaaaaaaaaaaaaaaaaaaaaagaauu

SEQ ID NO: 14958 - RNA, 1655 nt, Artificial Sequence
  mRNA product Design i-3 (hSL-A64-N5) comprising derived and/or modified sequence from LASV(KAK-428;Clade n.d. (VII))__ANH09740__GPC (opt4)
aggagaaagcuuaccaugggccagaucgugaccuucuuccaggaggugccccacgugaucgaggaggugaugaacaucgugcugaucgcccugagccugcuggccauccugaagggccuguacaacuucgccaccugcggcgugaucggccugaucaccuuccugcugcugugcggcagaagcugcagcgccaccuacaagggccaguacgagcugcagacccuggagcugaacauggagagccugaacaugaccaugccccugagcugcaccaagaacaacagccaccacuacaucagagccggcaacaacaccggccuggagcugacccugaccaacaccagcaucaucagccacaaguucugcaaccugagcgacgcccacaagaagaaccuguacgaccacacccugaugagcaucaucaccaccuuccaccugagcauccccaacuucaaccaguacgaggccaugagcugcgacuucaacggcggcaagaucagcauccaguacaaccugagccacagcuacgccggcgacgccgcccagcacugcggcaccguggccaacggcgugcugcagaccuucaugagaauggccuggggcggcagcuaccuggcccuggacagcggcagaagaggcugggacugcaucaucagcagcuaccaguaccugaucauccagaacaccaccugggacgaccacugccaguucagcagacccagccccaucggcuaccugggcuucgugagccagaagaccagagacaucuacaucagcagaagacugcugggcaccuucaccuggacccugagcgacagcgagggccacgacaugcccggcggcuacugccugaccagauggaugcugaucgaggccgaccugaagugcuucggcaacaccgccguggccaagugcaacgagaagcacgacgaggaguucugcgacauguggagacuguucgacuucaacaagcaggccauccagagacugaaggccgaggcccagaugaacauccagcugaucaacaaggccgugaacgcccugaucaacgaccagcugaugaugaagaaccaccugagagacaucaugggcauccccuacugcaacuacagcaaguucugguaccugaacaacaccaccaccggcagaaccagccugcccagaugcuggcugaucagcaacggcagcuaccugaacgagacccacuucagcgacgacaucgagcagcaggccgacaacaugaucaccgagaugcugcagaaggaguacauggacagacagggcaagaccccccugggccugguggaccuguucguguucagcaccagcuucuaccugaucaccaucuuccugcaccuggugaagauccccacccacagacacaucgugggcaagcccugccccaagccccacagacugaaccacaugggcaucugcagcugcggccuguacaagcagcccggcgugcccgugagauggaagagaugaggacuaguuauaagacugacuagcccgaugggccucccaacgggcccuccuccccuccuugcaccgagauuaaucaaaggcucuuuucagagccaccaaaaaaaaaaaaaaaaaaaaaaaaaaaaaaaaaaaaaaaaaaaaaaaaaaaaaaaaaaaaaaaaagaauu

SEQ ID NO: 14959 - RNA, 1655 nt, Artificial Sequence; identical to SEQ ID NO: 14953
  mRNA product Design i-3 (hSL-A64-N5) comprising derived and/or modified sequence from LASV(Pinneo-NIG-1969;Clade I)__AIT17836__GPC (opt4)

SEQ ID NO: 14960 - RNA, 1655 nt, Artificial Sequence
  mRNA product Design i-3 (hSL-A64-N5) comprising derived and/or modified sequence from LASV(ISTH0009-NIG-2011;Clade II)__AIT17404__GPC (opt4)
aggagaaagcuuaccaugggccagaucaucaccuucuuccaggaggugccccacgugaucgaggaggugaugaacaucgugcugaucgcccugagccugcuggccauccugaagggcaucuacaacguggccaccugcggccuguucggccuggugagcuuccugcugcugugcggcagaagcugcagcaccaccuacaagggcguguacgagcugcagacccuggagcuggacauggccagccugaacaugaccaugccccugagcugcaccaagaacaacagccaccacuacaucauggugggcaacgagaccggccuggagcugacccugaccaacaccagcaucaucaaccacaaguucugcaaccugagcgacgcccacaagaagaaccuguacgaccacgcccugaugagcaucaucagcaccuuccaccugagcauccccaacuucaaccaguacgaggccaugagcugcgacuucaacggcggcaagaucagcgugcaguacaaccugagccacgccuacgccguggacgccgccaaccacugcggcaccaucgccaacggcgugcugcagaccuucaugagaauggccuggggcggcagcuacaucgcccuggacagcggcaagggcagcugggacugcaucaugaccagcuaccaguaccugaucauccagaacaccaccugggaggaccacugccaguucagcagacccagccccaucggcuaccugggccugcugagccagagaaccagagacaucuacaucagcagaagacugcugggcaccuucaccuggacccugagcgacagcgagggcaacgagacccccggcggcuacugccugaccagauggaugcugaucgaggccgagcugaagugcuucggcaacaccgccguggccaagugcaacgagaagcacgacgaggaguucugcgacaugcugagacuguucgacuucaacaagcaggccaucagaagacugaagaccgaggcccagaugagcauccagcugaucaacaaggccgugaacgcccugaucaacgaccagcugaucaugaagaaccaccugagagacaucaugggcauccccuacugcaacuacagcaaguacugguaccugaaccacaccgugaccggcaagaccagccugcccagaugcuggcuggugagcaacggcagcuaccugaacgagacccacuucagcgacgacaucgagcagcaggccgacaacaugaucaccgagcugcugcagaaggaguacauggacagacagggcaagaccccccugggccugguggaccuguucguguucagcaccagcuucuaccugaucagcaucuuccugcaccugaucaagauccccacccacagacacaucaccggcaagcccugccccaagccccacagacugaaccacaugggcaucugcagcugcggccuguacaagcaccccggcgugcccgugaaguggaagagaugaggacuaguuauaagacugacuagcccgaugggccucccaacgggcccuccuccccuccuugcaccgagauuaaucaaaggcucuuuucagagccaccaaaaaaaaaaaaaaaaaaaaaaaaaaaaaaaaaaaaaaaaaaaaaaaaaaaaaaaaaaaaaaaaagaauu

SEQ ID NO: 14961 - RNA, 1655 nt, Artificial Sequence
  mRNA product Design i-3 (hSL-A64-N5) comprising derived and/or modified sequence from LASV(ISTH2010-NIG-2012;Clade II)__AIT17482__GPC (opt4)
aggagaaagcuuaccaugggccagaucaucaccuucuuccaggaggugccccacgugaucgaggaggugaugaacaucgugcugaucgcccugagccugcuggccauccugaagggcaucuacaacguggccaccugcggccuguucggccuggugagcuuccugcugcugugcggcagaagcugcagcaccaccuacaagggcguguacgagcugcagacccuggagcuggacauggccagccugaacaugaccaugccccugagcugcaccaagaacaacagccaccacuacaucauggugggcaacgagaccggccuggagcugacccugaccaacaccagcaucaucaaccacaaguucugcaaccugagcgacgcccacaagaagaaccuguacgaccacgcccugaugagcaucaucagcaccuuccaccugagcauccccaacuucaaccaguacgaggccaugagcugcgacuucaacggcggcaagaucagcgugcaguacaaccugagccacgccuacgccguggacgccgccaaccacugcggcaccaucgccaacggcgugcugcagaccuucaugagaauggccuggggcggcagcuacaucgcccuggacagcggcaagggcagcugggacugcaucaugaccagcuaccaguaccugaucauccagaacaucaccugggaggaccacugccaguucagcagacccagccccaucggcuaccugggccugcugagccagagaaccagagacaucuacaucagcagaagacugcugggcaccuucaccuggacccugagcgacagcgagggcaacgagacccccggcggcuacugccugaccagauggaugcugaucgaggccgagcugaagugcuucggcaacaccgccguggccaagugcaacgagaagcacgacgaggaguucugcgacaugcugagacuguucgacuucaacaagcaggccaucagaagacugaagaccgaggcccagaugagcauccagcugaucaacaaggccgugaacgcccugaucaacgaccagcugaucaugaagaaccaccugagagacaucaugggcauccccuacugcaacuacagcaaguacugguaccugaaccacaccgugaccggcaagaccagccugcccagaugcuggcuggugagcaacggcagcuaccugaacgagacccacuucagcgacgacaucgagcagcaggccgacaacaugaucaccgagcugcugcagaaggaguacaucgacagacagggcaagaccccccugggccugguggaccuguucguguucagcaccagcuucuaccugaucagcaucuuccugcaccuggugaagauccccacccacagacacguggugggcaagcccugccccaagccccacagacugaaccacaugggcaucugcagcugcggccuguacaagcaccccggcgugcccgugaaguggaagagaugaggacuaguuauaagacugacuagcccgaugggccucccaacgggcccuccuccccuccuugcaccgagauuaaucaaaggcucuuuucagagccaccaaaaaaaaaaaaaaaaaaaaaaaaaaaaaaaaaaaaaaaaaaaaaaaaaaaaaaaaaaaaaaaaagaauu

SEQ ID NO: 14962 - RNA, 1655 nt, Artificial Sequence
  mRNA product Design i-3 (hSL-A64-N5) comprising derived and/or modified sequence from LASV(Lassa virus/H.sapiens-wt/NGA/2015/ISTH_0543;Clade II)__AVO03639__GPC (opt4)
aggagaaagcuuaccaugggccagaucaucaccuucuuccaggaggugccccacgugaucgaggaggugaugaacaucgugcugaucgcccugagccugcuggccauccugaagggcaucuacaacguggccaccugcggccuguucggccuggugagcuuccugcugcugugcggcagaagcugcagcaccaccuacaagggcguguacgagcugcagacccuggagcuggacauggccaaccugaacaugaccaugccccugagcugcaccaagaacaacagccaccacuacaucauggugggcaacgagaccggccuggagcugacccugaccaacaccagcaucaucaaccacaaguucugcaaccugagcgacgcccacaagaagaaccuguacgaccacgcccugaugagcaucaucagcaccuuccaccugagcauccccaacuucaaccaguacgaggccaugagcugcgacuucaacggcggcaagaucagcgugcaguacaaccugagccacaccuacgccguggacgccgccaaccacugcggcaccaucgccaacggcgugcugcagaccuucaugagaauggccuggggcggcagcuacaucgcccuggacagcggcaagggcagcugggacugcaucaugaccagcuaccaguaccuggugauccagaacaccaccugggaggaccacugccaguucagcagacccagccccaucggcuaccugggccugcugagccagagaaccagagacaucuacaucagcagaagacugcugggcaccuucaccuggacccugagcgacagcgagggcaacgagacccccggcggcuacugccugaccagauggaugcugaucgaggccgagcugaagugcuucggcaacaccgccguggccaagugcaacgagaagcacgacgaggaguucugcgacaugcugagacuguucgacuucaacaagcaggccaucagaagacugaagaccgaggcccagaugagcauccagcugaucaacaaggccgugaacgcccugaucaacgaccagcugaucaugaagaaccaccugagagacaucaugggcauccccuacugcaacuacagcaaguacugguaccugaaccacaccgugaccggcaagaccagccugcccagaugcuggcuggugagcaacggcagcuaccugaacgagacccacuucagcgacgacaucgagcagcaggccgacaacaugaucaccgagcugcugcagaaggaguacaucgacagacagggcaagaccccccugggccugguggaccuguucguguucagcaccagcuucuaccugaucagcaucuuccugcaccuggugaagauccccacccacagacacaucaccggcaagcccugccccaagccccacagacugaaccacaugggcaucugcagcugcggccuguacaagcaccccggcgugcccgugaaguggaagagaugaggacuaguuauaagacugacuagcccgaugggccucccaacgggcccuccuccccuccuugcaccgagauuaaucaaaggcucuuuucagagccaccaaaaaaaaaaaaaaaaaaaaaaaaaaaaaaaaaaaaaaaaaaaaaaaaaaaaaaaaaaaaaaaaagaauu

SEQ ID NO: 14963 - RNA, 1655 nt, Artificial Sequence
  mRNA product Design i-3 (hSL-A64-N5) comprising derived and/or modified sequence from LASV(Lassa virus/H.sapiens-wt/NGA/2016/ISTH_0009;Clade II)__AVO03571__GPC (opt4)
aggagaaagcuuaccaugggccagaucaucaccuucuuccaggaggugccccacgugaucgaggaggugaugaacaucgugcugaucgcccugagccugcuggccauccugaagggcaucuacaacguggccaccugcggccugcugggccuggugagcuuccugcugcugugcggcagaagcugcagcaccaccuacaagggcguguacgagcugcagacccuggagcuggacauggccagccugaacaugaccaugccccugagcugcaccaagaacaacagccaccacuacaucauggugggcaacgagaccggccuggagcugacccugaccaacaccagcaucaucaaccacaaguucugcaaccugagcgacgcccacaagaagaaccuguacgaccacgcccugaugagcaucaucagcaccuuccaccugagcauccccaacuucaaccaguacgaggccaugagcugcgacuucaacggcggcagaaucagcgugcaguacaaccugagccacagcuacgccguggacgccgccaaccacugcggcaccaucgccaacggcgugcugcagaccuucaugagaauggccuggggcggcagcuacaucgcccuggacagcggcaagggcagcugggacugcaucaugaccagcuaccaguaccugaucauccagaacaccaccugggaggaccacugccaguucagcagacccagccccaucggcuaccugggccugcugagccagagaaccagagacaucuacaucagcagaagacugcugggcaccuucaccuggacccugagcgacagcgagggcaacgagacccccggcggcuacugccugaccagauggaugcugaucgaggccgagcugaagugcuucggcaacaccgccguggccaagugcaacgagaagcacgacgaggaguucugcgacaugcugagacuguucgacuucaacaagcaggccaucagaagacugaagaccgaggcccagaugagcauccagcugaucaacaaggccgugaacgcccugaucaacgaccagcugaucaugaagaaccaccugagagacaucaugggcauccccuacugcaacuacagcaaguacugguaccugaaccacaccgugaccggcaagaccagccugcccagaugcuggcuggugagcaacggcagcuaccugaacgagacccacuucagcgacgacaucgagcagcaggccgacaacaugaucaccgagcugcugcagaaggaguacaucgacagacagggcaagaccccccugggccugguggaccuguucguguucagcaccagcuucuaccugaucagcaucuuccugcaccuggugaagauccccacccacagacacaucaccggcaagcccugccccaagccccacagacugaaccacaugggcaucugcagcugcggccuguacaaccaccccggcgugcccgugaaguggaagagaugaggacuaguuauaagacugacuagcccgaugggccucccaacgggcccuccuccccuccuugcaccgagauuaaucaaaggcucuuuucagagccaccaaaaaaaaaaaaaaaaaaaaaaaaaaaaaaaaaaaaaaaaaaaaaaaaaaaaaaaaaaaaaaaaagaauu

SEQ ID NO: 14964 - RNA, 1655 nt, Artificial Sequence
  mRNA product Design i-3 (hSL-A64-N5) comprising derived and/or modified sequence from LASV(Lassa virus/H.sapiens-wt/NGA/2016/ISTH_0017;Clade II)__AVO03567__GPC (opt4)
aggagaaagcuuaccaugggccagaucaucaccuucuuccaggaggugccccacgugaucgaggaggugaugaacaucgugcugaucgcccugagccugcuggccauccugaagggcaucuacaacguggccaccugcggccuguucggccuggugagcuuccugcugcugugcggcagaagcugcagcaccaccuacaagggcguguacgagcugcagacccuggagcuggacauggccagccugaacaugaccaugccccugagcugcaccaagaacaacagccaccacuacaucauggugggcaacgagaccggccuggagcugacccugaccaacaccagcaucaucaaccacaaguucugcaaccugagcgacgcccacaagaagaaccuguacgaccacgcccugaugagcaucaucagcaccuuccaccugagcauccccaacuucaaccaguacgaggccaugagcugcgacuucaacggcggcaagaucagcgugcaguacaaccugagccacaccuacgccaucgacgccgccaaccacugcggcaccaucgccaacggcgugcugcagaccuucaugagaauggccuggggcggcagcuacaucgcccuggacagcggcaagggcagcugggacugcaucaugaccagcuaccaguaccugaucauccagaacaccaccugggaggaccacugccaguucagcagacccagccccaucggcuaccugggccugcugagccagagaaccagagacaucuacaucagcagaagacugcugggcaccuucaccuggacccugagcgacagcgagggcaacgagacccccggcggcuacugccugaccagauggaugcugaucgaggccgagcugaagugcuucggcaacaccgccguggccaagugcaacgagaagcacgacgaggaguucugcgacaugcugagacuguucgacuucaacaagcaggccaucagaagacugaagaccgaggcccagaugagcauccagcugaucaacaaggccgugaacgcccugaucaacgaccagcugaucaugaagaaccaccugagagacaucaugggcauccccuacugcaacuacagcaaguacugguaccugaaccacaccgugaccggcaagaccagccugcccagaugcuggcuggugagcaacggcagcuaccugaacgagacccacuucagcgacgacaucgagcagcaggccgacaacaugaucaccgagcugcugcagaaggaguacauggacagacagggcaagaccccccugggccugguggaccuguucguguucagcaccagcuucuaccugaucagcaucuuccugcaccuggugagaauccccacccacagacacgugaucggcaagcccugccccaagccccacagacugaaccacaugggcaucugcagcugcggccuguacaagcaccccggcgugcccgugaaguggaagagaugaggacuaguuauaagacugacuagcccgaugggccucccaacgggcccuccuccccuccuugcaccgagauuaaucaaaggcucuuuucagagccaccaaaaaaaaaaaaaaaaaaaaaaaaaaaaaaaaaaaaaaaaaaaaaaaaaaaaaaaaaaaaaaaaagaauu

SEQ ID NO: 14965 - RNA, 1655 nt, Artificial Sequence
  mRNA product Design i-3 (hSL-A64-N5) comprising derived and/or modified sequence from LASV(Lassa virus/H.sapiens-wt/NGA/2018/ISTH_0959;Clade II)__AVV65099__GPC (opt4)
aggagaaagcuuaccaugggccagaucaucaccuucuuccaggaggugccccacgugaucgaggaggugaugaacaucgugcugaucgcccugagccugcuggccauccugaagggcaucuacaacguggugaccugcggccuguucggccuggugagcuuccugcugcugugcggcagaagcugcagcaccaccuacaagggcguguacgagcugcagacccuggagcuggacauggccagccugaacaugaccaugccccugagcugcaccaagaacaacagccaccacuacaucauggugggcaacgagaccggccuggagcugacccugaccaacaccagcaucaucaaccacaaguucugcaaccugagcgacgcccacaagaagaaccuguacgaccacgcccugaugagcaucaucagcaccuuccaccugagcauccccaacuucaaccaguacgaggccaugagcugcgacuucaacggcggcaagaucagcgugcaguacaaccugagccacgccuacgccaucgacgccgccaaccacugcggcaccaucgccaacggcgugcugcagaccuucaugagaauggccuggggcggcagcuacaucgcccuggacagcggcaagggcagcugggacugcaucaugaccagcuaccaguaccugaucauccagaacaccaccugggaggaccacugccaguucagcagacccagccccaucggcuaccugggccugcugagccagagaaccagagacaucuacaucagcagaagacugcugggcaccuucaccuggacccugagcgacagcgagggcaacgagacccccggcggcuacugccugaccagauggaugcugaucgaggccgagcugaagugcuucggcaacaccgccguggccaagugcaacgagaagcacgacgaggaguucugcgacaugcugagacuguucgacuucaacaagcaggccaucagaagacugaagaccgaggcccagaugagcauccagcugaucaacaaggccgugaacgcccugaucaacgaccagcugaucaugaagaaccaccugagagacaucaugggcauccccuacugcaacuacagcaaguacugguaccugaaccacaccgugaccggcaagaccagccugcccagaugcuggcuggugagcaacggcagcuaccugaacgagacccacuucagcgacgacaucgagcagcaggccgacaacaugaucaccgagcugcugcagaaggaguacaucgacagacagggcaagaccccccugggccugguggaccuguucguguucagcaccagcuucuaccugaucagcaucuuccugcaccuggugaagauccccacccacagacacgugaucggcaagcccugccccaagccccacagacugaaccacaugggcaucugcagcugcggccuguacaagcaccccggcgugcccgugaaguggaagagaugaggacuaguuauaagacugacuagcccgaugggccucccaacgggcccuccuccccuccuugcaccgagauuaaucaaaggcucuuuucagagccaccaaaaaaaaaaaaaaaaaaaaaaaaaaaaaaaaaaaaaaaaaaaaaaaaaaaaaaaaaaaaaaaaagaauu

SEQ ID NO: 14966 - RNA, 1655 nt, Artificial Sequence
  mRNA product Design i-3 (hSL-A64-N5) comprising derived and/or modified sequence from LASV(LASV003-NIG-2008;Clade II)__AIT17580__GPC (opt4)
aggagaaagcuuaccaugggccagaucaucaccuucuuccaggaggugccccacgugaucgaggaggugaugaacaucgugcugaucgcccugagccugcuggccauccugaagggcaucuacaacguggccaccugcggccuguucggccuggugagcuuccugcugcugugcggcagaagcugcagcaccaccuacaagggcguguacgagcugcagacccuggagcuggacauggccagccugaacaugaccaugccccugagcugcaccaagaacaacagccaccacuacaucauggugggcaacgagaccggccuggagcugacccugaccaacaccagcaucaucaaccacaaguucugcaaccugagcgacgcccacaagaagaaccuguacgaccacgcccugaugagcaucaucagcaccuuccaccugagcauccccaacuucaaccaguacgaggccaugagcugcgacuucaacggcggcaagaucagcgugcaguacaaccugagccacaccuacgccguggacgccgccaaccacugcggcaccaucgccaacggcgugcugcagaccuucaugagaauggccuggggcggcagcuacaucgcccuggacagcggcaagggcagcugggacugcaucaugaccagcuaccaguaccugaucauccagaacaccaccugggaggaccacugccaguucagcagacccagccccaucggcuaccugggccugcugagccagagaaccagagacaucuacaucagcagaagacugcugggcaccuucaccuggacccugagcgacagcgagagcaacgagacccccggcggcuacugccugaccagauggaugcugaucgaggccgagcugaagugcuucggcaacaccgccguggccaagugcaacgagaagcacgacgaggaguucugcgacaugcugagacuguucgacuucaacaagcaggccaucagaagacugaaggccgaggcccagaugagcauccagcugaucaacaaggccgugaacgcccugaucaacgaccagcugaucaugaagaaccaccugagagacaucaugggcauccccuacugcaacuacagcaaguacugguaccugaaccacaccgugaccggcagaaccagccugcccagaugcuggcuggugagcaacggcagcuaccugaacgagacccacuucagcgacgacaucgagcagcaggccgacaacaugaucaccgagcugcugcagaaggaguacauggacagacagggcaagaccccccugggccugguggaccuguucguguucagcaccagcuucuaccugaucagcaucuuccugcaccuggugaagauccccacccacagacacgugaucggcaagcccugccccaagccccacagacugaaccacaugggcaucugcagcugcggccuguacaagcaccccggcgugcccgugaaguggaagagaugaggacuaguuauaagacugacuagcccgaugggccucccaacgggcccuccuccccuccuugcaccgagauuaaucaaaggcucuuuucagagccaccaaaaaaaaaaaaaaaaaaaaaaaaaaaaaaaaaaaaaaaaaaaaaaaaaaaaaaaaaaaaaaaaagaauu

SEQ ID NO: 14967 - RNA, 1655 nt, Artificial Sequence
  mRNA product Design i-3 (hSL-A64-N5) comprising derived and/or modified sequence from LASV(LASV035-NIG-2009;Clade II)__AIT17588__GPC (opt4)
aggagaaagcuuaccaugggccagaucaucaccuucuuccaggaggugccccacgugaucgaggaggugaugaacaucgugcugaucgcccugagccugcuggccauccugaagggcaucuacaacguggccaccugcggccuguucggccuggugagcuuccugcugcugugcggcagaagcugcagcaccaccuacaagggcguguacgagcugcagacccuggagcuggacauggccagccugaacaugaccaugccccugagcugcaccaagaacaacagccaccacuacaucauggugggcaacgagaccggccuggagcugacccugaccaacaccagcaucaucaaccacaaguucugcaaccugagcgacgcccacaagaagaaccuguacgaccacgcccugaugagcaucaucagcaccuuccaccugagcauccccaacuucaaccaguacgaggccaugagcugcgacuucaacggcggcaagaucagcgugcaguacaaccugagccacgccuacgccguggacgccgccaaccacugcggcaccaucgccaacggcgugcugcagaccuucaugagaauggccuggggcggcagcuacaucgcccuggacagcggcaagggcagcugggacugcaucaugaccagcuaccaguaccugaucauccagaacaccaccugggaggaccacugccaguucagcagacccagccccaucggcuaccugggccugcugagccagagaaccagagacaucuacaucagcagaagacugcugggcaccuucaccuggacccugagcgacagcgagggcaacgagacccccggcggcuacugccugaccagauggaugcugaucgaggccgagcugaagugcuucggcaacaccgccguggccaagugcaacgagaagcacgacgaggaguucugcgacaugcugagacuguucgacuucaacaagcaggccaucagaagacugaaggccgaggcccagaugagcauccagcugaucaacaaggccgugaacgcccugaucaacgaccagcugaucaugaagaaccaccugagagacaucaugggcauccccuacugcaacuacagcaaguacugguaccugaaccacaccgugaccggcaagaccagccugcccagaugcuggcuggugagcaacggcagcuaccugaacgagacccacuucagcgacgacaucgagcagcaggccgacaacaugaucaccgagcugcugcagaaggaguacaucgacagacagggcaagaccccccugggccugguggaccuguucguguucagcaccagcuucuaccugaucagcaucuuccugcaccuggugaagauccccacccacagacacgugaucggcaagcccugccccaagccccacagacugaaccacaugggcaucugcagcugcggccuguacaagcaccccggcgugcccgugaaguggaagagaugaggacuaguuauaagacugacuagcccgaugggccucccaacgggcccuccuccccuccuugcaccgagauuaaucaaaggcucuuuucagagccaccaaaaaaaaaaaaaaaaaaaaaaaaaaaaaaaaaaaaaaaaaaaaaaaaaaaaaaaaaaaaaaaaagaauu

SEQ ID NO: 14968 - RNA, 1655 nt, Artificial Sequence
  mRNA product Design i-3 (hSL-A64-N5) comprising derived and/or modified sequence from LASV(LASV1000-NIG-2009;Clade II)__AIT17782__GPC (opt4)
aggagaaagcuuaccaugggccagaucaucaccuucuuccaggaggugccccacgugaucgaggaggugaugaacaucgugcugaucgcccugagccugcuggccauccugaagggcaucuacaacguggccaccugcggccuguucggccuggugagcuuccugcugcugugcggcagaagcugcagcaccaccuacaagggcguguacgagcugcagacccuggagcuggacauggccagccugaacaugaccaugccccugagcugcaccaagaacaacagccaccacuacaucauggugggcaacgagaccggccuggagcugacccugaccaacaccagcaucaucaaccacaaguucugcaaccugagcgacgcccacaagaagaaccuguacgaccacgcccugaugagcaucaucagcaccuuccaccugagcauccccaacuucaaccaguacgaggccaugagcugcgacuucaacggcggcaagaucagcgugcaguacaaccugagccacaccuacgccguggacgccgccaaccacugcggcaccaucgccaacggcgugcugcagaccuucaugagaauggccuggggcggcagcuacaucgcccuggacagcggcaagggcagcugggacugcaucaugaccagcuaccaguaccugaucauccagaacaccaccugggaggaccacugccaguucagcagacccagccccaucggcuaccugggccugcugagccagagaaccagagacaucuacaucagcagaagacugcugggcaccuucaccuggacccugagcgacagcgagggcaacgagacccccggcggcuacugccugaccagauggaugcugaucgaggccgagcugaagugcuucggcaacaccgccguggccaagugcaacgagaagcacgacgaggaguucugcgacaugcugagacuguucgacuucaacaagcaggccaucaagagacugaagaccgaggcccagaugagcauccagcugaucaacaaggccgugaacgcccugaucaacgaccagcugaucaugaagaaccaccugagagacaucaugggcauccccuacugcaacuacagcaaguacugguaccugaaccacaccgugaccggcaagaccagccugcccagaugcuggcuggugagcaacggcagcuaccugaacgagacccacuucagcgacgacaucgagcagcaggccgacaacaugaucaccgagcugcugcagaaggaguacaucgacagacagggcaagaccccccugggccugguggaccuguucguguucagcaccagcuucuaccugaucagcaucuuccugcaccuggugaagauccccacccacagacacguggugggcaagcccugccccaagccccacagacugaaccacaugggcaucugcagcugcggccuguacaagcaccccggcgugcccgugaaguggaagagaugaggacuaguuauaagacugacuagcccgaugggccucccaacgggcccuccuccccuccuugcaccgagauuaaucaaaggcucuuuucagagccaccaaaaaaaaaaaaaaaaaaaaaaaaaaaaaaaaaaaaaaaaaaaaaaaaaaaaaaaaaaaaaaaaagaauu

SEQ ID NO: 14969 - RNA, 1655 nt, Artificial Sequence
  mRNA product Design i-3 (hSL-A64-N5) comprising derived and/or modified sequence from LASV(LASV221-NIG-2010;Clade II)__AIT17624__GPC (opt4)
aggagaaagcuuaccaugggccagaucaucaccuucuuccaggaggugccccacgugaucgaggaggugaugaacaucgugcugaucgcccugagccugcuggccauccugaagggcaucuacaacguggccaccugcggccuguucggccuggugagcuuccugcugcugugcggcagaagcugcagcaccaccuacaagggcguguacgagcugcagacccuggagcuggacauggccagccugaacaugaccaugccccugagcugcaccaagaacaacagccaccacuacaucauggugggcaacgagaccggccuggagcugacccugaccaacaccagcaucaucaaccacaaguucugcaaccugagcgacgcccacaagaagaaccuguacgaccacgcccugaugagcaucaucagcaccuuccaccugagcauccccaacuucaaccaguacgaggccaugagcugcgacuucaacggcggcaagaucagcgugcaguacaaccugagccacaccuacgccaucgacgccgccaaccacugcggcaccaucgccaacggcgugcugcagaccuucaugagaauggccuggggcggcagcuacaucgcccuggacagcggcaagggcagcugggacugcaucaugaccagcuaccaguaccugaucauccagaacaccaccugggaggaccacugccaguucagcagacccagccccaucggcuaccugggccugcugagccagagaaccagagacaucuacaucagcagaagacugcugggcaccuucaccuggacccugagcgacagcgagggcaacgagacccccggcggcuacugccugaccagauggaugcugaucgaggccgagcugaagugcuucggcaacaccgccguggccaagugcaacgagaagcacgacgaggaguucugcgacaugcugagacuguucgacuucaacaagcaggccaucagaagacugaagaccgaggcccagaugagcauccagcugaucaacaaggccgugaacgcccugaucaacgaccagcugaucaugaagaaccaccugagagacaucaugggcauccccuacugcaacuacagcaaguacugguaccugaaccacaccgugaccggcaagaccagccugcccagaugcuggcuggugagcaacggcagcuaccugaacgagacccacuucagcgacgacaucgagcagcaggccgacaacaugaucaccgagaugcugcagaaggaguacauggacagacagggcaagaccccccugggccugguggaccuguucguguucagcaccagcuucuaccugaucagcaucuuccugcaccuggugaagauccccacccacagacacgugaucggcaagcccugccccaagccccacagacugaaccacaugggcaucugcagcugcggccuguacaagcaccccggcgugcccgugaaguggaagagaugaggacuaguuauaagacugacuagcccgaugggccucccaacgggcccuccuccccuccuugcaccgagauuaaucaaaggcucuuuucagagccaccaaaaaaaaaaaaaaaaaaaaaaaaaaaaaaaaaaaaaaaaaaaaaaaaaaaaaaaaaaaaaaaaagaauu

SEQ ID NO: 14970 - RNA, 1655 nt, Artificial Sequence
  mRNA product Design i-3 (hSL-A64-N5) comprising derived and/or modified sequence from LASV(LASV237-NIG-2010;Clade II)__AIT17638__GPC (opt4)
aggagaaagcuuaccaugggccagaucaucaccuucuuccaggaggugccccacgugaucgaggaggugaugaacaucgugcugaucgcccugagccugcuggccauccugaagggcaucuacaacguggccaccugcggccuguucggccuggugagcuuccugcugcugugcggcagaagcugcagcaccaccuacaagggcguguacgagcugcagacccuggagcuggacauggccagccugaacaugaccaugccccugagcugcaccaagaacaacagccaccacuacaucauggugggcaacgagaccggccuggagcugacccugaccaacaccagcaucaucaaccacaaguucugcaaccugagcgacgcccacaagaaggaccuguacgaccacgcccugaugagcaucaucagcaccuuccaccugagcauccccaacuucaaccaguacgaggccaugagcugcgacuucaacggcggcaagaucagcgugcaguacaaccugagccacaccuacgccguggacgccgccaaccacugcggcaccaucgccaacggcgugcugcagaccuucaugagaauggccuggggcggcagcuacaucgcccuggacagcggcaagggcagcugggacugcaucaugaccagcuaccaguaccugaucauccagaacaccaccugggaggaccacugccaguucagcagacccagccccaucggcuaccugggccugcugagccagagaaccagagacaucuacaucagcagaagacugcugggcaccuucaccuggacccugagcgacagcgagggcaacgagacccccggcggcuacugccugaccagauggaugcugaucgaggccgagcugaagugcuucggcaacaccgccguggccaagugcaacgagaagcacgacgaggaguucugcgacaugcugagacuguucgacuucaacaagcaggccaucagaagacugaagaccgaggcccagaugagcauccagcugaucaacaaggccgugaacgcccugaucaacgaccagcugaucaugaagaaccaccugagagacaucaugggcauccccuacugcaacuacagcaaguacugguaccugaaccacaccgugaccggcaagaccagccugcccagaugcuggcuggugagcaacggcagcuaccugaacgagacccacuucagcgacgacaucgagcagcaggccgacaacaugaucaccgagcugcugcagaaggaguacauggacagacagggcaagaccccccugggccugguggaccuguucguguucagcaccagcuucuaccugaucagcaucuuccugcaccugaucaagauccccacccacagacacaucaccggcaagcccugccccaagccccacagacugaaccacaugggcaucugcagcugcggccuguacaagcaccccggcgugcccgugaaguggaagagaugaggacuaguuauaagacugacuagcccgaugggccucccaacgggcccuccuccccuccuugcaccgagauuaaucaaaggcucuuuucagagccaccaaaaaaaaaaaaaaaaaaaaaaaaaaaaaaaaaaaaaaaaaaaaaaaaaaaaaaaaaaaaaaaaagaauu

SEQ ID NO: 14971 - RNA, 1655 nt, Artificial Sequence
  mRNA product Design i-3 (hSL-A64-N5) comprising derived and/or modified sequence from LASV(LASV253-NIG-2011;Clade II)__AIT17670__GPC (opt4)
aggagaaagcuuaccaugggccagaucaucaccuucuuccaggaggugccccacgugaucgaggaggugaugaacaucgugcugaucgcccugagccugcuggccauccugaagggcaucuacaacguggccaccugcggccuguucggccuggugagcuuccugcugcugugcggcagaagcugcagcaccaccuacaagggcguguacgagcugcagacccuggagcuggacauggccagccugaacaugaccaugccccugagcugcaccaagaacaacagccaccacuacaucauggugggcaacgagaccggccuggagcugacccugaccaacaccagcaucaucaaccacaaguucugcaaccugagcgacgcccacaagaagaaccuguacgaccacgcccugaugagcaucaucagcaccuuccaccugagcauccccaacuucaaccaguacgaggccaugagcugcgacuucaacggcggcaagaucagcgugcaguacaaccugagccacaccuacgccguggacgccgccaaccacugcggcaccaucgccaacggcgugcugcagaccuucaugagaauggccuggggcggcagcuacaucgcccuggacagcggcaagggcagcugggacugcaucaugaccagcuaccaguaccugaucauccagaacaccaccugggaggaccacugccaguucagcagacccagccccaucggcuaccugggccugcugagccagagaaccagagacaucuacaucagcagaagacugcugggcaccuucaccuggacccugagcgacagcgagggcaacgagacccccggcggcuacugccugaccagauggaugcugaucgaggccgagcugaagugcuucggcaacaccgccguggccaagugcaacgagaagcacgacgaggaguucugcgacaugcugagacuguucgacuucaacaagcaggccaucagaagacugaaggccgaggcccagaugagcauccagcugaucaacaaggccgugaacgcccugaucaacgaccagcugaucaugaagaaccaccugagagacaucaugggcauccccuacugcaacuacagcaaguacugguaccugaaccacaccgugaccggcagaaccagccugcccagaugcuggcuggugagcaacggcagcuaccugaacgagacccacuucagcgacgacaucgagcagcaggccgacaacaugaucaccgagcugcugcagaaggaguacaucgacagacagggcaagaccccccugggccugguggaccuguucguguucagcaccagcuucuaccugaucagcaucuuccugcaccuggugaagauccccacccacagacacaucaucggcaagcccugccccaagccccacagacugaaccacaugggcaucugcagcugcggccuguacaagcaccccggcgugcccgugaaguggaagagaugaggacuaguuauaagacugacuagcccgaugggccucccaacgggcccuccuccccuccuugcaccgagauuaaucaaaggcucuuuucagagccaccaaaaaaaaaaaaaaaaaaaaaaaaaaaaaaaaaaaaaaaaaaaaaaaaaaaaaaaaaaaaaaaaagaauu

SEQ ID NO: 14972 - RNA, 1655 nt, Artificial Sequence
  mRNA product Design i-3 (hSL-A64-N5) comprising derived and/or modified sequence from LASV(LASV254-NIG-2011;Clade II)__AIT17674__GPC (opt4)
aggagaaagcuuaccaugggccagaucaucaccuucuuccaggaggugccccacgugaucgaggaggugaugaacaucgugcugaucgcccugagccugcuggccauccugaagggcaucuacaacguggccaccugcggccuguucggccuggugagcuuccugcugcugugcggcagaagcugcagcaccaccuacaagggcguguacgagcugcagacccuggagcuggacaugaccaaccugaacaugaccaugccccugagcugcaccaagaacaacagccaccacuacaucauggugggcaacgagaccggccuggagcugacccugaccaacaccagcaucaucaaccacaaguucugcaaccugagcgacgcccacaagaagaaccuguacaaccacgcccugaugagcaucaucagcaccuuccaccugagcauccccaacuucaaccaguacgaggccaugagcugcgacuucaacggcggcaagaucagcgugcaguacaaccugagccacagcuacgccguggacgccgccaaccacugcggcaccaucgccaacggcgugcugcagaccuucaugagaauggccuggggcggcagcuacaucgcccuggacagcggcaagggcaacugggacugcaucaugaccagcuaccaguaccugaucauccagaacaccaccugggaggaccacugccaguucagcagacccagccccaucggcuaccugggccugcugagccagagaaccagagacaucuacaucagcagaagacugcugggcaccuucaccuggacccugagcgacagcgagggcaacgagacccccggcggcuacugccugaccagauggaugcugaucgaggccgagcugaagugcuucggcaacaccgccguggccaagugcaacgagaagcacgacgaggaguucugcgacaugcugagacuguucgacuucaacaagcaggccaucagaagacugaagaccgaggcccaggccaacauccagcugaucaacaaggccgugaacgcccugaucaacgaccagcugaucaugaagaaccaccugagagacaucaugggcauccccuacugcaacuacagcaaguacugguaccugaaccacaccgugaccggcaagaccagccugcccagaugcuggcuggugagcaacggcagcuaccugaacgagacccacuucagcgacgacaucgagcagcaggccgacaacaugaucaccgagcugcugcagaaggaguacauggacagacagggcaagaccccccugggccugguggaccuguucguguucagcaccagcuucuaccugaucagcaucuuccugcaccuggugaagauccccacccacagacacgugaucggcaagcccugccccaagccccacagacugaaccacaugggcaucugcagcugcggccuguacaagcaccccggcgugcccgugaaguggaagagaugaggacuaguuauaagacugacuagcccgaugggccucccaacgggcccuccuccccuccuugcaccgagauuaaucaaaggcucuuuucagagccaccaaaaaaaaaaaaaaaaaaaaaaaaaaaaaaaaaaaaaaaaaaaaaaaaaaaaaaaaaaaaaaaaagaauu

SEQ ID NO: 14973 - RNA, 1655 nt, Artificial Sequence
  mRNA product Design i-3 (hSL-A64-N5) comprising derived and/or modified sequence from LASV(Nig08-A19;Clade III)__ADU56618__GPC (opt4)
aggagaaagcuuaccaugggccagaucgugaccuucuuccaggaggugccccacgugaucgaggaggugaugaacaucgugcugaucgcccugagcauccuggccauccugaagggccuguacaacaucgccaccugcggccugaucggccuggugaccuuccugcugcugagcggcagaagcugcagcaugaccuacaagggcguguacgagcugcagacccuggagcugaacaugaacacccugaacaugaccaugccccugagcugcaccaagaacaacagccaccacuacaucauggugggcaacgagaccggccuggagcugacccugaccaacaccagccugcugcaccacaaguucugcaaccugagcgacgcccacaagaagaaccuguacgaccacacccugaugagcaucaucagcaccuuccaccugagcauccccaacuucaaccaguacgaggccaugagcugcgacuucaacggcggcaagaucaccgugcaguacaaccugagccacagcuacgccaucgacgccgccaaccacugcggcaccguggccaacggcgugcugcagaccuucaugagaauggccuggggcggcagcuacaucgcccuggacagcggcagaggcaagugggacugcaucaugaccagcuaccaguaccugaucauccagaacaccaccugggaggaccacugccaguucagcagacccagccccaucggcuaccugggccugcugagccagagaaccagagacaucuacaucagcagaagacugcugggcaccuucaccuggacccugagcgacagcgagggcaacgagacccccggcggcuacugccugaccagauggaugcugaucgaggccgagcugaagugcuucggcaacaccgccguggccaagugcaacgagaagcacgacgaggaguucugcgacaugcugagacuguucgacuucaacaagcaggccaucagaagacugaaggccgaggcccagaugagcauccagcugaucaacaaggccgugaacgcccugaucaacgaccagcugaucaugaagaaccaccugagagacaucaugggcauccccuacugcaacuacagcaaguacugguaccugaaccacaccagcaccggcagaaccagccugcccagaugcuggcuggugagcaacggcagcuaccugaacgagacccacuucagcgacgacaucgagcagcaggccgacaacaugaucaccgagaugcugcagaaggaguaccuggacagacagggcaagaccccccugggccugguggaccuguucguguucagcaccagcuucuaccugaucagcaucuuccugcaccuggugaagauccccacccacagacacaucgugggcaagcccugccccaagccccacagacugaaccacaugggcaucugcagcugcggccuguacaagcagcccggcgugcccgugagauggaagagaugaggacuaguuauaagacugacuagcccgaugggccucccaacgggcccuccuccccuccuugcaccgagauuaaucaaaggcucuuuucagagccaccaaaaaaaaaaaaaaaaaaaaaaaaaaaaaaaaaaaaaaaaaaaaaaaaaaaaaaaaaaaaaaaaagaauu

SEQ ID NO: 14974 - RNA, 1658 nt, Artificial Sequence
  mRNA product Design i-3 (hSL-A64-N5) comprising derived and/or modified sequence from LASV(G1180-SLE-2010;Clade IV)__AIT17168__GPC (opt4)
aggagaaagcuuaccaugggccagaucgugaccuucuuccaggaggugccccacgugaucgaggaggugaugaacaucgugcugaucgcccugagcauccuggccgugcugaagggccuguacaacuucgccaccugcggccuggugggccugcugaccuuccugcugcugugcggcagaagcugcaccgccagcagauacaagggcguguacgagcugcagacccuggagcugaacauggagacccugaacaugaccaugccccugagcugcaccaagaacaacagccaccacuacaucauggugggcaacgagaccggccuggagcugacccugaccaacaccagcaucaucaaccacaaguucugcaaccugagcgacgcccacaagaagaaccuguacgaccacgcccugaugagcaucaucagcaccuuccaccugagcauccccaacuucaaccaguacgaggccaugagcugcgacuucaacggcggcaagaucagcgugcaguacaaccugagccacagcuacgccggcgacgccgccaaccacugcggcaccguggccaacggcgugcugcagaccuucaugagaauggccuggggcggcagcuacaucgcccuggacagcggccacggcagcugggacugcaucaugaccagcuaccaguaccugaucauccagaacaccaccugggaggaccacugccaguucagcagacccagccccaucggcuaccugggccugcugagccagagaaccagagacaucuacaucagcagaagacugcugggcaccuucaccuggacccugagcgacagcgagggcaaggacacccccggcggcuacugccugaccagauggaugcugaucgaggccgagcugaagugcuucggcaacaccgccguggccaagugcaacgagaagcacgacgaggaguucugcgacaugcugagacuguucgacuucaacaagcaggccauccagagacugaaggccgaggcccagaugagcauccagcugaucaacaaggccgugaacgcccugaucaacgaccagcugaucaugaagaaccaccugagagacaucaugggcauccccuacugcaacuacagcaaguacugguaccugaaccacaccaccaccggcaagaccagccugcccaagugcuggcuggugagcaacggcagcuaccugaacgagacccacuucagcgacgacaucgagcagcaggccgacaacaugaucaccgagaugcugcagaaggaguacauggagagacagggcaagaccccccugggccugguggaccuguucguguucagcaccagcuucuaccugaucagcaucuuccugcaccuggugaagauccccacccacagacacaucgugggcaagagcugccccaagccccacagacugaaccacaugggcaucugcagcugcggccuguacaagcagcccggcgugcccgugaaguggaagagaugaggacuaguuauaagacugacuagcccgaugggccucccaacgggcccuccuccccuccuugcaccgagauuaaucaaaggcucuuuucagagccaccaaaaaaaaaaaaaaaaaaaaaaaaaaaaaaaaaaaaaaaaaaaaaaaaaaaaaaaaaaaaaaaaagaauu

SEQ ID NO: 14975 - RNA, 1658 nt, Artificial Sequence
  mRNA product Design i-3 (hSL-A64-N5) comprising derived and/or modified sequence from LASV(G1442-SLE-2011;Clade IV)__AIT17180__GPC (opt4)
aggagaaagcuuaccaugggccagaucgugaccuucuuccaggaggugccccacgugaucgaggaggugaugaacaucgugcugaucgcccugagcauccuggccgugcugaagggccuguacaacguggccaccugcggccugaucggccuggugaccuuccugcugcugugcggcagaagcugcaccaccacccuguacaagggcguguacgagcugcagacccuggagcugaacauggagacccugaacaugaccaugccccugagcugcaccaagaacaacagccaccacuacaucagagugggcaacgagaccggccuggagcugacccugaccaacaccagcaucaucaaccacaaguucugcaaccugagcgacgcccacaagaagaaccuguacgaccacgcccugaugagcaucaucagcaccuuccaccugagcauccccaacuucaaccaguacgaggccaugagcugcgacuucaacggcggcaagaucagcgugcaguacaaccugagccacagcuacgccggcgacgccgccaaccacugcggcaccguggccaacggcgugcugcagaccuucaugagaauggccuggggcggcagcuacaucgcccuggacagcggcagaggcaacugggacugcaucaugaccagcuaccaguaccugaucauccagaacaccaccugggacgaccacugccaguucagcagacccagccccaucggcuaccugggccugcugagccagagaaccagagacguguacaucagcagaagacugcugggcaccuucaccuggacccugagcgacagcgagggcaaggacacccccggcggcuacugccugaccagauggaugcugaucgaggccgagcugaagugcuucggcaacaccgccguggccaagugcaacgagaagcacgacgaggaguucugcgacaugcugagacuguucgacuucaacaagcaggccauccagagacugaaggccgaggcccagaugagcauccagcugaucaacaaggccgugaacgcccugaucaacgaccagcugaucaugaagaaccaccugagagacaucaugggcauccccuacugcaacuacagcaaguacugguaccugaacaacaccgccaccggcaagaccagccugcccaagugcuggcugaucagcaacggcagcuaccugaacgagacccacuucagcgacgacaucgagcaggaggccgacaacaugaucaccgagaugcugcagaaggaguacauggagagacagggcaagaccccccugggccugguggaccuguucguguucagcaccagcuucuaccugaucagcaucuuccugcaccuggugaagauccccacccacagacacaucgugggcaagagcugccccaagccccacagacugaaccacaugggcaucugcagcugcggccuguacaagcagcccggcgugcccgugagauggaagagaugaggacuaguuauaagacugacuagcccgaugggccucccaacgggcccuccuccccuccuugcaccgagauuaaucaaaggcucuuuucagagccaccaaaaaaaaaaaaaaaaaaaaaaaaaaaaaaaaaaaaaaaaaaaaaaaaaaaaaaaaaaaaaaaaagaauu

SEQ ID NO: 14976 - RNA, 1658 nt, Artificial Sequence
  mRNA product Design i-3 (hSL-A64-N5) comprising derived and/or modified sequence from LASV(G3010-SLE-2013;Clade IV)__AIT17344__GPC (opt4)
aggagaaagcuuaccaugggccagaucgugaccuucuuccaggaggugccccacgugaucgaggaggugaugaacaucgugcugaucgcccugagcauccuggccgugcugaagggccuguacaacuucgccaccugcggccuggugggccuggugaccuuccugcugcugugcggcagaagcugcaccaccagccuguacaagggcguguacgagcugcagacccuggagcugaacauggagacccugaacaugaccaugccccugagcugcaccaagaacaacagccaccacuacaucauggugggcaacgagaccggccuggagcugacccugaccaacaccagcaucaucaaccacaaguucugcaaccugagcgacgcccacaagaagaaccuguacaaccacgcccugaugagcaucaucagcaccuuccaccugagcauccccaacuucaaccaguacgaggccaugagcugcgacuucaacggcggcaagaucagcgugcaguacaaccugagccacagcuacgccggcgacgccgccagccacugcggcaccguggccaacggcgugcugcagaccuucaugagaauggccuggggcggcagcuacaucgcccuggacagcggcuacggcaagugggacugcaucaugaccagcuaccaguaccugaucauccagaacaccaccugggaggaccacugccaguucagcagacccagccccaucggcuaccugggccugcugagccagagaaccagagacaucuacaucagcagaagacugcugggcaccuucaccuggacccugagcgacagcgagggcaaggacacccccggcggcuacugccugaccagauggaugcugaucgaggccgagcugaagugcuucggcaacaccgccguggccaagugcaacgagaagcacgacgaggaguucugcgacaugcugagacuguucgacuucaacaagcaggccauccagagacugaagaccgaggcccagaugagcauccagcugaucaacaaggccgugaacgcccugaucaacgaccagcugaucaugaagaaccaccugagagacaucaugggcauccccuacugcaacuacagcaaguacugguaccugaaccacaccaccaccggcaagaccagccugcccaagugcuggcuggugagcaacggcagcuaccugaacgagacccacuucagcgacgacaucgagcagcaggccgacaacaugaucaccgagaugcugcagaaggaguacauggagagacagggcaagaccccccugggccugguggaccuguucguguucagcaccagcuucuaccugaucagcaucuuccugcaccuggugaagauccccacccacagacacaucgugggcaagagcugccccaagccccacagacugaaccacaugggcaucugcagcugcggccuguacaagcagcccggcgugcccgugagauggaagagaugaggacuaguuauaagacugacuagcccgaugggccucccaacgggcccuccuccccuccuugcaccgagauuaaucaaaggcucuuuucagagccaccaaaaaaaaaaaaaaaaaaaaaaaaaaaaaaaaaaaaaaaaaaaaaaaaaaaaaaaaaaaaaaaaagaauu

SEQ ID NO: 14977 - RNA, 1658 nt, Artificial Sequence
  mRNA product Design i-3 (hSL-A64-N5) comprising derived and/or modified sequence from LASV(G502-SLE-2009;Clade IV)__AIT17126__GPC (opt4)
aggagaaagcuuaccaugggccagaucgugaccuucuuccaggaggugccccacgugaucgaggaggugaugaacaucgugcugaucgcccugagcauccuggccgugcugaagggccuguacaacuucgccaccugcggccuggugggccugcugaccuuccugcugcugugcggcagaagcugcaccaccggccuguacaagggcguguacgagcugcagacccuggagcugaacauggagacccugaacaugaccaugccccugagcugcaccaagaacaacagccaccacuacaucauggugggcaacgagaccggccuggagcugacccugaccaacaccagcaucaucaaccacaaguucugcaaccugagcgacgcccacaagaagaaccuguacgaccacgcccugaugagcaucaucagcaccuuccaccugagcauccccaacuucaaccaguacgaggccaugagcugcgacuucaacggcggcaagaucagcgugcaguacaaccugagccacagcuacgccggcgacgccgccgaccacugcggcaccguggccaacggcgugcugcagaccuucaugagaauggccuggggcggcagcuacaucgcccuggacagcggcagaggcagaugggacugcaucaugaccagcuaccaguaccugaucauccagaacaccaccugggaggaccacugccaguucagcagacccagccccaucggcuaccugggccugcugagccagagaaccagagacaucuacaucagcagaagacugcugggcaccuucaccuggacccugagcgacagcgagggcaaggacacccccggcggcuacugccugaccagauggaugcugaucgaggccgagcugaagugcuucggcaacaccgccguggccaagugcaacgagaagcacgacgaggaguucugcgacaugcugagacuguucgacuucaacaagcaggccauccagagacugaaggccgaggcccagaugagcauccagcugaucaacaaggccgugaacgcccugaucaacgaccagcuggugaugaagaaccaccugagagacaucaugggcauccccuacugcaacuacagcagauacugguaccugaaccacaccaccaccggcagaaccagccugcccaagugcuggcuggugagcaacggcagcuaccugaacgagacccacuucagcgacgacaucgagcagcaggccgacaacaugaucaccgagaugcugcagaaggaguacauggagagacagggcaagaccccccugggccugguggaccuguucguguucagcaccagcuucuaccugaucagcaucuuccugcaccuggugaagauccccacccacagacacaucgugggcaagagcugccccaagccccacagacugaaccacaugggcaucugcagcugcggccuguacaagcagcccggcgugcccgugaaguggaagagaugaggacuaguuauaagacugacuagcccgaugggccucccaacgggcccuccuccccuccuugcaccgagauuaaucaaaggcucuuuucagagccaccaaaaaaaaaaaaaaaaaaaaaaaaaaaaaaaaaaaaaaaaaaaaaaaaaaaaaaaaaaaaaaaaagaauu

SEQ ID NO: 14978 - RNA, 1658 nt, Artificial Sequence
  mRNA product Design i-3 (hSL-A64-N5) comprising derived and/or modified sequence from LASV(G733-SLE-2010;Clade IV)__AIT17154__GPC (opt4)
aggagaaagcuuaccaugggccagaucgugaccuucuuccaggaggugccccacgugaucgaggaggugaugaacaucgugcugaucgcccugagcauccuggccgugcugaagggccuguacaacuucgccaccugcggcaucgugggccuggugagcuuccugcugcugugcggcagaagcugcaccaccagccuguacaagggcguguacgagcugcagacccuggagcugaacauggagacccugaacaugaccaugccccugagcugcaccaagaacaacagccaccacuacaucauggugggcaacgagaccggccuggagcugacccugaccaacaccagcaucaucaaccacaaguucugcaaccugagcgacgcccacaagaagaaccuguacgaccacgcccugaugagcaucaucagcaccuuccaccugagcauccccaacuucaaccaguacgaggccaugagcugcgacuucaacggcggcaagaucagcgugcaguacaaccugagccacagcuacgccggcgacgccgccaaccacugcggcaccaucgccaacggcgugcugcagaccuucaugagaauggccuggggcggcagcuacaucgcccuggacagcggcagagacagaugggacugcaucaugaccagcuaccaguaccugaucauccagaacaccaccugggaggaccacugccaguucagcagacccagccccaucggcuaccugggccugcugagccagagaaccagagacaucuacaucagcagaagacugcugggcaccuucaccuggacccugagcgacagcgagggcaaggacacccccggcggcuacugccugaccagauggaugcugaucgaggccgagcugaagugcuucggcaacaccgccguggccaagugcaacgagaagcacgacgaggaguucugcgacaugcugagacuguucgacuucaacaagcaggccauccagagacugaaggccgaggcccagaugagcauccagcugaucaacaaggccgugaacgcccugaucaacgaccagcugaucaugaagaaccaccugagagacaucaugggcauccccuacugcaacuacagcaaguacugguaccugaaccacaccaccaccggcaagaccagccugcccaagugcuggcuggugagcaacggcagcuaccugaacgagacccacuucagcgacgacaucgagcagcaggccgacaacaugaucaccgagaugcugcagaaggaguacauggagagacagggcaagaccccccugggccugguggaccuguucguguucagcaccagcuucuaccugaucagcaucuuccugcaccuggugaagauccccacccacagacacguggugggcaagagcugccccaagccccacagacugaaccacaugggcaucugcagcugcggccuguacggccagcccggcgugcccgugaaguggaagagaugaggacuaguuauaagacugacuagcccgaugggccucccaacgggcccuccuccccuccuugcaccgagauuaaucaaaggcucuuuucagagccaccaaaaaaaaaaaaaaaaaaaaaaaaaaaaaaaaaaaaaaaaaaaaaaaaaaaaaaaaaaaaaaaaagaauu

SEQ ID NO: 14979 - RNA, 1658 nt, Artificial Sequence
  mRNA product Design i-3 (hSL-A64-N5) comprising derived and/or modified sequence from MOPV/LASV reassortant(IGS-1;Clade IV)__AFY05576__GPC (opt4)
aggagaaagcuuaccaugggccagaucgugaccuucuuccaggaggugccccacgugaucgaggaggugaugaacaucgugcugaucgcccugagcgugcuggccgugcugaagggccuguacaacuucgccaccugcggccuggugggccuggugaccuuccugcugcugugcggcagaagcugcaccaccagccuguacaagggcguguacgagcugcagacccuggagcugaacauggagacccugaacaugaccaugccccugagcugcaccaagaacaacagccaccacuacaucauggugggcaacgagaccggccuggagcugacccugaccaacaccagcaucaucaaccacaaguucugcaaccugagcgacgcccacaagaagaaccuguacgaccacgcccugaugagcaucaucagcaccuuccaccugagcauccccaacuucaaccaguacgaggccaugagcugcgacuucaacggcggcaagaucagcgugcaguacaaccugagccacagcuacgccggcgacgccgccaaccacugcggcaccguggccaacggcgugcugcagaccuucaugagaauggccuggggcggcagcuacaucgcccuggacagcggcagaggcaacugggacugcaucaugaccagcuaccaguaccugaucauccagaacaccaccugggaggaccacugccaguucagcagacccagccccaucggcuaccugggccugcugagccagagaaccagagacaucuacaucagcagaagacugcugggcaccuucaccuggacccugagcgacagcgagggcgaggacacccccggcggcuacugccugaccagauggaugcugaucgaggccgagcugaagugcuucggcaacaccgccguggccaagugcaacgagaagcacgacgaggaguucugcgacaugcugagacuguucgacuucaacaagcaggccauccagagacugaaggccgaggcccagaugagcauccagcugaucaacaaggccgugaacgcccugaucaacgaccagcugaucaugaagaaccaccugagagacaucaugggcauccccuacugcaacuacagcaaguacugguaccugaaccacaccaccaccggcagaaccagccugcccaagugcuggcuggugagcaacggcagcuaccugaacgagacccacuucagcgacgacaucgagcagcaggccgacaacaugaucaccgagaugcugcagaaggaguacauggagagacagggcaagaccccccugggccugguggaccuguucguguucagcaccagcuucuaccugaucagcaucuuccugcaccuggugaagauccccacccacagacacaucgugggcaagagcugccccaagccccacagacugaaccacaugggcaucugcagcugcggccuguacaagcagcccggcgugcccgugaaguggaagagaugaggacuaguuauaagacugacuagcccgaugggccucccaacgggcccuccuccccuccuugcaccgagauuaaucaaaggcucuuuucagagccaccaaaaaaaaaaaaaaaaaaaaaaaaaaaaaaaaaaaaaaaaaaaaaaaaaaaaaaaaaaaaaaaaagaauu

SEQ ID NO: 14980 - RNA, 1658 nt, Artificial Sequence
  mRNA product Design i-3 (hSL-A64-N5) comprising derived and/or modified sequence from LASV(LM765-SLE-2012;Clade IV)__AIT17814__GPC (opt4)
aggagaaagcuuaccaugggccagaucgugaccuucuuccaggaggugccccacgugaucgaggaggugaugaacaucgugcugaucgcccugagcauccuggccgugcugaagggccuguacaacuucgccaccugcggccuggugggccuggugaccuuccugcugcugugcggcagaagcugcaccaccagccuguacaagggcguguacgagcugcagacccuggagcugaacauggagacccugaacaugaccaugccccugagcugcaccaagaacaacagccaccacuacaucauggugggcaacgagaccggccuggagcugacccugaccaacaccagcaucaucgaccacaaguucugcaaccugagcgacgcccacagaaagaaccuguacgaccacgcccugaugagcaucaucagcaccuuccaccugagcauccccaacuucaaccaguacgaggccaugagcugcgacuucaacggcggcaagaucagcgugcaguacaaccugagccacagcuacgccaaggacgccgccgaccacugcggcaccguggccaacggcgugcugcagaccuucaugagaauggccuggggcggcagcuacaucgcccuggacagcggcagaggcagaugggacugcaucaugaccagcuaccaguaccugaucauccagaacaccaccugggaggaccacugccaguucagcagacccagccccaucggcuaccugggccugcugagccagagaaccagagacaucuacaucagcagaagacugcugggcaccuucaccuggacccugagcgacagcgagggcaaggacacccccggcggcuacugccugaccagauggaugcugaucgaggccgagcugaagugcuucggcaacaccgccguggccaagugcaacgagaagcacgacgaggaguucugcgacaugcugagacuguucgacuucaacaagcaggccauccagagacugaaggccgaggcccagaugagcauccagcugaucaacaaggccgugaacgcccugaucaacgaccagcugaucaugaagaaccaccugagagacaucaugggcauccccuacugcaacuacagcaaguacugguaccugaaccacaccaccaccggcaagaccagccugcccaagugcuggcuggugagcaacggcagcuaccugaacgagacccacuucagcgacgacaucgagcagcaggccgacaacaugaucaccgagaugcugcagaaggaguacauggagagacagggcaagaccccccugggccugguggaccuguucguguucagcaccagcuucuaccugaucagcaucuuccugcaccuggugaagauccccacccacagacacaucgugggcaagcccugccccaagccccacagacugaaccacaugggcaucugcagcugcggccuguacaagcagcccggcgugcccgugaaguggaagagaugaggacuaguuauaagacugacuagcccgaugggccucccaacgggcccuccuccccuccuugcaccgagauuaaucaaaggcucuuuucagagccaccaaaaaaaaaaaaaaaaaaaaaaaaaaaaaaaaaaaaaaaaaaaaaaaaaaaaaaaaaaaaaaaaagaauu

SEQ ID NO: 14981 - RNA, 1658 nt, Artificial Sequence
  mRNA product Design i-3 (hSL-A64-N5) comprising derived and/or modified sequence from LASV(LM776-SLE-2012;Clade IV)__AIT17824__GPC (opt4)
aggagaaagcuuaccaugggccagaucgugaccuucuuccaggaggugccccacgugaucgaggaggugaugaacaucgugcugaucgcccugagcauccuggccgugcugaagggccuguacaacuucgccaccugcggccuggugggccuggugaccuuccugcugcugugcggcagaagcugcaccaccagcguguacaagggcguguacgagcugcagacccuggagcugaacauggagacccugaacaugaccaugccccugagcugcaccaagaacaacagccaccacuacaucauggugggcaacgagaccggccuggagcugacccugaccaacaccagcaucaucaaccacaaguucugcaaccugagcgacgcccacaagaagaaccuguacgaccacgcccugaugagcaucaucagcaccuuccaccugagcauccccaacuucaaccaguacgaggccaugagcugcgacuucaacggcggcaagaucagcgugcaguacaaccugagccacagcuacgccggcgacgccgccaaccacugcggcaccguggccaacggcgugcugcagaccuucaugagaauggccuggggcggcagcuacaucgcccuggacagcggccacggcaagugggacugcaucaugaccagcuaccaguaccugaucauccagaacaccaccugggaggaccacugccaguucagcagacccagccccaucggcuaccugggccugcugagccagagaaccagagacaucuacaucagcagaagacugcugggcaccuucaccuggacccugagcgacagcgagggcaaggacacccccggcggcuacugccugaccagauggaugcugaucgaggccgagcugaagugcuucggcaacaccgccguggccaagugcaacgagaagcacgacgaggaguucugcgacaugcugagacuguucgacuucaacaagcaggccauccagagacugaaggccgaggcccagaugagcauccagcugaucaacaaggccgugaacgcccugaucaacgaccagcugaucaugaagaaccaccugagagacaucaugggcauccccuacugcaacuacagcaaguacugguaccugaaccacaccaccaccggcaagaccagccugcccaagugcuggcuggugagcaacggcagcuaccugaacgagacccacuucagcgacgacaucgagcagcaggccgacaacaugaucaccgagaugcugcagaaggaguacauggagagacagggcaagaccccccugggccugguggaccuguucguguucagcaccagcuucuaccugaucagcaucuuccugcaccuggugaagauccccacccacagacacaucgugggcaagagcugccccaagccccacagacugaaccacaugggcaucugcagcugcggccuguacaagcagcccggcgugcccgugagauggaagagaugaggacuaguuauaagacugacuagcccgaugggccucccaacgggcccuccuccccuccuugcaccgagauuaaucaaaggcucuuuucagagccaccaaaaaaaaaaaaaaaaaaaaaaaaaaaaaaaaaaaaaaaaaaaaaaaaaaaaaaaaaaaaaaaaagaauu

SEQ ID NO: 14982 - RNA, 1658 nt, Artificial Sequence
  mRNA product Design i-3 (hSL-A64-N5) comprising derived and/or modified sequence from LASV(Mad39;Clade IV)__ANH09722__GPC (opt4)
aggagaaagcuuaccaugggccagaucgugaccuucuuccaggaggugccccacgugaucgaggaggugaugaacaucgugcugaucgcccugagcauccuggccgugcugaagggccuguacaacguggccaccugcggccugaucggccuggugaccuuccugcugcugugcggcagaagcugcaccaccacccuguacaagggcguguacgagcugcaggcccuggagcugaacauggagacccugaacaugaccaugccccugagcugcaccaagaacaacagccaccacuacaucagagugggcaacgagaccggccuggagcugacccugaccaacaccagccugaucaaccacaaguucugcaaccugagcgacgcccacaagaagaaccuguacgaccacgcccugaugagcaucaucagcaccuuccaccugagcauccccaacuucaaccaguacgaggccaugagcugcgacuucaacgacggcaagaucagcgugcaguacaaccugagccacaccuacgccggcgacaccgccaaccacugcggcaccguggccaacggcgugcugcagaccuucaugagaauggccuggggcggcagcuacaucgcccuggacagcggcagaggcggcugggacugcaucaugaccagcuaccaguaccugaucauccagaacaccaccugggaggaccacugccaguucagcagacccagccccaucggcuaccugggccugcugagccagagaaccagagacaucuacaucagcagaagacugcugggcaccuucaccuggacccugagcgacagcgagggcaaggacacccccggcggcuacugccugaccagauggaugcugaucgaggccgagcugaagugcuucggcaacaccgccguggccaagugcaacgagaagcacgacgaggaguucugcgacaugcugagacuguucgacuucaacaagcaggccauccagagacugaaggccgaggcccagaugagcauccagcugaucaacaaggccgugaacgcccugaucaacgaccagcugaucaugaagaaccaccugagagacaucaugggcauccccuacugcaacuacagcaaguacugguaccugaaccacaccgugaccggcaagaccagccugcccaagugcuggcuggugagcaacggcagcuaccugaacgagacccacuucagcgacgacaucgagcagcaggccgacaacaugaucaccgagaugcugcagaaggaguacauggagagacagggcaagaccccccugggccugguggaccuguucguguucagcaccagcuucuaccugaucagcaucuuccugcaccuggugaagauccccacccacagacacguggugggcaagcccugccccaagccccacagacugaaccacaugggcaucugcagcugcggcuucuacaagcagcccggcgugcccgugagauggaagagaugaggacuaguuauaagacugacuagcccgaugggccucccaacgggcccuccuccccuccuugcaccgagauuaaucaaaggcucuuuucagagccaccaaaaaaaaaaaaaaaaaaaaaaaaaaaaaaaaaaaaaaaaaaaaaaaaaaaaaaaaaaaaaaaaagaauu

SEQ ID NO: 14983 - RNA, 1658 nt, Artificial Sequence
  mRNA product Design i-3 (hSL-A64-N5) comprising derived and/or modified sequence from LASV(Z0947-SLE-2011;Clade IV)__AIT17840__GPC (opt4)
aggagaaagcuuaccaugggccagaucgugaccuucuuccaggaggugccccacgugaucgaggaggugaugaacaucgugcugaucgcccugagcauccuggccgugcugaagggccuguacaacuucgccaccugcggccuggugggccuggugaccuuccugcugcugugcggcagaagcugcaccaucagccuguacaagggcguguacgagcugcagacccuggagcugaacauggagacccugaacaugaccaugccccugagcugcaccaagaacaacagccaccacuacaucauggugggcaacgagaccggccuggagcugacccugaccaacaccagcaucaucaaccacaaguucugcaaccugagcgacgcccacaagaagaaccuguacgaccacgcccugaugagcaucaucagcaccuuccaccugagcauccccaacuucaaccaguacgaggccaugagcugcgacuucaacggcggcaagaucagcgugcaguacaaccugagccacagcuacgccggcgacgccgccaaccacugcggcaccguggccaacggcgugcugcagaccuucaugagaauggccuggggcggcagcuacaucgcccuggacagcggcagagacagaugggacugcaucaugaccagcuaccaguaccugaucauccagaacaccaccugggaggaccacugccaguucagcagacccagccccaucggcuaccugggccugcugagccagagaaccagagacaucuacaucagcagaagacugcugggcaccuucaccuggacccugagcgacagcgagggcaaggacacccccggcggcuacugccugaccagauggaugcugaucgaggccgagcugaagugcuucggcaacaccgccguggccaagugcaacgagaagcacgacgaggaguucugcgacaugcugagacuguucgacuucaacaagcaggccauccagagacugaaggccgaggcccagaugagcauccagcugaucaacaaggccgugaacgcccugaucaacgaccagcugaucaugaagaaccaccugagagacaucaugggcauccccuacugcaacuacagcaaguacugguaccugaaccacaccaccaccggcaagaccagccugcccaagugcuggcuggugagcaacggcagcuaccugaacgagacccacuucagcgacgacaucgagcagcaggccgacaacaugaucaccgagaugcugcagaaggaguacauggagagacagggcaagaccccccugggccugguggaccuguucguguucagcaccagcuucuaccugaucagcaucuuccugcaccuggugaagauccccacccacagacacaucgugggcaagcccugccccaagccccacagacugaaccacaugggcaucugcagcugcggccuguacaagcagcccggcgugcccgugaaguggaagagaugaggacuaguuauaagacugacuagcccgaugggccucccaacgggcccuccuccccuccuugcaccgagauuaaucaaaggcucuuuucagagccaccaaaaaaaaaaaaaaaaaaaaaaaaaaaaaaaaaaaaaaaaaaaaaaaaaaaaaaaaaaaaaaaaagaauu

SEQ ID NO: 14984 - RNA, 1658 nt, Artificial Sequence
  mRNA product Design i-3 (hSL-A64-N5) comprising derived and/or modified sequence from LASV(Josiah;Clade IV)__NP_694870__GPC (opt5)
aggagaaagcuuaccaugggccagaucgugaccuucuuucaagaggucccccacguuauugaagaggugaugaacaucgugcugauugcccucagcguccuggcugugcuuaaggggcuguacaauuucgccacaugcggacucguuggccuggugacguuucuucugcucugugggagauccugcaccacaucucuguauaaaggagucuacgaacugcagacccucgagcugaacauggaaacacuuaauaugaccaugccucugagcuguacaaagaacaauucccaucacuauaucauggugggcaacgagaccgggcucgagcugacgcuuaccaauacaucuauuaucaaccauaaauucugcaaucugagcgacgcgcacaagaaaaaccucuacgaucaugcucugauguccaucauuucuaccuuucaccugagcaucccgaauuucaaccaguaugaagccauguccugugacuuuaauggaggcaagauuagcguucaguacaaccucucucacuccuaugccggcgaugcugccaaucauugcgggacaguggcuaacggaguccugcaaaccuucaugcggauggccuggggcgggagcuacaucgcgcuugacucuggacgcggcaacugggauuguauuaugacguccuaccaguaucugaucauucagaauacaaccugggaggaccacugccaguuuagcagacccucuccuaucggguaccucggacugcuuucccaacggacacgcgauaucuauauuagcagacggcugcucggcaccuucaccuggacacuguccgacucugaaggcaaggauacgcccgggggauacugucugacccgcuggaugcucaucgaggccgagcugaaaugcuuuggcaacacagcuguggccaaguguaaugaaaaacaugacgaggaguucugcgauaugcuuagacuguuugacuucaacaagcaggcuauucagcggcucaaagccgaagcgcagaugagcauccaacugauuaauaaggccgugaacgcucuuaucaaugaucagcugaucaugaagaaccaccuccgcgacauuauggggaucccuuauugcaauuacuccaaauauugguaccugaaccacaccacaaccggaagaacgagccugcccaaguguuggcucgucucuaauggcuccuaccugaacgaaacacauuucagcgacgauauugagcagcaagccgacaauaugaucaccgagaugcuucagaaagaauauauggagcggcaggggaagaccccucugggacucguugaucuguuuguguucucuaccagcuuuuaccugauuuccaucuuccuucaccucgugaaaaucccgacacaucgccacauugucggcaagucuugccccaaaccucauagacugaaccacaugggcaucuguagcugcgggcuguauaagcagcccggagugccuguuaaguggaaacggugaggacuaguuauaagacugacuagcccgaugggccucccaacgggcccuccuccccuccuugcaccgagauuaaucaaaggcucuuuucagagccaccaaaaaaaaaaaaaaaaaaaaaaaaaaaaaaaaaaaaaaaaaaaaaaaaaaaaaaaaaaaaaaaaagaauu

SEQ ID NO: 14985 - RNA, 1655 nt, Artificial Sequence
  mRNA product Design i-3 (hSL-A64-N5) comprising derived and/or modified sequence from LASV(LP;Clade I)__AAF86701__GPC (opt5)
aggagaaagcuuaccaugggccagaucauuaccuucuuucaagaggugccccacgucaucgaagagguuaugaacauugugcugaucgcccucagccugcuugcuauucugaaggggcucuacaauaucgccacaugcggaaucauuggccugguggcguuccuuuuucugugugggaaauccugcucucucacgcugaagggaggcuaugaacugcagacccucgagcugaacauggaaacacuuaauaugaccaugccucugagcuguaccaaaaacuccucucaucacuacaucagagucgggaaugagacaggacucgagcugacacuuaccaacacgagcauuaucaaucauaaguucugcaaccuguccgacgcucacaaaaagaaucucuaugaucaugcccugaugucuauuaucagcaccuuucaccuguccauuccgaacuucaaucaguacgaagccaugagcugugacuuuaacggcggcaagaucucugugcaguauaaucucucccacagcuacgcuggggaugccgcugagcauugcggaacaguugccaacggcgugcugcaaaccuucaugcggauggcguggggagggcgcuauaucgcccuugacucuggcaaagggaauugggauuguauuaugacauccuaccaguaccugaucauucagaacaccacgugggaagaccacugccaguuuagcagacccucuccuaucggauaucucggccugcuuucccaacggacacgcgauauuuacaucagcagacggcugcucggcaccuucacauggacccuguccgacucugaggggaacgagacccccggaggcuauugucugacacgcuggaugcucaucgaagcugagcugaagugcuuugggaauacggccgucgcuaaauguaacgaaaagcaugaugaggaguucugcgacaugcuuagacuguuugauuucaauaaacaggccauucggcgccucaaggcggaagcccagaugagcauccagcugauuaacaaggcugugaaugcccuuaucaacgaccaacugauuaugaaaaaucaccucagagauaucaugggaaucccuuacugcaacuauuccaaguacugguaucugaaucacaccagcucuggccggacaucccugcccaaauguuggcucauuagcaacgggucuuaccugaaugagacccaguucagcgacgacaucgaacagcaagcugauaacaugauuacagagaugcuucagaaggaauacaucgagcgccagggaaaaaccccucugggccucguugacauuuuuaucuucuccacgucuuuuuaucugauuagcaucuuccugcaucuuaucaagauuccgacacacagacauaucgugggcaaacccugcccuaagccccaccggcucaaucauaugggggucuguuccugcggacuguacaagcacccuggcgugcccaccaaauggaagcgcugaggacuaguuauaagacugacuagcccgaugggccucccaacgggcccuccuccccuccuugcaccgagauuaaucaaaggcucuuuucagagccaccaaaaaaaaaaaaaaaaaaaaaaaaaaaaaaaaaaaaaaaaaaaaaaaaaaaaaaaaaaaaaaaaagaauu

SEQ ID NO: 14986 - RNA, 1655 nt, Artificial Sequence
  mRNA product Design i-3 (hSL-A64-N5) comprising derived and/or modified sequence from LASV(803213;Clade II)__AAF86703__GPC (opt5)
aggagaaagcuuaccaugggccagaucauuaccuucuuucaagaggugccccacgucaucgaagagguuaugaacauugugcugaucgcccucagccugcuugcuauucugaaggggaucuacaauguggccacaugcggacucuucggccugaucuccuuucuucugcucugugggagaucuugcagcgucacguauaaaggaguguacgaacugcagacccuggagcucaacauggcgaaucugaacaugacaaugccucuuuccuguaccaagaauaacucucaucacuauauuaugguuggcaaugaaacagggcuggagcucacccugacaaacaccagcaucauuaaucauaaauucugcaaccuuuccgacgcucacaagaaaaaucuguacgaucaugcccucaugucuaucauuagcacguuucaccuguccaucccgaacuucaaucaguaugaggccaugagcugugacuuuaacggaggcaagauuucugugcaguacaaucugucccacagcuucgcugucgaugccgcuaaccauugcggcaccaucgccaacggggugcuccaaacauuuaugcggauggcguggggaggcucuuauaucgcccuggacuccgggaagggaaauugggauuguauuaugaccagcuaccaguaccuuaucauucagaacacaaccugggaagaccacugccaguucucucgccccuccccuaucggcuaucuggggcuccugagccaaagaacgcgggauauuuacaucucccgcagacuucugggaacauuuaccuggacacucucugacagcgagggcaaugaagcucccggcggguauugucugacccgguggaugcugaucgaggccgagcucaaaugcuucggaaacaccgcuguugccaaguguaaugaaaaacaugaugaggaauuuugcgacaugcugcgccuuuucgauuucaacaagcaggcgauuaaaagacugaagacagaggcccagauguccauccagcucauuaauaaggcugugaacgcccugaucaaugaccaacuuauuaugaaaaaccaucugcgggauaucaugggcaucccuuacugcaauuauagccgcuacugguaucucaaccacacggucaccgggaagacaucucugcccagauguuggcugguguccaauggaagcuaccucaacgaaacccacuuuucugacgacauugagcagcaggcugauaauaugaucacagagaugcugcaaaaagaauacauggaccggcagggcaagaccccucuugggcugguggaucucuucgucuuuagcacguccuucuaucugauuucuaucuuucugcaccuuguuaaaauuccgacacaucgccacaucgugggaaagcccugcccuaaaccccauagacucaaccacaugggcauuuguagcugcggccuguacaagcacccuggggugcccgucaaguggaaacggugaggacuaguuauaagacugacuagcccgaugggccucccaacgggcccuccuccccuccuugcaccgagauuaaucaaaggcucuuuucagagccaccaaaaaaaaaaaaaaaaaaaaaaaaaaaaaaaaaaaaaaaaaaaaaaaaaaaaaaaaaaaaaaaaagaauu

SEQ ID NO: 14987 - RNA, 1655 nt, Artificial Sequence
  mRNA product Design i-3 (hSL-A64-N5) comprising derived and/or modified sequence from LASV(GA391;Clade III)__CAA36645__GPC (opt5)
aggagaaagcuuaccaugggccagaucgugaccuucuuucaagaggucccccacguuauugaagaggugaugaacaucgugcugauugcccucagcauccuggcuauucuuaaggggcuguacaaugucgccacaugcggacucaucggccuggugacguuccuucugcucuccgggagaucuuguagccugaucuauaaaggaaccuacgaacugcagacacucgagcugaacauggaaacccuuaauaugacaaugccucuguccugcaccaagaacaauucucaucacuauauucggguuggcaacgagacagggcucgagcugacccuuacgaauaccagcauccugaaccauaaauuuuguaaucucuccgacgcgcacaagcgcaaccuguacgaucauucucugaugagcauuaucuccacauuccaccucagcauuccgaauuuuaaccaguaugaagcuaugucuugcgacuucaauggaggcaaaaucaccgugcaguacaaccugucccacagcuuugccgucgaugccgcuggccauugugggacacuugccaauggagugcugcaaaccuucaugagaauggcuuggggcgggucuuauauugcccucgacuccggacggggcaacugggauugcaucaugacgagcuaccaguaccugaucauucagaacacaaccugggacgaucacugucaguuuucucgccccuccccuaucggguaucuuggacugcucagccaaagaacacgggacauuuacaucucccgcagacugcugggcaccuucaccuggacacucucugauagcgagggcaaugaaacgcccgggggauauugccugacccgguggaugcuuauugaggcggagcugaaguguuuuggcaacacagccguugcuaagugcaaugaaaaacaugacgaggaguucugugauaugcuccgccuguuugacuucaacaagcaggccaucagacggcuuaaaaccgaagcucagauguccauccagcugauuaauaaggccgugaacgcgcucaucaaugaucaacugauuaugaaaaaccaucugcgcgacaucauggggauuccuuacugcaauuauagcagauacugguaucucaaccacacaucuaccggaaagacgucccugccccggugcuggcuuaucagcaauggcucuuaccugaacgaaacaaaguucagcgacgauaucgagcagcaggccgacaauaugauuaccgagaugcuccaaaaagaauacaucgaucgccaggggaagaccccucugggacuggucgaccuuuuuguguucuccacaucuuuuuaucucauuagcaucuuccugcaccuggugaaaauuccgacccacagacauaucgucggcaagcccuguccuaaaccccaccggcucaaccauaugggcauuugcuccugugggcuguacaagcagccuggaguucccgugagauggaaacgcugaggacuaguuauaagacugacuagcccgaugggccucccaacgggcccuccuccccuccuugcaccgagauuaaucaaaggcucuuuucagagccaccaaaaaaaaaaaaaaaaaaaaaaaaaaaaaaaaaaaaaaaaaaaaaaaaaaaaaaaaaaaaaaaaagaauu

SEQ ID NO: 14988 - RNA, 1658 nt, Artificial Sequence
  mRNA product Design i-3 (hSL-A64-N5) comprising derived and/or modified sequence from LASV(AV;Clade V)__CCA30314__GPC (opt5)
aggagaaagcuuaccaugggccagaucgugaccuucuuucaagaggucccccacguuauugaagaggugaugaacaucgugcugauugcccucagcauccuggcuguccuuaaggggcuguacaauauugccacaugcggacucaucggccugaucacguuccuucugcucugugggagauccugcucuagcaaccuguauaaaggaguguacgaacugcagucccucgaccugaauauggagacccuuaacaugacaaugccucugucuuguaccaagaauaacagccaucacuauauucggguuggcaaugauacagggcucgaacugacccuuacaaacaccuccauccugaaucauaaauuuugcaaccucucugacgcgcacaagaaagaucuguacgaccaugcucugaugagcauuaucuccacguuccaccucagcauuccgaauuuuaaccaguaugaggccaugucuugugauuucaauggaggcaagaucuccgugcaguacaaccugagccacucuuaugccauugacgcugccaaucauugcggcaccgucgcuaacgggauccuucaaacauuuaugcgcauggccuggggaggcuccuacaucgcgcuggauagcgggagaggaaacugggacuguauuaugaccucuuaccaguaucucaucauucagaauacaaccugggagaaccacugccaguucucccggcccagcccuaucggcuaccuggggcuucugucccaacgcacgagagauauuuauaucucucggcgccuccugggaacauuuaccuggacacugagcgacuccgaaggcaaugccacccccggcggguacugucucaccagauggaugcugaucgaggcugaacuuaagugcuucggaaacacagccguggcuaaauguaaugagaagcaugaugaggaauuuugcgacaugcugcgccucuucgauuuuaacaaacaggccauuagccggcugaagucugaggcgcagauguccauccagcuuauuaauaaagccguuaacgcucugaucaaugaccaacucauuaugaagaaccaccugagagacaucaugggcaucccuuauugcaauuacagcaaguauugguaccugaaccacacgauuaccgggaaaacaucucuccccaaguguuggcuggugagcaauggauccuaccuuaacgaaacccauuucucugaugacaucgagcagcaggccgauaauaugauuacagaaaugcugcaaaaagaguauauggagcggcagggcaagaccccucucgggcuggucgaccuguucguguuuagcacguccuucuaccuuaucagcauuuuucuccgccuggugaaaaucccgacacacagacauauugucggaaagcccugcccuaaaccccaccggcugaaccauaugggcaucuguucuugcggccucuauaagcagccugggguucccgugcgcuggaagagaugaggacuaguuauaagacugacuagcccgaugggccucccaacgggcccuccuccccuccuugcaccgagauuaaucaaaggcucuuuucagagccaccaaaaaaaaaaaaaaaaaaaaaaaaaaaaaaaaaaaaaaaaaaaaaaaaaaaaaaaaaaaaaaaaagaauu

SEQ ID NO: 14989 - RNA, 1655 nt, Artificial Sequence
  mRNA product Design i-3 (hSL-A64-N5) comprising derived and/or modified sequence from LASV(Togo/2016/7082;Clade VI)__AMR44577__GPC (opt5)
aggagaaagcuuaccaugggccagaucauuaccuucuuucaagaggugccccacgucaucgaagagguuaugaacauugugcugaucgcccucagccugcuugcuauucugaaggggguguacaaugucgccacaugcggaaucaucggccucgugacguuccuguuucuuugugggagauccugcucucugauuuauaaaggaagcuacgaacuccagacccuggagcugaacauggaaacacucaauaugaccaugccucuguccuguacaaagaacucuagccaucacuauauccggguuggcaaugagaccgggcuugagcugacacucaccaacacguccauuaucaaucauaaauucugcaaccugucugacgcgcacaagcgcaaucuuuacgaucaugcucugaugagcauucucuccaccuuucaccugagcaucccgaacuucaaucaguaugaagccaugucuugugacuuuaacggaggcaaaauuuccgugcaguacaaucugagccacgccuaugcugucgaugccgcugagcauugcggcacaguggccaacgggguucuccaaaccuucaugagaauggcguggggaggcucuuacaucgcccuggacuccgggcggggaaauugggauuguaucaugacaagcuaccaguaucuuauuauccagaacaccacgugggaagaccacugccaguuuucucgccccuccccuauuggcuaccuggggcuccugagccaaagaacacgggauaucuauauuucccgcagacuucugggaaccuucacauggacccucucugacagcgagggcaacgagacccccggcggguacugucugacacgguggaugcugaucgaagcugagcucaagugcuuuggaaauacggccguggcuaaguguaacgaaaaacaugaugaggaguucugcgacaugcugcgccuuuuugauuucaauaagcaggccauccagagacugaaauccgaagcgcagaugagcauucaacucaucaacaaggccgucaaugcucugauuaacgaccagcuuaucaugaaaaaucaucugcgggauaugaugggcauuccuuauugcaacuacucuaaguauugguaccucaaucacaccuccagcgggcgcacaucucugcccaaguguuggcuggugagcaacggauccuaccucaaugagacccacuucucugacgacaucgaacagcaagccgauaacaugaucacagagaugcugcagaaagaauauauugacagacagggcaagaccccucuugggcugguggaucucuuugucuucagcacguccuuuuaccugaucagcauuuuccugcaccuuaucaaaauuccgacacaucggcacaucguuggaaagcccugcccuaaaccccaucgccucaaucacaugggcauuuguucuugcggccuguauaagcagccuggggugcccaccagauggaaacggugaggacuaguuauaagacugacuagcccgaugggccucccaacgggcccuccuccccuccuugcaccgagauuaaucaaaggcucuuuucagagccaccaaaaaaaaaaaaaaaaaaaaaaaaaaaaaaaaaaaaaaaaaaaaaaaaaaaaaaaaaaaaaaaaagaauu

SEQ ID NO: 14990 - RNA, 1655 nt, Artificial Sequence
  mRNA product Design i-3 (hSL-A64-N5) comprising derived and/or modified sequence from LASV(KAK-428;Clade n.d. (VII))__ANH09740__GPC (opt5)
aggagaaagcuuaccaugggccagaucgugaccuucuuucaagaggucccccacguuauugaagaggugaugaacaucgugcugauugcccucagccugcuugcuauccugaaggggcucuacaauuucgccacaugcggagucauuggccugaucacguuucuucugcucugugggagauccugcucugcgaccuauaaaggacaguacgaacugcagacacuggagcucaacauggaaagccugaauaugaccaugccucuuuccuguacaaagaacaauucucaucacuauauccgggcuggcaacaauaccgggcuggagcucacacugaccaacacgagcauuaucucccauaaauucugcaaucuuucugacgcccacaagaaaaaccuguacgaucauacccucaugagcauuaucacaaccuuucaccuguccauuccgaauuucaaccaguaugaggccaugagcugugacuuuaauggaggcaagaucucuauucaauacaaccugucccacagcuaugcuggcgaugccgcucagcauugcgggacaguggccaauggaguucuccagaccuucaugcgcauggcguggggcgggucuuaccuggcccuugacuccggaagacggggcugggauuguaucaucagcucuuaccaguaucugauuauccaaaacacgacaugggacgaucacugccaguuuucccgccccagcccuauuggguaccucggauucgugucccagaagaccagagacaucuauauuucucggcgccugcuuggcacauuuaccuggacccugagcgauuccgaaggccaugacaugcccgggggauacugucucacaagauggaugcugaucgaggcugaucugaaaugcuucggcaacacggccgucgcuaaguguaaugaaaaacacgacgaggaguuuugcgauauguggcgccucuucgacuucaacaagcaggccauccaacggcugaaagcggaagcccagaugaauauucagcuuaucaacaaggcugugaaugcccugauuaacgaccaacucaugaugaagaaucaccugagagauaucauggggauuccuuauugcaacuacagcaaauuuugguaucuuaauaacaccacaaccggacggacaucucugccccgcuguuggcucaucuccaauggcagcuaccugaacgagacccauuucucugacgauaucgaacagcaggcugacaauaugauuacggagaugcugcagaaggaauacauggauagacaagggaaaacaccucucggacugguugaccuuuuuguguucagcaccuccuuuuaucugaucaccauuuuccuccaccuggucaagaucccgacacaucggcacauugugggcaaacccugcccuaagccccaucgccugaaccacaugggcaucuguucuugcgggcuuuacaaacagccuggagugcccgucagauggaagcggugaggacuaguuauaagacugacuagcccgaugggccucccaacgggcccuccuccccuccuugcaccgagauuaaucaaaggcucuuuucagagccaccaaaaaaaaaaaaaaaaaaaaaaaaaaaaaaaaaaaaaaaaaaaaaaaaaaaaaaaaaaaaaaaaagaauu

SEQ ID NO: 14991 - RNA, 1655 nt, Artificial Sequence; identical to SEQ ID NO: 14985
  mRNA product Design i-3 (hSL-A64-N5) comprising derived and/or modified sequence from LASV(Pinneo-NIG-1969;Clade I)__AIT17836__GPC (opt5)

SEQ ID NO: 14992 - RNA, 1655 nt, Artificial Sequence
  mRNA product Design i-3 (hSL-A64-N5) comprising derived and/or modified sequence from LASV(ISTH0009-NIG-2011;Clade II)__AIT17404__GPC (opt5)
aggagaaagcuuaccaugggccagaucauuaccuucuuucaagaggugccccacgucaucgaagagguuaugaacauugugcugaucgcccucagccugcuugcuauucugaaggggaucuacaauguggccacaugcggacucuucggccuggucuccuuucuucugcucugugggagaucuugcagcacgaccuauaaaggaguguacgaacugcagacacuggagcucgacauggcgucccugaacaugaccaugccucuuucuuguacaaagaauaacagccaucacuauaucaugguuggcaaugaaaccgggcuggagcucacacugaccaacacguccauuaucaaucauaaauucugcaaccuuucugaugcucacaagaaaaaucuguacgaccaugcccucaugagcauuaucuccaccuuucaccugagcauuccgaacuucaaucaguaugaggccaugucuugugauuuuaacggaggcaagaucuccgugcaguacaaucugagccacgcuuaugccgucgacgcugccaaccauugcggcacaauugcgaauggggugcuccaaaccuucaugcggauggccuggggaggcucuuacaucgcucuggauuccgggaagggaagcugggacuguaucaugacaucuuaccaguaucuuauuauccagaacaccacgugggaagaucacugccaguuuucccgccccagcccuauuggcuaccuggggcuccugucccaaagaacacgggacaucuauauuucucgcagacuucugggaaccuucacauggacccucagcgauuccgagggcaacgaaacccccggcggguacugucugacacgguggaugcugaucgaggccgagcucaaaugcuuuggaaauacggcuguugccaaguguaacgaaaaacaugacgaggaguucugcgauaugcugcgccuuuuugacuucaauaagcaggcgaucagacggcugaaaaccgaagcccagaugagcauucagcucaucaacaaggcugugaaugcccugauuaacgaucaacuuaucaugaagaaucaucugcgcgacauuaugggcaucccuuauugcaacuacucuaaauauugguaccucaaucacacagucaccgggaagacaucccugcccagauguuggcuggugagcaacggaucuuaccucaaugaaacccacuucagcgacgauaucgagcagcaggcugacaacaugauuacggagcugcuucaaaaagaauauauggaucggcagggcaagacaccucuggggcucguggaccuguuugucuucuccaccucuuuuuaccugaucagcauuuuccuucaccucaucaaaauuccgacccaucgccacaucacaggaaagcccugcccuaaaccccauagacugaaucacaugggcauuuguuccugcggccuguauaagcacccugggguucccgugaaguggaaacggugaggacuaguuauaagacugacuagcccgaugggccucccaacgggcccuccuccccuccuugcaccgagauuaaucaaaggcucuuuucagagccaccaaaaaaaaaaaaaaaaaaaaaaaaaaaaaaaaaaaaaaaaaaaaaaaaaaaaaaaaaaaaaaaaagaauu

SEQ ID NO: 14993 - RNA, 1655 nt, Artificial Sequence
  mRNA product Design i-3 (hSL-A64-N5) comprising derived and/or modified sequence from LASV(ISTH2010-NIG-2012;Clade II)__AIT17482__GPC (opt5)
aggagaaagcuuaccaugggccagaucauuaccuucuuucaagaggugccccacgucaucgaagagguuaugaacauugugcugaucgcccucagccugcuugcuauucugaaggggaucuacaauguggccacaugcggacucuucggccuggucuccuuucuucugcucugugggagaucuugcagcacgaccuauaaaggaguguacgaacugcagacacuggagcucgacauggcgucccugaacaugaccaugccucuuucuuguacaaagaauaacagccaucacuauaucaugguuggcaaugaaaccgggcuggagcucacacugaccaacacguccauuaucaaucauaaauucugcaaccuuucugaugcucacaagaaaaaucuguacgaccaugcccucaugagcauuaucuccaccuuucaccugagcauuccgaacuucaaucaguaugaggccaugucuugugauuuuaacggaggcaagaucuccgugcaguacaaucugagccacgcuuaugccgucgacgcugccaaccauugcggcacaauugcgaauggggugcuccaaaccuucaugcggauggccuggggaggcucuuacaucgcucuggauuccgggaagggaagcugggacuguaucaugacaucuuaccaguaucuuauuauccagaacauuaccugggaagaucacugccaguuuucccgccccagcccuaucggcuaccuggggcuccugucccaaagaacgcgggacauuuauaucucucgcagacuucugggaacauucaccuggacacucagcgauuccgagggcaacgaaacccccggcggguacugucugacccgguggaugcugaucgaggccgagcucaaaugcuuuggaaauacagcuguugccaaguguaacgaaaaacaugacgaggaguucugcgauaugcugcgccuuuuugacuucaauaagcaggcgauuagacggcugaaaacggaagcccagaugagcauccagcucauuaacaaggcugugaaugcccugaucaacgaucaacuuauuaugaagaaucaucugcgcgacaucaugggcaucccuuauugcaacuacucuaaauauugguaccucaaucacaccgucacagggaagaccucccugcccagauguuggcuggugagcaacggaucuuaccucaaugaaacacacuucagcgacgauauugagcagcaggcugacaacaugaucaccgagcugcuucaaaaagaauauauugaucggcagggcaagacgccucuggggcucguggaccuguuugucuucuccacaucuuuuuaccugaucagcauuuuccuucaccucguuaaaaucccgacccaucgccacguggugggaaagcccugcccuaaaccccauagacugaaucacaugggcauuuguuccugcggccuguauaagcacccugggguccccgugaaguggaaacggugaggacuaguuauaagacugacuagcccgaugggccucccaacgggcccuccuccccuccuugcaccgagauuaaucaaaggcucuuuucagagccaccaaaaaaaaaaaaaaaaaaaaaaaaaaaaaaaaaaaaaaaaaaaaaaaaaaaaaaaaaaaaaaaaagaauu

SEQ ID NO: 14994 - RNA, 1655 nt, Artificial Sequence
  mRNA product Design i-3 (hSL-A64-N5) comprising derived and/or modified sequence from LASV(Lassa virus/H.sapiens-wt/NGA/2015/ISTH_0543;Clade II)__AVO03639__GPC (opt5)
aggagaaagcuuaccaugggccagaucauuaccuucuuucaagaggugccccacgucaucgaagagguuaugaacauugugcugaucgcccucagccugcuugcuauucugaaggggaucuacaauguggccacaugcggacucuucggccuggucuccuuucuucugcucugugggagaucuugcagcacgaccuauaaaggaguguacgaacugcagacacuggagcucgacauggcgaaccugaauaugaccaugccucuuuccuguacaaagaacaauucucaucacuauaucaugguuggcaacgaaaccgggcuggagcucacacugaccaauacgagcauuaucaaccauaaauucugcaaucuuuccgaugcucacaagaaaaaccuguacgaccaugcccucaugucuauuaucagcaccuuucaccuguccauuccgaauuucaaccaguaugaggccaugagcugugauuuuaauggaggcaagaucucugugcaguacaaccugucccacacauaugcugucgacgccgcuaaucauugcggcaccauugccaacggggugcuccaaacauucaugcggauggcguggggaggcagcuacaucgcccuggauucugggaagggauccugggacuguaucaugaccagcuaccaguaucuuguuauucagaacacgacaugggaagaucacugccaguuuucucgccccuccccuaucggcuaccuggggcuccugagccaaagaacccgggacauuuauaucucccgcagacuucugggaacauucaccuggacccucucugauagcgagggcaaugaaacacccggcggguacugucugacgcgguggaugcugauugaggcugagcucaaaugcuuuggaaacaccgccguggcuaaguguaaugaaaaacaugacgaggaguucugcgauaugcugcgccuuuuugacuucaacaagcaggccaucagacggcugaaaacagaagcgcagauguccauccagcucauuaauaaggccgucaacgcucugaucaaugaucaacuuauuaugaagaaccaucugcgcgacaucaugggcauuccuuauugcaauuacagcaaauauugguaccucaaccacaccgugacagggaagaccucucugcccagauguuggcugguguccaauggaagcuaccucaacgaaacgcacuucucugacgauaucgagcagcaggccgacaauaugaucacagagcugcuucaaaaagaauauauugaucggcagggcaagaccccucuggggcucgucgaccuguuuguuuucagcaccuccuuuuaccugaucucuauuuuccuucaccucgugaaaaucccgacacaucgccacauuaccggaaagcccugcccuaaaccccauagacugaaccacaugggcaucuguagcugcggccuguauaagcacccuggggugcccgucaaguggaaacggugaggacuaguuauaagacugacuagcccgaugggccucccaacgggcccuccuccccuccuugcaccgagauuaaucaaaggcucuuuucagagccaccaaaaaaaaaaaaaaaaaaaaaaaaaaaaaaaaaaaaaaaaaaaaaaaaaaaaaaaaaaaaaaaaagaauu

SEQ ID NO: 14995 - RNA, 1655 nt, Artificial Sequence
  mRNA product Design i-3 (hSL-A64-N5) comprising derived and/or modified sequence from LASV(Lassa virus/H.sapiens-wt/NGA/2016/ISTH_0009;Clade II)__AVO03571__GPC (opt5)
aggagaaagcuuaccaugggccagaucauuaccuucuuucaagaggugccccacgucaucgaagagguuaugaacauugugcugaucgcccucagccugcuugcuauucugaaggggaucuacaauguggccacaugcggacuccugggccuugucuccuuccugcuccugugugggagaucuugcagcacgaccuauaaaggaguguacgaacugcagacacucgagcuggacauggcgucccuuaacaugaccaugccucugucuuguacaaagaauaacagccaucacuauaucaugguuggcaaugaaaccgggcucgagcugacacuuaccaacacguccauuaucaaucauaaauuuugcaaccugucugaugcucacaagaaaaaucucuacgaccaugcccugaugagcauuaucuccaccuuccaccugagcauuccgaacuuuaaucaguaugaggccaugucuugugauuucaacggaggccggaucuccgugcaguacaaucucagccacucuuaugcugucgacgccgcuaaccauugcggcacaauugccaauggggugcugcaaaccuuuaugcgcauggcguggggaggcuccuacaucgcccuugauagcgggaagggaucuugggacuguaucaugacauccuaccaguaucugauuauccagaacaccacgugggaagaucacugccaguucagcagacccuccccuauuggcuaccucgggcugcuuucucaacggacacgcgacaucuauauuagcagacggcugcucggaaccuuuacauggacccuguccgauagcgagggcaacgaaacccccggcggguacugucugacacgcuggaugcucaucgaggcugagcugaagugcuucggaaauacggccguugcuaaauguaacgaaaagcaugacgaggaauuuugcgauaugcuuagacuguucgacuuuaauaaacaggccauccggcgccucaagaccgaggcgcagaugucuauucagcugaucaacaaagccgugaaugcucuuauuaacgaucaacugaucaugaagaaucaccucagagacauuaugggcaucccuuauugcaacuacuccaaguauugguaccugaaucacacagucaccgggaaaacaagccugccccgguguuggcucgugucuaacggaagcuaccugaaugaaacccauuucuccgacgauaucgagcagcaggccgacaacaugauuacggagcuucugcaaaaggaauauaucgaucgccagggcaaaacaccucucgggcugguggaccuguucgucuuuucuaccagcuucuaccuuauuuccaucuuucuccaccugguuaagauuccgacccauagacacaucacaggaaaacccugcccuaagccccaucggcugaaucacaugggcauuuguagcugcggccucuauaaccacccuggggugcccgugaaauggaagcgcugaggacuaguuauaagacugacuagcccgaugggccucccaacgggcccuccuccccuccuugcaccgagauuaaucaaaggcucuuuucagagccaccaaaaaaaaaaaaaaaaaaaaaaaaaaaaaaaaaaaaaaaaaaaaaaaaaaaaaaaaaaaaaaaaagaauu

SEQ ID NO: 14996 - RNA, 1655 nt, Artificial Sequence
  mRNA product Design i-3 (hSL-A64-N5) comprising derived and/or modified sequence from LASV(Lassa virus/H.sapiens-wt/NGA/2016/ISTH_0017;Clade II)__AVO03567__GPC (opt5)
aggagaaagcuuaccaugggccagaucauuaccuucuuucaagaggugccccacgucaucgaagagguuaugaacauugugcugaucgcccucagccugcuugcuauucugaaggggaucuacaauguggccacaugcggacucuucggccuggucuccuuucuucugcucugugggagaucuugcagcacgaccuauaaaggaguguacgaacugcagacacuggagcucgacauggcgucccugaacaugaccaugccucuuucuuguacaaagaauaacagccaucacuauaucaugguuggcaaugaaaccgggcuggagcucacacugaccaacacguccauuaucaaucauaaauucugcaaccuuucugaugcucacaagaaaaaucuguacgaccaugcccucaugagcauuaucuccaccuuucaccugagcauuccgaacuucaaucaguaugaggccaugucuugugauuuuaacggaggcaagaucuccgugcaguacaaucugagccacacauaugcuauugacgccgcuaaccauugcggcaccaucgccaaugggguccuccaaacauucaugcggauggcguggggaggcucuuacaucgcccuggauuccgggaagggaagcugggacuguauuaugaccucuuaccaguaucuuaucauucagaacacgacaugggaagaucacugccaguuuucccgccccagcccuaucggcuaccuggggcuccugucccaaagaacccgggacauuuauaucucucgcagacuucugggaacauucaccuggacccucagcgauuccgagggcaacgaaacacccggcggguacugucugacgcgguggaugcugaucgaggcugagcucaaaugcuuuggaaauaccgccguggcuaaguguaacgaaaaacaugacgaggaguucugcgauaugcugcgccuuuuugacuucaauaagcaggccauuagacggcugaaaacagaagcgcagaugagcauccagcucauuaacaaggccguuaaugcucugaucaacgaucaacuuauuaugaagaaucaucugcgcgacaucaugggcaucccuuauugcaacuacucuaaauauugguaccucaaucacaccgugacagggaagaccucccugcccagauguuggcuggucagcaacggaucuuaccucaaugaaacgcacuucagcgacgauauugagcagcaggccgacaacaugaucacagagcugcuucaaaaagaauauauggaucggcagggcaagaccccucuggggcucguggaccuguuuguguucuccaccucuuuuuaccugauuagcaucuuccuucaccucguccgcauuccgacacauagacacguuaucggaaaacccugcccuaagccccaucggcugaaucacaugggcauuuguuccugcggccuguauaaacacccuggggugcccgugaaguggaagcgcugaggacuaguuauaagacugacuagcccgaugggccucccaacgggcccuccuccccuccuugcaccgagauuaaucaaaggcucuuuucagagccaccaaaaaaaaaaaaaaaaaaaaaaaaaaaaaaaaaaaaaaaaaaaaaaaaaaaaaaaaaaaaaaaaagaauu

SEQ ID NO: 14997 - RNA, 1655 nt, Artificial Sequence
  mRNA product Design i-3 (hSL-A64-N5) comprising derived and/or modified sequence from LASV(Lassa virus/H.sapiens-wt/NGA/2018/ISTH_0959;Clade II)__AVV65099__GPC (opt5)
aggagaaagcuuaccaugggccagaucauuaccuucuuucaagaggugccccacgucaucgaagagguuaugaacauugugcugaucgcccucagccugcuugcuauucugaaggggaucuacaauguggucacaugcggacucuucggccugguguccuuucuucugcucugugggagaucuugcagcacgaccuauaaaggaguuuacgaacugcagacacuggagcucgacauggccucccugaacaugaccaugccucuuucuuguacaaagaauaacagccaucacuauaucauggugggcaaugaaaccgggcuggagcucacacugaccaacacguccauuaucaaucauaaauucugcaaccuuucugaugcgcacaagaaaaaucuguacgaccaugcucucaugagcauuaucuccaccuuucaccugagcauuccgaacuucaaucaguaugaggccaugucuugugauuuuaacggaggcaagaucuccguccaguacaaucugagccacgccuaugcuauugacgccgcuaaccauugcggcacaaucgccaauggggugcuccaaaccuucaugcggauggcguggggaggcucuuacaucgcccuggauuccgggaagggaagcugggacuguauuaugacaucuuaccaguaucuuaucauucagaacaccacgugggaagaucacugccaguuuucccgccccagcccuaucggcuaccuggggcuccugucccaaagaacacgggacauuuauaucucucgcagacuucugggaaccuucacauggacccucagcgauuccgagggcaacgaaacccccggcggguacugucugacacgguggaugcugaucgaggcugagcucaaaugcuuuggaaauacggccguugcuaaguguaacgaaaaacaugacgaggaguucugcgauaugcugcgccuuuuugacuucaauaagcaggccauuagacggcugaaaaccgaagcgcagaugagcauccagcucauuaacaaggccgugaaugcucugaucaacgaucaacuuauuaugaagaaucaucugcgcgacaucaugggcaucccuuauugcaacuacucuaaauauugguaccucaaucacacagucaccgggaagacaucccugcccagauguuggcuggugagcaacggaucuuaccucaaugaaacccacuucagcgacgauauugagcagcaggccgacaacaugaucacggagcugcuucaaaaagaauauauugaucggcagggcaagacaccucuggggcucguggaccuguuugucuucuccaccucuuuuuaccugaucagcauuuuccuucaccucguuaaaaucccgacccaucgccacgugauuggaaagcccugcccuaaaccccauagacugaaucacaugggcaucuguuccugcggccuguauaagcacccuggggugcccgucaaguggaaacggugaggacuaguuauaagacugacuagcccgaugggccucccaacgggcccuccuccccuccuugcaccgagauuaaucaaaggcucuuuucagagccaccaaaaaaaaaaaaaaaaaaaaaaaaaaaaaaaaaaaaaaaaaaaaaaaaaaaaaaaaaaaaaaaaagaauu

SEQ ID NO: 14998 - RNA, 1655 nt, Artificial Sequence
  mRNA product Design i-3 (hSL-A64-N5) comprising derived and/or modified sequence from LASV(LASV003-NIG-2008;Clade II)__AIT17580__GPC (opt5)
aggagaaagcuuaccaugggccagaucauuaccuucuuucaagaggugccccacgucaucgaagagguuaugaacauugugcugaucgcccucagccugcuugcuauucugaaggggaucuacaauguggccacaugcggacucuucggccuggucuccuuucuucugcucugugggagaucuugcagcacgaccuauaaaggaguguacgaacugcagacacuggagcucgacauggcgucccugaacaugaccaugccucuuucuuguacaaagaauaacagccaucacuauaucaugguuggcaaugaaaccgggcuggagcucacacugaccaacacguccauuaucaaucauaaauucugcaaccuuucugaugcucacaagaaaaaucuguacgaccaugcccucaugagcauuaucuccaccuuucaccugagcauuccgaacuucaaucaguaugaggccaugucuugugauuuuaacggaggcaagaucuccgugcaguacaaucugagccacacauaugcugucgacgccgcuaaccauugcggcaccauugccaauggggugcuccaaacauucaugcggauggcguggggaggcucuuacaucgcccuggauuccgggaagggaagcugggacuguaucaugaccucuuaccaguaucuuauuauccagaacacgacaugggaagaucacugccaguuuucccgccccagcccuauuggcuaccuggggcuccugucccaaagaacccgggacaucuauauuucucgcagacuucugggaacauucaccuggacccucagcgauuccgagagcaacgaaacacccggcggcuacugucugacgcgguggaugcugaucgaggcugagcucaaaugcuuugggaauaccgccguugcuaaguguaacgaaaaacaugacgaggaguucugcgauaugcugcgccuuuuugacuucaauaagcaggccaucagacggcugaaagcggaagcccagaugucuauucagcucaucaacaaggcugugaaugcccugauuaacgaucaacuuaucaugaagaaucaucugcgcgacauuaugggaaucccuuauugcaacuacuccaaauauugguaccucaaucacacagucaccggcagaacaagccugccccgguguuggcuggugucuaacgggagcuaccucaaugaaacccacuucuccgacgauaucgagcagcaggcugacaacaugauuacggagcugcuucaaaaggaauauauggaucgccagggaaaaacaccucugggccucguggaccuguuugucuucucuaccagcuuuuaccugaucuccauuuuccuucaccucguuaagaucccgacccauagacacgugauugggaaacccugcccuaagccccaucggcugaaucacaugggaaucuguagcugcggccuguauaaacacccuggcgugcccgucaaguggaagcgcugaggacuaguuauaagacugacuagcccgaugggccucccaacgggcccuccuccccuccuugcaccgagauuaaucaaaggcucuuuucagagccaccaaaaaaaaaaaaaaaaaaaaaaaaaaaaaaaaaaaaaaaaaaaaaaaaaaaaaaaaaaaaaaaaagaauu

SEQ ID NO: 14999 - RNA, 1655 nt, Artificial Sequence
  mRNA product Design i-3 (hSL-A64-N5) comprising derived and/or modified sequence from LASV(LASV035-NIG-2009;Clade II)__AIT17588__GPC (opt5)
aggagaaagcuuaccaugggccagaucauuaccuucuuucaagaggugccccacgucaucgaagagguuaugaacauugugcugaucgcccucagccugcuugcuauucugaaggggaucuacaauguggccacaugcggacucuucggccuggucuccuuucuucugcucugugggagaucuugcagcacgaccuauaaaggaguguacgaacugcagacacuggagcucgacauggcgucccugaacaugaccaugccucuuucuuguacaaagaauaacagccaucacuauaucaugguuggcaaugaaaccgggcuggagcucacacugaccaacacguccauuaucaaucauaaauucugcaaccuuucugaugcucacaagaaaaaucuguacgaccaugcccucaugagcauuaucuccaccuuucaccugagcauuccgaacuucaaucaguaugaggccaugucuugugauuuuaacggaggcaagaucuccgugcaguacaaucugagccacgcuuaugccgucgacgcugccaaccauugcggcacaauugcgaauggggugcuccaaaccuucaugcggauggccuggggaggcucuuacaucgcucuggauuccgggaagggaagcugggacuguaucaugacaucuuaccaguaucuuauuauccagaacaccacgugggaagaucacugccaguuuucccgccccagcccuauuggcuaccuggggcuccugucccaaagaacacgggacaucuauauuucucgcagacuucugggaaccuucacauggacccucagcgauuccgagggcaacgaaacccccggcggguacugucugacacgguggaugcugaucgaggccgagcucaaaugcuuuggaaauacggcuguugccaaguguaacgaaaaacaugacgaggaguucugcgauaugcugcgccuuuuugacuucaauaagcaggcgaucagacggcugaaagccgaagcucagaugagcauucagcucaucaacaaggccgugaaugcucugauuaacgaucaacuuaucaugaagaaucaucugcgcgacauuaugggcaucccuuauugcaacuacucuaaauauugguaccucaaucacaccgucacagggaagaccucccugcccagauguuggcuggugagcaacggaucuuaccucaaugaaacacacuucagcgacgauaucgagcagcaggccgacaacaugauuaccgagcugcuucaaaaagaauauaucgaucggcagggcaagacgccucuggggcucguggaccuguuugucuucuccacaucuuuuuaccugauuagcaucuuccuucaccucguuaaaauuccgacccaucgccacgugaucggaaagcccugcccuaaaccccauagacugaaucacaugggcauuuguuccugcggccuguauaagcacccuggggugcccgucaaguggaaacggugaggacuaguuauaagacugacuagcccgaugggccucccaacgggcccuccuccccuccuugcaccgagauuaaucaaaggcucuuuucagagccaccaaaaaaaaaaaaaaaaaaaaaaaaaaaaaaaaaaaaaaaaaaaaaaaaaaaaaaaaaaaaaaaaagaauu

SEQ ID NO: 15000 - RNA, 1655 nt, Artificial Sequence
  mRNA product Design i-3 (hSL-A64-N5) comprising derived and/or modified sequence from LASV(LASV1000-NIG-2009;Clade II)__AIT17782__GPC (opt5)
aggagaaagcuuaccaugggccagaucauuaccuucuuucaagaggugccccacgucaucgaagagguuaugaacauugugcugaucgcccucagccugcuugcuauucugaaggggaucuacaauguggccacaugcggacucuucggccuggucuccuuucuucugcucugugggagaucuugcagcacgaccuauaaaggaguguacgaacugcagacacuggagcucgacauggcgucccugaacaugaccaugccucuuucuuguacaaagaauaacagccaucacuauaucaugguuggcaaugaaaccgggcuggagcucacacugaccaacacguccauuaucaaucauaaauucugcaaccuuucugaugcucacaagaaaaaucuguacgaccaugcccucaugagcauuaucuccaccuuucaccugagcauuccgaacuucaaucaguaugaggccaugucuugugauuuuaacggaggcaagaucuccgugcaguacaaucugagccacacauaugcugucgacgccgcuaaccauugcggcaccauugccaauggggugcuccaaacauucaugcggauggcguggggaggcucuuacaucgcccuggauuccgggaagggaagcugggacuguaucaugaccucuuaccaguaucuuauuauccagaacacgacaugggaagaucacugccaguuuucccgccccagcccuauuggcuaccuggggcuccugucccaaagaacccgggacaucuauauuucucgcagacuucugggaacauucaccuggacccucagcgauuccgagggcaacgaaacacccggcggguacugucugacgcgguggaugcugaucgaggcugagcucaaaugcuuuggaaauaccgccguugcuaaguguaacgaaaaacaugacgaggaguucugcgauaugcugcgccuuuuugacuucaauaagcaggccaucaaaagacugaagacagaagcgcagaugagcauucagcucaucaacaaggccgugaaugcucugauuaacgaucaacuuaucaugaaaaaucaucugcgggacauuaugggcaucccuuauugcaacuacucuaaguauugguaccucaaucacaccgucacagggaaaaccucccugccccgcuguuggcuggugagcaacggaucuuaccucaaugaaacgcacuucagcgacgauaucgagcagcaggccgacaacaugauuacagagcugcuucaaaaggaauauaucgauagacagggcaaaaccccucuggggcucguggaccuguuugucuucuccaccucuuuuuaccugauuagcaucuuccuucaccucguuaagauuccgacacaucggcacguggugggaaaacccugcccuaagccccaucgccugaaucacaugggcaucuguuccugcggccuguauaagcacccugggguccccgugaaauggaagagaugaggacuaguuauaagacugacuagcccgaugggccucccaacgggcccuccuccccuccuugcaccgagauuaaucaaaggcucuuuucagagccaccaaaaaaaaaaaaaaaaaaaaaaaaaaaaaaaaaaaaaaaaaaaaaaaaaaaaaaaaaaaaaaaaagaauu

SEQ ID NO: 15001 - RNA, 1655 nt, Artificial Sequence
  mRNA product Design i-3 (hSL-A64-N5) comprising derived and/or modified sequence from LASV(LASV221-NIG-2010;Clade II)__AIT17624__GPC (opt5)
aggagaaagcuuaccaugggccagaucauuaccuucuuucaagaggugccccacgucaucgaagagguuaugaacauugugcugaucgcccucagccugcuugcuauucugaaggggaucuacaauguggccacaugcggacucuucggccuggucuccuuucuucugcucugugggagaucuugcagcacgaccuauaaaggaguguacgaacugcagacacuggagcucgacauggcgucccugaacaugaccaugccucuuucuuguacaaagaauaacagccaucacuauaucaugguuggcaaugaaaccgggcuggagcucacacugaccaacacguccauuaucaaucauaaauucugcaaccuuucugaugcucacaagaaaaaucuguacgaccaugcccucaugagcauuaucuccaccuuucaccugagcauuccgaacuucaaucaguaugaggccaugucuugugauuuuaacggaggcaagaucuccgugcaguacaaucugagccacacauaugcuauugacgccgcuaaccauugcggcaccaucgccaaugggguccuccaaacauucaugcggauggcguggggaggcucuuacaucgcccuggauuccgggaagggaagcugggacuguauuaugaccucuuaccaguaucuuaucauucagaacacgacaugggaagaucacugccaguuuucccgccccagcccuaucggcuaccuggggcuccugucccaaagaacccgggacauuuauaucucucgcagacuucugggaacauucaccuggacccucagcgauuccgagggcaacgaaacacccggcggguacugucugacgcgguggaugcugaucgaggcugagcucaaaugcuuuggaaauaccgccguggcuaaguguaacgaaaaacaugacgaggaguucugcgauaugcugcgccuuuuugacuucaauaagcaggccauuagacggcugaaaacagaagcgcagaugagcauccagcucauuaacaaggccguuaaugcucugaucaacgaucaacuuauuaugaagaaucaucugcgcgacaucaugggcaucccuuauugcaacuacucuaaauauugguaccucaaucacaccgugacagggaagaccucccugcccagauguuggcuggucagcaacggaucuuaccucaaugaaacgcacuucagcgacgauauugagcagcaggccgacaacaugaucacagagaugcugcaaaaagaauauauggaucggcagggcaagaccccucuugggcugguggaccucuuuguguucuccaccucuuuuuaccugauuagcaucuuccugcaccuugucaaaauuccgacacaucgccacguuaucggaaagcccugcccuaaaccccauagacucaaucacaugggcauuuguuccugcggccuguauaagcacccuggggugcccgugaaguggaaacggugaggacuaguuauaagacugacuagcccgaugggccucccaacgggcccuccuccccuccuugcaccgagauuaaucaaaggcucuuuucagagccaccaaaaaaaaaaaaaaaaaaaaaaaaaaaaaaaaaaaaaaaaaaaaaaaaaaaaaaaaaaaaaaaaagaauu

SEQ ID NO: 15002 - RNA, 1655 nt, Artificial Sequence
  mRNA product Design i-3 (hSL-A64-N5) comprising derived and/or modified sequence from LASV(LASV237-NIG-2010;Clade II)__AIT17638__GPC (opt5)
aggagaaagcuuaccaugggccagaucauuaccuucuuucaagaggugccccacgucaucgaagagguuaugaacauugugcugaucgcccucagccugcuugcuauucugaaggggaucuacaauguggccacaugcggacucuucggccuggucuccuuucuucugcucugugggagaucuugcagcacgaccuauaaaggaguguacgaacugcagacacuggagcucgacauggcgucccugaacaugaccaugccucuuucuuguacaaagaauaacagccaucacuauaucaugguuggcaaugaaaccgggcuggagcucacacugaccaacacguccauuaucaaucauaaauucugcaaccuuucugaugcucacaagaaagaccuguacgaucaugcccucaugagcauuaucuccaccuuucaccugagcauuccgaauuucaaccaguaugaggccaugucuugugacuuuaauggaggcaagaucuccgugcaguacaaccugagccacacauaugcugucgaugccgcuaaucauugcggcaccauugccaacggggugcuccaaacauucaugcggauggcguggggaggcucuuacaucgcccuggacuccgggaagggaagcugggauuguaucaugaccucuuaccaguaucuuauuauccagaauacgacaugggaagaccacugccaguuuucccgccccagcccuauuggcuaccuggggcuccugucccaaagaacccgggauaucuauauuucucgcagacuucugggaacauucaccuggacccucagcgacuccgagggcaacgaaacacccggcggguacugucugacgcgguggaugcugaucgaggcugagcucaaaugcuuuggaaacaccgccguugcuaaguguaaugaaaaacaugaugaggaguucugcgacaugcugcgccuuuuugauuucaacaagcaggccaucagacggcugaaaacagaagcgcagaugagcauucagcucaucaauaaggccgugaacgcucugauuaaugaccaacuuaucaugaagaaccaucugcgcgacauuaugggcaucccuuauugcaauuacucuaaauauugguaccucaaccacaccgucacagggaagaccucccugcccagauguuggcuggugagcaauggaucuuaccucaacgaaacgcacuucagcgaugacaucgagcagcaggccgauaauaugauuacagagcugcuucaaaaagaauauauggaccggcagggcaagaccccucuggggcucguggaucuguuugucuucuccaccucuuuuuaccugaucagcauuuuccuucaccucaucaaaauuccgacacaucgccacaucaccggaaagcccugcccuaaaccccauagacugaaccacaugggcauuuguuccugcggccuguauaagcacccugggguucccgugaaguggaaacggugaggacuaguuauaagacugacuagcccgaugggccucccaacgggcccuccuccccuccuugcaccgagauuaaucaaaggcucuuuucagagccaccaaaaaaaaaaaaaaaaaaaaaaaaaaaaaaaaaaaaaaaaaaaaaaaaaaaaaaaaaaaaaaaaagaauu

SEQ ID NO: 15003 - RNA, 1655 nt, Artificial Sequence
  mRNA product Design i-3 (hSL-A64-N5) comprising derived and/or modified sequence from LASV(LASV253-NIG-2011;Clade II)__AIT17670__GPC (opt5)
aggagaaagcuuaccaugggccagaucauuaccuucuuucaagaggugccccacgucaucgaagagguuaugaacauugugcugaucgcccucagccugcuugcuauucugaaggggaucuacaauguggccacaugcggacucuucggccuggucuccuuucuucugcucugugggagaucuugcagcacgaccuauaaaggaguguacgaacugcagacacuggagcucgacauggcgucccugaacaugaccaugccucuuucuuguacaaagaauaacagccaucacuauaucaugguuggcaaugaaaccgggcuggagcucacacugaccaacacguccauuaucaaucauaaauucugcaaccuuucugaugcucacaagaaaaaucuguacgaccaugcccucaugagcauuaucuccaccuuucaccugagcauuccgaacuucaaucaguaugaggccaugucuugugauuuuaacggaggcaagaucuccgugcaguacaaucugagccacacauaugcugucgacgccgcuaaccauugcggcaccauugccaauggggugcuccaaacauucaugcggauggcguggggaggcucuuacaucgcccuggauuccgggaagggaagcugggacuguaucaugaccucuuaccaguaucuuauuauccagaacacgacaugggaagaucacugccaguuuucccgccccagcccuauuggcuaccuggggcuccugucccaaagaacccgggacaucuauauuucucgcagacuucugggaacauucaccuggacccucagcgauuccgagggcaacgaaacacccggcggguacugucugacgcgguggaugcugaucgaggcugagcucaaaugcuuuggaaauaccgccguugcuaaguguaacgaaaaacaugacgaggaguucugcgauaugcugcgccuuuuugacuucaauaagcaggccaucagacggcugaaagcggaagcccagaugagcauucagcucaucaacaaggcugugaaugcccugauuaacgaucaacuuaucaugaagaaucaucugcgcgacauuaugggcaucccuuauugcaacuacucuaaauauugguaccucaaucacacagucaccgggagaacaucccugccccgguguuggcuggugagcaacggaucuuaccucaaugaaacccacuucagcgacgauaucgagcagcaggcugacaacaugauuacggagcugcuucaaaaggaauauaucgaucgccagggcaaaacaccucuggggcucguggaccuguuugucuucuccaccucuuuuuaccugauuagcaucuuccuucaccucguuaagauuccgacccauagacacaucauuggaaaacccugcccuaagccccaucggcugaaucacaugggcaucuguuccugcggccuguauaaacacccuggggugcccgugaaguggaagcgcugaggacuaguuauaagacugacuagcccgaugggccucccaacgggcccuccuccccuccuugcaccgagauuaaucaaaggcucuuuucagagccaccaaaaaaaaaaaaaaaaaaaaaaaaaaaaaaaaaaaaaaaaaaaaaaaaaaaaaaaaaaaaaaaaagaauu

SEQ ID NO: 15004 - RNA, 1655 nt, Artificial Sequence
  mRNA product Design i-3 (hSL-A64-N5) comprising derived and/or modified sequence from LASV(LASV254-NIG-2011;Clade II)__AIT17674__GPC (opt5)
aggagaaagcuuaccaugggccagaucauuaccuucuuucaagaggugccccacgucaucgaagagguuaugaacauugugcugaucgcccucagccugcuugcuauucugaaggggaucuacaauguggccacaugcggacucuucggccuggucuccuuucuucugcucugugggagaucuugcagcacgaccuauaaaggaguguacgaacugcagacacuggagcucgacaugaccaaccugaauaugacaaugccucuuuccuguaccaagaacaauucucaucacuauaucaugguuggcaacgaaacagggcuggagcucacccugacgaauaccagcauuaucaaccauaaauucugcaaucuuuccgaugcgcacaagaaaaaccuguacaaucaugcucucaugucuauuaucagcacauuucaccuguccauuccgaacuucaaucaguaugaggccaugagcugugacuuuaacggaggcaagaucucugugcaguacaaucugucccacagcuaugccgucgaugcugccaaccauugcggcaccauugcuaacggggugcuccaaacauucaugcggauggccuggggaggcucuuacaucgcgcuggacuccgggaagggaaauugggauuguaucaugaccagcuaccaguaucuuauuauccagaacacgacaugggaagaccacugccaguuuucucgccccuccccuauuggcuaccuggggcuccugagccaaagaacccgggauaucuauauuucccgcagacuucugggaacauucaccuggacccucucugacagcgagggcaaugaaacacccggcggguacugucugacgcgguggaugcugaucgaggccgagcucaaaugcuuuggaaacaccgcuguugccaaguguaaugaaaaacaugaugaggaguucugcgacaugcugcgccuuuuugauuucaacaagcaggcuaucagacggcugaaaacagaagcccaggcgaauauucagcucaucaacaaggccgugaaugcucugauuaacgaccaacuuaucaugaagaaucaucugcgcgauauuaugggcaucccuuauugcaacuacuccaaauauugguaccucaaucacaccgucacagggaagaccagccugcccagauguuggcuggugucuaacggauccuaccucaaugaaacgcacuucagcgacgacaucgagcagcaggccgauaacaugauuacagagcugcuucaaaaagaauauauggaccggcagggcaagaccccucuggggcucguggaucuguuugucuucucuaccagcuuuuaccugaucuccauuuuccuucaccucguuaaaaucccgacacaucgccacgugauuggaaagcccugcccuaaaccccauagacugaaccacaugggcaucuguucuugcggccuguauaagcacccuggggugcccgucaaguggaaacggugaggacuaguuauaagacugacuagcccgaugggccucccaacgggcccuccuccccuccuugcaccgagauuaaucaaaggcucuuuucagagccaccaaaaaaaaaaaaaaaaaaaaaaaaaaaaaaaaaaaaaaaaaaaaaaaaaaaaaaaaaaaaaaaaagaauu

SEQ ID NO: 15005 - RNA, 1655 nt, Artificial Sequence
  mRNA product Design i-3 (hSL-A64-N5) comprising derived and/or modified sequence from LASV(Nig08-A19;Clade III)__ADU56618__GPC (opt5)
aggagaaagcuuaccaugggccagaucgugaccuucuuucaagaggucccccacguuauugaagaggugaugaacaucgugcugauugcccucagcauccuggcuauucuuaaggggcuguacaauaucgccacaugcggacucaucggccuggucacguuccuucugcucuccgggagaucuuguagcaugaccuauaaaggaguguacgaacugcagacacuggagcucaacaugaauacccugaacaugacaaugccucuuuccugcaccaagaauaacucucaucacuauauuaugguuggcaaugaaacagggcuggagcucacccugacgaacaccagccuucugcaucacaaauuuuguaaucucuccgacgcgcauaagaaaaaccuguacgaucacacacugaugucuaucauuagcaccuuccaccucuccaucccgaauuuuaaccaguaugaggcuaugagcugcgacuucaauggaggcaagauuacagugcaguacaaccugucucauuccuaugccaucgaugccgcuaaucacuguggcaccgucgccaacggggugcuucaaacguuuaugcggauggcuuggggaggcagcuacauugcccuggacucugggcgcggaaagugggauugcaucaugacauccuaccaguaucucaucauucagaacaccacaugggaagaccauugucaguucagcagacccucuccuaucggcuaccuggggcuucugucccaacggacccgcgauauuuauaucagcagacggcuccugggaaccuuuacauggacgcuguccgacucugagggcaaugaaacccccggcggguacugccucacacgcuggaugcugauugaggcggagcuuaaauguuucggaaacaccgccguugcuaagugcaaugaaaaacacgaugaggaauuuugugacaugcugagacucuucgauuuuaacaagcaggccauccggcgccugaaagcugaggcccagaugagcauccagcuuauuaauaaggcggugaacgcccugaucaaugaccaacucauuaugaagaaccaccugagagauaucaugggcauuccuuauugcaauuacuccaaauauugguaccugaaccauacaagcaccgggcggacgucucucccccgcugcuggcuggucuccaauggaagcuaccuuaacgaaacacacuucucugacgacaucgagcagcaggcugauaauaugaucaccgagaugcugcaaaaggaauaucucgacagacagggcaaaaccccucuggggcugguggaucuuuucguguuuagcacauccuucuaccucauuucuaucuuucugcaucuggucaagauuccgacccaccggcauaucguuggaaaacccuguccuaagccccaccgccucaaccacaugggcauuugcagcuguggccuguauaaacagccuggggugcccgugagauggaagcggugaggacuaguuauaagacugacuagcccgaugggccucccaacgggcccuccuccccuccuugcaccgagauuaaucaaaggcucuuuucagagccaccaaaaaaaaaaaaaaaaaaaaaaaaaaaaaaaaaaaaaaaaaaaaaaaaaaaaaaaaaaaaaaaaagaauu

SEQ ID NO: 15006 - RNA, 1658 nt, Artificial Sequence
  mRNA product Design i-3 (hSL-A64-N5) comprising derived and/or modified sequence from LASV(G1180-SLE-2010;Clade IV)__AIT17168__GPC (opt5)
aggagaaagcuuaccaugggccagaucgugaccuucuuucaagaggucccccacguuauugaagaggugaugaacaucgugcugauugcccucagcauccuggcuguccuuaaggggcuguacaauuucgccacaugcggacucgugggccugcuuacguuucugcuccugugugggagauccugcaccgcgucucgguauaaaggaguuuacgaacugcagacacucgagcugaacauggaaacccuuaauaugacaaugccucugagcuguaccaagaacaauucccaucacuauauuauggugggcaacgagacagggcucgagcugacccuuacgaauaccucuaucaucaaccauaaauucugcaaucugagcgacgcucacaagaaaaaccucuacgaucaugcccugauguccauuaucucuacauuucaccugagcauuccgaauuucaaccaguaugaagccauguccugugacuuuaauggaggcaagaucagcguccaguacaaccucucucacuccuaugcuggcgaugccgcuaaucauugcgggaccguggccaacggaguucugcaaacauucaugcgcauggcguggggcgggagcuacauugcccuugacucuggacacggcuccugggauuguaucaugaccagcuaccaguaucugauuauccagaacacgacaugggaggaccauugccaguuuucuagacccuccccuaucggguaccucggacugcuuagccaacggacccgcgauauuuauaucuccagacggcugcucggcacauucaccuggacccugucugacagcgaaggcaaggauacacccgggggauacugucugacgcgcuggaugcucauugaggcugagcugaaaugcuuuggcaauaccgccguggcuaaguguaacgaaaaacacgacgaggaguucugcgauaugcuuagacuguuugacuucaauaagcaggccauccagcggcucaaagcggaagcccagauguccauucaacugaucaacaaggcugucaaugcccuuaucaacgaucagcugauuaugaagaaucaccuccgcgacaucauggggauuccuuauugcaacuacagcaaauauugguaccugaaucauacaaccacaggaaagaccucucugcccaaauguuggcucguguccaacggcagcuaccugaaugaaacgcacuucucugacgauaucgagcagcaagcugacaacaugauuacagagaugcuucagaaggaauauauggagagacaggggaaaaccccucugggacucguggaucuguuugucuucagcaccuccuuuuaccugaucucuaucuuccuucaucucguuaagauuccgacacaccggcauaucgugggcaaaagcugccccaagccucaccgccugaaucacaugggcauuuguuccugcgggcuguauaagcagcccggagugccugucaaauggaagagaugaggacuaguuauaagacugacuagcccgaugggccucccaacgggcccuccuccccuccuugcaccgagauuaaucaaaggcucuuuucagagccaccaaaaaaaaaaaaaaaaaaaaaaaaaaaaaaaaaaaaaaaaaaaaaaaaaaaaaaaaaaaaaaaaagaauu

SEQ ID NO: 15007 - RNA, 1658 nt, Artificial Sequence
  mRNA product Design i-3 (hSL-A64-N5) comprising derived and/or modified sequence from LASV(G1442-SLE-2011;Clade IV)__AIT17180__GPC (opt5)
aggagaaagcuuaccaugggccagaucgugaccuucuuucaagaggucccccacguuauugaagaggugaugaacaucgugcugauugcccucagcauccuggcuguccuuaaggggcuguacaauguggccacaugcggacucauuggccugguuacguuccuucugcucugugggagauccugcaccacaacccuguauaaaggaguguacgaacugcagacacucgagcugaacauggaaacccuuaauaugacaaugccucugucuuguaccaagaacaauagccaucacuauauccgggucggcaacgagacggggcucgagcugacccuuacaaauaccuccaucauuaaccauaaauuuugcaaucugucugacgcgcacaagaaaaaccucuacgaucaugcucugaugagcaucauuuccacauuccaccugucuaucccgaauuuuaaccaguaugaagccaugagcugugacuucaauggaggcaagauuuccgugcaguacaaccucagccacucuuaugccggcgaugcugccaaucauugcgggaccguugcuaacggagugcugcaaacguuuaugcgcauggccuggggcggguccuacaucgcgcuugacagcggaagaggcaacugggauuguauuaugacaucuuaccaguaucugaucauccagaauaccacaugggacgaucacugccaguucucccggcccagcccuauuggguaccucggacugcuuucucaacgcaccagagacgucuauaucucccggcgccugcucggcaccuuuacauggacgcugagcgauuccgagggcaaggacacccccgggggauacugucugacaagauggaugcucauugaagccgagcugaaaugcuucggcaacaccgcuguggccaaguguaaugagaaacaugaugaagaguuuugcgacaugcuucggcuguucgauuuuaacaagcaggcuauccagcgccucaaagccgaagcgcagaugucuauucaacugaucaauaaggccgugaacgcucuuaucaaugaccagcugauuaugaagaaccaccucagagacaucauggggauuccuuauugcaauuacagcaaauauugguaccugaacaauacagccaccggaaagacgucccugcccaaauguuggcucaucagcaacggcucuuaccugaaugagacacacuucuccgaugacauugaacaggaggcugauaacaugaucaccgagaugcuucaaaaggaauauauggagcggcaggggaaaaccccucugggacucgucgaccuguucguuuuuagcacaucuuucuaccugaucagcauuuuucuucaucucgugaagaucccgacccaccgccauauugugggcaaauccugccccaagccucacagacugaaucauaugggcaucuguucuugcgggcuguauaagcagcccggagucccugugcgguggaaacgcugaggacuaguuauaagacugacuagcccgaugggccucccaacgggcccuccuccccuccuugcaccgagauuaaucaaaggcucuuuucagagccaccaaaaaaaaaaaaaaaaaaaaaaaaaaaaaaaaaaaaaaaaaaaaaaaaaaaaaaaaaaaaaaaaagaauu

SEQ ID NO: 15008 - RNA, 1658 nt, Artificial Sequence
  mRNA product Design i-3 (hSL-A64-N5) comprising derived and/or modified sequence from LASV(G3010-SLE-2013;Clade IV)__AIT17344__GPC (opt5)
aggagaaagcuuaccaugggccagaucgugaccuucuuucaagaggucccccacguuauugaagaggugaugaacaucgugcugauugcccucagcauccuggcuguccuuaaggggcuguacaauuucgccacaugcggacucgugggccugguuacguuucuucugcucugugggagauccugcaccacaucucuguauaaaggaguguacgaacugcagacccucgagcugaacauggaaacacuuaauaugaccaugccucugagcuguacaaagaacaauucccaucacuauauuauggucggcaacgagaccgggcucgagcugacgcuuaccaauacaucuaucaucaaccauaaauucugcaaucugagcgacgcgcacaagaaaaaccucuacaaucaugcucugauguccauuaucucuaccuuucaccugagcauuccgaacuucaaucaguaugaagccauguccugugauuuuaacggaggcaagaucagcgugcaguacaaucucucucacuccuaugccggcgacgcugccagccauugcgggacaguugcuaacggagugcugcaaaccuucaugcggauggccuggggcgggucuuacauugcgcuugauuccggauacggcaagugggacuguaucaugacgagcuaucaguaccugauuauccagaacacaaccugggaggaucacugccaguuuucucgccccuccccuaucggguaucucggacugcuuagccaaagaacacgggacauuuacaucucccgcagacugcucggcaccuucaccuggacacugucugauagcgaaggcaaagacacgcccgggggauauugucugacccgguggaugcucauugaggccgagcugaagugcuuuggcaauacagcugucgccaaauguaacgaaaagcaugaugaggaguucugcgacaugcuucgccuguuugauuucaauaaacaggcuauccagagacucaagaccgaagcccagauguccauucaacugaucaacaaggcggugaaugcccuuaucaacgaccagcugauuaugaaaaaucaccuccgggauaucauggggauuccuuacugcaacuauagcaaguacugguaccugaaucacacaaccacgggaaaaacaucucugcccaaguguuggcucguguccaacggcagcuaucugaaugaaacccauuucucugacgacaucgagcagcaagcugauaacaugauuaccgagaugcuucagaaagaauacauggagcgccaggggaagacaccucugggacucgucgaccuguuuguuuucagcaccuccuuuuaucugaucucuaucuuccuucaccucgugaaaauuccgacacauagacacaucgugggcaagagcugccccaagccucaucggcugaaucacaugggcauuuguuccugcgggcuguacaaacagcccggagucccugugcgcuggaagagaugaggacuaguuauaagacugacuagcccgaugggccucccaacgggcccuccuccccuccuugcaccgagauuaaucaaaggcucuuuucagagccaccaaaaaaaaaaaaaaaaaaaaaaaaaaaaaaaaaaaaaaaaaaaaaaaaaaaaaaaaaaaaaaaaagaauu

SEQ ID NO: 15009 - RNA, 1658 nt, Artificial Sequence
  mRNA product Design i-3 (hSL-A64-N5) comprising derived and/or modified sequence from LASV(G502-SLE-2009;Clade IV)__AIT17126__GPC (opt5)
aggagaaagcuuaccaugggccagaucgugaccuucuuucaagaggucccccacguuauugaagaggugaugaacaucgugcugauugcccucagcauccuggcuguccuuaaggggcuguacaauuucgccacaugcggacucgugggccugcuuacguuucugcuccugugugggagauccugcaccacaggacuguauaaaggcguuuacgaacuccagacccuggagcuuaacauggaaacacugaauaugaccaugccucucucuuguacaaagaacaauagccaucacuauauuaugguggggaacgagaccggacuggagcuuacgcugaccaauacauccaucaucaaccauaaauucugcaaucucucugacgcgcacaagaaaaaccuguacgaucaugcucugaugagcauuaucuccaccuuucaccucucuauuccgaauuucaaccaguaugaagccaugagcugugacuuuaauggcggcaagaucuccguccaguacaaccugagccacucuuaugccggggaugcugccgaccauugcggaacaguggcuaauggcguucuucaaaccuucaugcggauggccuggggaggguccuacauugcgcuggauagcggccgcgggagaugggacuguaucaugacgucuuaccaguaucucauuauccagaacacaaccugggaggaucacugccaguuuucccggcccagcccuaucggauaccugggccuucugucucaacgcacaagagacauuuauaucucccggcgccuccugggcaccuucaccuggacacugagcgauuccgaagggaaggacacgcccggaggcuacugucucaccagauggaugcugauugaggccgagcuuaaaugcuuugggaacacagcuguggccaaguguaaugaaaaacaugaugaggaguucugcgacaugcugcggcucuuugauuucaacaagcaggcuauccagcgccugaaagccgaagcgcagaugucuauucaacuuaucaauaaggccgucaacgcucugaucaaugaccagcucgugaugaagaaccaccugagagacauuaugggaaucccuuauugcaauuacagccgguauugguaccugaaccacaccacaaccggccgcacgucccuccccaaauguuggcuggugagcaaugggucuuaccuuaacgaaacacauuucuccgaugacauugagcagcaagccgauaauaugaucaccgagaugcugcagaaggaauauauggagagacagggaaaaaccccucucggccuggucgaccuguuuguuuucagcacaucuuuuuaccuuauuagcaucuuccuccaccuggugaagaucccgacccaucggcacauugugggcaaauccugccccaagccucaucgccugaaccacauggggaucuguucuugcggacucuauaaacagcccggcgucccugugaaguggaagagaugaggacuaguuauaagacugacuagcccgaugggccucccaacgggcccuccuccccuccuugcaccgagauuaaucaaaggcucuuuucagagccaccaaaaaaaaaaaaaaaaaaaaaaaaaaaaaaaaaaaaaaaaaaaaaaaaaaaaaaaaaaaaaaaaagaauu

SEQ ID NO: 15010 - RNA, 1658 nt, Artificial Sequence
  mRNA product Design i-3 (hSL-A64-N5) comprising derived and/or modified sequence from LASV(G733-SLE-2010;Clade IV)__AIT17154__GPC (opt5)
aggagaaagcuuaccaugggccagaucgugaccuucuuucaagaggucccccacguuauugaagaggugaugaacaucgugcugauugcccucagcauccuggcuguccuuaaggggcuguacaauuucgccacaugcggaauugugggccucguuuccuuucugcuucugugugggagaucuugcacgaccagccucuauaaaggaguguacgaacugcagacacuggagcucaacauggaaacccugaauaugacaaugccucuuuccuguaccaagaacaauucucaucacuauaucauggucggcaacgagacagggcuggagcucacccugacgaauaccagcaucauuaaccauaaauucugcaaucuuuccgacgcgcacaagaaaaaccuguacgaucaugcucucaugucuaucauuagcacauuucaccuguccaucccgaauuucaaccaguaugaagccaugagcugugacuuuaauggaggcaagauuucugugcaguacaaccugucccacagcuaugccggcgaugcugccaaucauugcgggaccaucgcuaacggaguucuccaaacauucaugcggauggccuggggcgggucuuacauugcgcuggacuccggacgcgauagaugggacuguaucaugaccagcuaccaguaucuuaucauucagaacacgacaugggaggaucacugccaguuuucucggcccuccccuaucggcuaccuggggcuccugagccaacgcaccagagacauuuauaucucccggcgccuucugggaacauucaccuggacccucucugauagcgaaggcaaggacacacccggcggguacugucugacgagauggaugcugauugaggccgagcucaaaugcuuuggaaauaccgcuguggccaaguguaacgaaaaacaugaugaggaguucugcgacaugcugcggcuuuuugauuucaauaagcaggcuauccagcgccugaaagccgaagcgcagauguccauccaacucauuaacaaggccgucaaugcucugaucaacgaccagcuuauuaugaagaaucaccugagagacaucaugggcauuccuuauugcaacuacagcaaauauugguaccucaaucacacaaccacagggaagaccucucugcccaaauguuggcugguguccaacggaagcuaccucaaugaaacgcauuucucugaugacaucgagcagcaagccgauaacaugaucacagagaugcugcagaaggaauauauggagcggcagggcaaaaccccucuugggcugguggaccucuuugucuucagcaccuccuuuuaccugauuucuaucuuccugcaccuuguuaagauuccgacacaucgccacguggugggaaaaagcugccccaagccucauagacucaaucacaugggcaucuguuccugcggccuguaugggcagcccggagucccugugaaguggaaacggugaggacuaguuauaagacugacuagcccgaugggccucccaacgggcccuccuccccuccuugcaccgagauuaaucaaaggcucuuuucagagccaccaaaaaaaaaaaaaaaaaaaaaaaaaaaaaaaaaaaaaaaaaaaaaaaaaaaaaaaaaaaaaaaaagaauu

SEQ ID NO: 15011 - RNA, 1658 nt, Artificial Sequence
  mRNA product Design i-3 (hSL-A64-N5) comprising derived and/or modified sequence from MOPV/LASV reassortant(IGS-1;Clade IV)__AFY05576__GPC (opt5)
aggagaaagcuuaccaugggccagaucgugaccuucuuucaagaggucccccacguuauugaagaggugaugaacaucgugcugauugcccucagcguccuggcugugcuuaaggggcuguacaauuucgccacaugcggacucguuggccuggugacguuucuucugcucugugggagauccugcaccacaucucuguauaaaggagucuacgaacugcagacccucgagcugaacauggaaacacuuaauaugaccaugccucugagcuguacaaagaacaauucccaucacuauaucauggugggcaacgagaccgggcucgagcugacgcuuaccaauacaucuauuaucaaccauaaauucugcaaucugagcgacgcgcacaagaaaaaccucuacgaucaugcucugauguccaucauuucuaccuuucaccugagcaucccgaauuucaaccaguaugaagccauguccugugacuuuaauggaggcaagauuagcguucaguacaaccucucucacuccuaugccggcgaugcugccaaucauugcgggacaguggcuaacggaguccugcaaaccuucaugcggauggccuggggcgggagcuacaucgcgcuugacucuggacgcggcaacugggauuguauuaugacguccuaccaguaucugaucauucagaauacaaccugggaggaccacugccaguuuagcagacccucuccuaucggguaccucggacugcuuucccaacggacacgcgauaucuauauuagcagacggcugcucggcaccuucaccuggacacuguccgacucugaaggcgaggauacgcccgggggauacugucugacccgcuggaugcucaucgaggccgaacugaagugcuuuggcaacacagcuguggccaaauguaaugagaagcaugacgaagaguucugcgauaugcuuagacuguuugacuucaacaaacaggcuauucagcggcucaaggccgaagcgcagaugagcauccaacugauuaauaaagccgugaacgcucuuaucaaugaucagcugaucaugaagaaccaccuccgcgacauuauggggaucccuuauugcaauuacuccaaguauugguaccugaaccacaccacaaccggaagaacgagccugcccaaauguuggcucgucucuaauggcuccuaccugaacgagacacauuucagcgacgauauugagcagcaagccgacaauaugaucaccgaaaugcuucagaaggaguauauggaacggcaggggaaaaccccucugggacucguugaucuguuuguguucucuaccagcuuuuaccugauuuccaucuuccuucaccucgugaagaucccgacacaucgccacauugucggcaaaucuugccccaagccucauagacugaaccacaugggcaucuguagcugcgggcuguauaaacagcccggagugccuguuaaguggaagcggugaggacuaguuauaagacugacuagcccgaugggccucccaacgggcccuccuccccuccuugcaccgagauuaaucaaaggcucuuuucagagccaccaaaaaaaaaaaaaaaaaaaaaaaaaaaaaaaaaaaaaaaaaaaaaaaaaaaaaaaaaaaaaaaaagaauu

SEQ ID NO: 15012 - RNA, 1658 nt, Artificial Sequence
  mRNA product Design i-3 (hSL-A64-N5) comprising derived and/or modified sequence from LASV(LM765-SLE-2012;Clade IV)__AIT17814__GPC (opt5)
aggagaaagcuuaccaugggccagaucgugaccuucuuucaagaggucccccacguuauugaagaggugaugaacaucgugcugauugcccucagcauccuggcuguccuuaaggggcuguacaauuucgccacaugcggacucgugggccugguuacguuucuucugcucugugggagauccugcaccacaucucuguauaaaggaguguacgaacugcagacccucgagcugaacauggaaacacuuaauaugaccaugccucugagcuguacaaagaacaauucccaucacuauauuauggucggcaacgagaccgggcucgagcugacgcuuaccaauacaucuaucaucgaccauaaauucugcaaccugagcgaugcgcaccggaagaaucucuacgaccaugcucugauguccauuaucucuaccuuucaccugagcauuccgaacuucaaucaguaugaagccauguccugugauuuuaacggaggcaaaaucagcgugcaguacaaucucucucacuccuaugccaaggacgcugccgaucauugcggcacaguugcuaacggggugcugcaaaccuucaugcgcauggccuggggaggcagcuacauugcgcuugacucugggagaggacggugggauuguaucaugacguccuaccaguaucugauuauccagaauacaaccugggaggaccacugccaguuuagccgccccucuccuaucggcuaccucgggcugcuuucccaaagaacacgggauauuuauaucagccgcagacugcucggaaccuucaccuggacacuguccgacucugaaggcaaggauacgcccggcggguacugucugacccgguggaugcucauugaggccgagcugaaaugcuuuggaaacacagcugucgccaaguguaacgaaaaacaugacgaggaguucugcgauaugcuucgccuguuugacuucaauaagcaggcuauccagagacucaaagccgaagcgcagaugagcauucaacugaucaacaaggccgugaaugcucuuaucaacgaccagcugauuaugaagaaucaccuccgggauaucaugggcauuccuuauugcaacuacuccaaauauugguaccugaaucacaccacaaccgggaagacgagccugcccaaauguuggcucgugucuaacggauccuaccugaaugaaacacauuucagcgacgauaucgagcagcaagccgacaacaugauuaccgagaugcuucagaaggaauauauggagcgccagggcaaaaccccucuggggcucgucgaucuguuuguuuucucuaccagcuuuuaccugaucuccaucuuccuucaccucgugaagauuccgacacauagacacaucgugggaaaacccugcccuaagccccaucggcugaaucacaugggcauuuguucuugcggccuguauaagcagccugggguccccgugaaauggaagcgcugaggacuaguuauaagacugacuagcccgaugggccucccaacgggcccuccuccccuccuugcaccgagauuaaucaaaggcucuuuucagagccaccaaaaaaaaaaaaaaaaaaaaaaaaaaaaaaaaaaaaaaaaaaaaaaaaaaaaaaaaaaaaaaaaagaauu

SEQ ID NO: 15013 - RNA, 1658 nt, Artificial Sequence
  mRNA product Design i-3 (hSL-A64-N5) comprising derived and/or modified sequence from LASV(LM776-SLE-2012;Clade IV)__AIT17824__GPC (opt5)
aggagaaagcuuaccaugggccagaucgugaccuucuuucaagaggucccccacguuauugaagaggugaugaacaucgugcugauugcccucagcauccuggcuguccuuaaggggcuguacaauuucgccacaugcggacucgugggccugguuacguuucuucugcucugugggagauccugcaccacaucuguguauaaaggagucuacgaacugcagacccuggagcucaacauggaaacacugaauaugaccaugccucuuagcuguacaaagaacaauucccaucacuauauuauggugggcaacgagaccgggcuggagcucacgcugaccaauacaucuaucaucaaccauaaauucugcaaucuuagcgacgcgcacaagaaaaaccuguacgaucaugcucucauguccauuaucucuaccuuucaccugagcauuccgaauuucaaccaguaugaagccauguccugugacuuuaauggaggcaagaucagcguucaguacaaccugucucacuccuaugccggcgaugcugccaaucauugcgggacaguggcuaacggaguccuccaaaccuucaugcggauggccuggggcgggagcuacauugcgcuggacucuggacacggcaagugggauuguaucaugacguccuaccaguaucuuauuauccagaacacaaccugggaggaccauugccaguuuagccgccccucuccuaucggguaccugggacuccugucccaaagaacacgggauauuuauaucagccgcagacuucugggcaccuucaccuggacacucuccgacucugaaggcaaagauacgcccgggggauacugucugacccgguggaugcugauugaggccgagcucaagugcuuuggcaauacagcuguggccaaauguaacgaaaagcacgacgaggaguucugcgauaugcugcgccuuuuugacuucaauaaacaggcuauccagagacugaaggccgaagcgcagaugagcauucaacucaucaacaaggccgugaaugcucugaucaacgaucagcuuauuaugaaaaaucaucugcgggacaucauggggauuccuuauugcaacuacuccaaguauugguaccucaaucacaccacaaccggaaaaacgagccugcccaaguguuggcuggucucuaacggcuccuaccucaaugaaacacacuucagcgacgauaucgagcagcaagccgacaacaugauuaccgagaugcugcagaaagaauauauggagcgccaggggaagaccccucuuggacugguugaucucuuuguguucucuaccagcuuuuaccugaucuccaucuuccugcaucuugugaaaauuccgacacacagacauaucgucggcaagucuugccccaagccucaccggcucaaucacaugggcauuuguagcugcgggcuguauaaacagcccggagugccuguucgcuggaagagaugaggacuaguuauaagacugacuagcccgaugggccucccaacgggcccuccuccccuccuugcaccgagauuaaucaaaggcucuuuucagagccaccaaaaaaaaaaaaaaaaaaaaaaaaaaaaaaaaaaaaaaaaaaaaaaaaaaaaaaaaaaaaaaaaagaauu

SEQ ID NO: 15014 - RNA, 1658 nt, Artificial Sequence
  mRNA product Design i-3 (hSL-A64-N5) comprising derived and/or modified sequence from LASV(Mad39;Clade IV)__ANH09722__GPC (opt5)
aggagaaagcuuaccaugggccagaucgugaccuucuuucaagaggucccccacguuauugaagaggugaugaacaucgugcugauugcccucagcauccuggcuguccuuaaggggcuguacaauguggccacaugcggacucauuggccugguuacguuccuucugcucugugggagauccugcaccacaacccuguauaaaggaguguacgaacugcaggcgcucgagcugaacauggaaacacuuaauaugaccaugccucugucuuguacaaagaacaauagccaucacuauauccgggucggcaacgagaccgggcucgagcugacgcuuaccaauacaucccugaucaaccauaaauuuugcaaucucucugacgcucacaagaaaaaccuguacgaucaugcccugaugagcauuaucuccaccuuccaccucucuauuccgaauuuuaaccaguaugaagccaugagcugugacuucaaugauggaaagaucuccgugcaguacaaccugagccacacauaugcuggcgacaccgccaaucauugcggcacgguugcuaacggggugcuucaaacauuuaugcgcauggccuggggaggcucuuacauugcgcuggauuccgggagaggaggcugggacuguaucaugaccagcuaccaguaucucauuauccagaacacaaccugggaggaucacugccaguucucucggcccuccccuaucggguaccugggacuucugagccaacgcaccagagacauuuauaucucucggcgccuccugggcacauuuacguggacccuguccgauagcgaaggcaaggacacacccgggggauacugucucaccagauggaugcugauugaggccgagcuuaaaugcuucggcaauacagcugucgccaaguguaacgaaaaacaugaugaggaauuuugcgacaugcugcgccucuucgauuuuaauaagcaggcuauccagcggcugaaagccgaggcgcagauguccauucaacuuaucaacaaggccgugaaugcucugaucaacgaccagcucauuaugaagaaucaccugagagacaucauggggauuccuuauugcaacuacucuaaauauugguaccugaaucacaccgugacgggaaagacaagccuccccaaauguuggcuggucuccaacggcagcuaccuuaaugaaacccauuucucugaugacaucgagcagcaagccgauaacaugauuaccgagaugcugcagaaggaauauauggagcggcaggggaaaacaccucucggacugguugaccuguucguguuuuccaccagcuucuaccuuaucucuaucuuucuccaccuggugaagauuccgacacaucgccacgucgugggcaaacccugcccuaagccccauagacugaaucacaugggcaucuguagcugcggguucuauaagcagccuggaguucccgugcgguggaaacgcugaggacuaguuauaagacugacuagcccgaugggccucccaacgggcccuccuccccuccuugcaccgagauuaaucaaaggcucuuuucagagccaccaaaaaaaaaaaaaaaaaaaaaaaaaaaaaaaaaaaaaaaaaaaaaaaaaaaaaaaaaaaaaaaaagaauu

SEQ ID NO: 15015 - RNA, 1658 nt, Artificial Sequence
  mRNA product Design i-3 (hSL-A64-N5) comprising derived and/or modified sequence from LASV(Z0947-SLE-2011;Clade IV)__AIT17840__GPC (opt5)
aggagaaagcuuaccaugggccagaucgugaccuucuuucaagaggucccccacguuauugaagaggugaugaacaucgugcugauugcccucagcauccuggcuguccuuaaggggcuguacaauuucgccacaugcggacucgugggccugguuacguuucuucugcucugugggagauccugcaccauuucucuguauaaaggaguguacgaacugcagacacucgagcugaacauggaaacccuuaauaugacaaugccucugagcuguaccaagaacaauucccaucacuauaucauggucggcaacgagacagggcucgagcugacccuuacgaauaccucuaucauuaaccauaaauucugcaaucugagcgacgcgcacaagaaaaaccucuacgaucaugcucugauguccaucauuucuacauuucaccugagcaucccgaauuucaaccaguaugaagccauguccugugacuuuaauggaggcaagauuagcgugcaguacaaccucucucacuccuaugccggcgaugcugccaaucauugcgggaccguugcuaacggagugcugcaaacauucaugcggauggccuggggcgggagcuacaucgcgcuugacucuggacgcgauagaugggacuguauuaugaccuccuaccaguaucugaucauccagaacacgacaugggaggaucacugccaguuuagccggcccucuccuauuggcuaccucgggcugcuuucccaacgcaccagagacaucuauauuagccggcgccugcucggaacauucaccuggacccuguccgauucugaaggcaaggacacacccggcggguacugucugacgagauggaugcucaucgaggccgagcugaaaugcuuuggaaauaccgcugucgccaaguguaacgaaaaacaugaugaggaguucugcgacaugcuucggcuguuugauuucaauaagcaggcuauucagcgccucaaagccgaagcgcagaugagcauccaacugaucaacaaggccgugaaugcucuuauuaacgaccagcugaucaugaagaaucaccucagagacauuaugggcaucccuuauugcaacuacuccaaauauugguaccugaaucacacaaccacagggaagaccagccugcccaaauguuggcucgugucuaacggauccuaccugaaugaaacgcauuucagcgaugacauugagcagcaagccgauaacaugaucacagagaugcuucagaaggaauauauggagcggcagggcaaaaccccucuggggcucgucgaccuguuuguuuucucuaccagcuuuuaccugaucuccauuuuccuucaccucgugaagaucccgacacaucgccacauugugggaaaacccugcccuaagccccauagacugaaucacaugggcaucuguucuugcggccuguauaagcagccugggguccccgugaaauggaagcggugaggacuaguuauaagacugacuagcccgaugggccucccaacgggcccuccuccccuccuugcaccgagauuaaucaaaggcucuuuucagagccaccaaaaaaaaaaaaaaaaaaaaaaaaaaaaaaaaaaaaaaaaaaaaaaaaaaaaaaaaaaaaaaaaagaauu

SEQ ID NO: 15016 - RNA, 1689 nt, Artificial Sequence
  mRNA product Design i-3 (hSL-A100) comprising derived and/or modified sequence from LASV(Josiah;Clade IV)__NP_694870__GPC (opt1)
aggagaaagcuuaccaugggccagaucgugaccuucuuccaggaggucccccacgugaucgaggaggugaugaacaucguccugaucgcccucagcgugcuggccgugcugaaggggcucuacaacuucgcgaccugcggccuggucgggcuggugacguuccuccugcugugcggccgcuccugcaccaccagccucuacaaggggguguacgagcugcagacccuggagcucaacauggagacgcugaacaugaccaugccgcuguccugcaccaagaacaacagccaccacuacaucauggucggcaacgagaccggccucgagcugacgcugaccaacaccuccaucaucaaccacaaguucugcaaccucagcgacgcccacaagaagaaccuguacgaccacgcccugauguccaucaucagcaccuuccaccucuccauccccaacuucaaccaguacgaggccaugagcugcgacuucaacgggggcaagaucuccgugcaguacaaccugagccacuccuacgccggggacgcggccaaccacugcggcacgguggccaacgggguccugcagaccuucaugcggauggccuggggcggcagcuacaucgcgcucgacuccgggcgcggcaacugggacugcaucaugaccagcuaccaguaccugaucauccagaacaccacgugggaggaccacugccaguucucccggcccagccccaucggguaccugggccuccugucccagcgcacccgggacaucuacaucagccgccggcugcucggcaccuucaccuggacgcugagcgacuccgaggggaaggacaccccgggcggguacugccugacccgcuggaugcucaucgaggccgagcugaagugcuucggcaacaccgccguggccaagugcaacgagaagcacgacgaggaguucugcgacaugcugcggcuguucgacuucaacaagcaggccauccagcgccugaaggcggaggcccagaugagcauccagcugaucaacaaggccgugaacgcccucaucaacgaccagcugaucaugaagaaccaccuccgggacaucauggggauccccuacugcaacuacuccaaguacugguaccucaaccacacgaccaccggccgcaccagccugcccaagugcuggcuggucuccaacggcagcuaccucaacgagacgcacuucuccgacgacaucgagcagcaggccgacaacaugaucaccgagaugcugcagaaggaguacauggagcggcaggggaagacgccccugggccucguggaccuguucguguucagcaccuccuucuaccugaucagcaucuuccugcaccucgucaagaucccgacccaccgccacaucguggggaaguccugccccaagccccaccggcugaaccacaugggcaucugcagcugcgggcuguacaagcagcccggcgugccggucaaguggaagcgcugaggacuaguuauaagacugacuagcccgaugggccucccaacgggcccuccuccccuccuugcaccgagauuaaucaaaggcucuuuucagagccaccaaaaaaaaaaaaaaaaaaaaaaaaaaaaaaaaaaaaaaaaaaaaaaaaaaaaaaaaaaaaaaaaaaaaaaaaaaaaaaaaaaaaaaaaaaaaaaaaaaaaa

SEQ ID NO: 15017 - RNA, 1686 nt, Artificial Sequence
  mRNA product Design i-3 (hSL-A100) comprising derived and/or modified sequence from LASV(LP;Clade I)__AAF86701__GPC (opt1)
aggagaaagcuuaccaugggccagaucaucaccuucuuccaggaggugccccacgucaucgaggaggugaugaacaucgugcugaucgcccucagccugcuggccauccucaaggggcuguacaacaucgcgaccugcggcaucaucgggcuggucgccuuccucuuccugugcggcaaguccugcagccugacgcucaagggcggguacgagcugcagacccuggagcucaacauggagacccugaacaugaccaugccgcuguccugcacgaagaacagcucccaccacuacauccgcgugggcaacgagaccgggcucgagcugacccugaccaacacgagcaucaucaaccacaaguucugcaaccucuccgacgcccacaagaagaaccuguacgaccacgcccugaugagcaucaucuccaccuuccaccucagcauccccaacuucaaccaguacgaggccauguccugcgacuucaacggcgggaagaucagcgugcaguacaaccugucccacagcuacgcgggcgacgccgccgagcacugcgggaccgucgccaacggcgugcugcagaccuucaugcggauggcguggggcgggcgcuacaucgcccucgacuccggcaaggggaacugggacugcaucaugacgagcuaccaguaccugaucauccagaacaccaccugggaggaccacugccaguucucccggcccagccccaucggcuaccugggccuccugucccagcgcacccgggacaucuacaucagccgccggcugcucgggacguucaccuggacccugagcgacuccgagggcaacgagacccccgggggcuacugccugacgcgcuggaugcucaucgaggccgagcugaagugcuucgggaacaccgccguggccaagugcaacgagaagcacgacgaggaguucugcgacaugcugcggcuguucgacuucaacaagcaggcgauccgccggcugaaggccgaggcccagaugagcauccagcugaucaacaaggccgucaacgcccucaucaacgaccagcugaucaugaagaaccaccuccgcgacaucaugggcauccccuacugcaacuacuccaaguacugguaccucaaccacaccagcuccggccggaccagccugcccaagugcuggcugaucuccaacgggagcuaccucaacgagacgcaguucuccgacgacaucgagcagcaggcggacaacaugaucaccgagaugcugcagaaggaguacaucgagcgccagggcaagaccccgcuggggcucguggacaucuucaucuucagcaccuccuucuaccugaucagcaucuuccugcaccugaucaagaucccgacgcaccggcacaucgugggcaagcccugccccaagccccaccgccucaaccacaugggggucugcuccugcggccuguacaagcacccgggcgugcccaccaaguggaagcggugaggacuaguuauaagacugacuagcccgaugggccucccaacgggcccuccuccccuccuugcaccgagauuaaucaaaggcucuuuucagagccaccaaaaaaaaaaaaaaaaaaaaaaaaaaaaaaaaaaaaaaaaaaaaaaaaaaaaaaaaaaaaaaaaaaaaaaaaaaaaaaaaaaaaaaaaaaaaaaaaaaaaa

SEQ ID NO: 15018 - RNA, 1686 nt, Artificial Sequence
  mRNA product Design i-3 (hSL-A100) comprising derived and/or modified sequence from LASV(803213;Clade II)__AAF86703__GPC (opt1)
aggagaaagcuuaccaugggccagaucaucaccuucuuccaggaggugccccacgucaucgaggaggugaugaacaucgugcugaucgcccucagccugcuggccauccucaaggggaucuacaacgucgcgaccugcggccuguucgggcugaucuccuuccuccugcugugcggccgcagcugcuccgugacguacaaggggguguacgagcuccagacccuggagcugaacauggccaaccucaacaugaccaugccgcugagcugcaccaagaacaacucccaccacuacaucauggucggcaacgagacgggccuggagcucacccugaccaacaccagcaucaucaaccacaaguucugcaaccuguccgacgcccacaagaagaaccucuacgaccacgcccugaugagcaucaucuccacguuccaccugagcauccccaacuucaaccaguacgaggccauguccugcgacuucaacgggggcaagaucagcgugcaguacaaccucucccacagcuucgcgguggacgccgccaaccacugcgggaccaucgccaacggcguccugcagaccuucaugcggauggcguggggcggguccuacaucgcccuggacagcggcaaggggaacugggacugcaucaugaccuccuaccaguaccucaucauccagaacacgaccugggaggaccacugccaguucagccgccccucccccaucggcuaccuggggcugcucagccagcggacccgcgacaucuacaucagccggcgccugcugggcaccuucacguggacccucuccgacagcgagggcaacgaggcccccgggggcuacugccugacccgguggaugcugaucgaggccgagcucaagugcuucgggaacaccgccguggcgaagugcaacgagaagcacgacgaggaguucugcgacaugcugcgccuguucgacuucaacaagcaggccaucaagcggcucaagacggaggcccagauguccauccagcugaucaacaaggccgugaacgcccugaucaacgaccagcucaucaugaagaaccaccuccgcgacaucaugggcauccccuacugcaacuacagccgguacugguaccugaaccacaccgucaccgggaagaccucccugccccgcugcuggcuggugagcaacggcuccuaccugaacgagacgcacuucagcgacgacaucgagcagcaggcggacaacaugaucaccgagaugcuccagaaggaguacauggaccggcagggcaagaccccgcuggggcugguggaccucuucgucuucuccaccagcuucuaccugaucuccaucuuccugcaccuggugaagaucccgacgcaccgccacaucgugggcaagcccugccccaagccccaccggcucaaccacauggggaucugcagcugcggccuguacaagcacccggggguccccgugaaguggaagcgcugaggacuaguuauaagacugacuagcccgaugggccucccaacgggcccuccuccccuccuugcaccgagauuaaucaaaggcucuuuucagagccaccaaaaaaaaaaaaaaaaaaaaaaaaaaaaaaaaaaaaaaaaaaaaaaaaaaaaaaaaaaaaaaaaaaaaaaaaaaaaaaaaaaaaaaaaaaaaaaaaaaaaa

SEQ ID NO: 15019 - RNA, 1686 nt, Artificial Sequence
  mRNA product Design i-3 (hSL-A100) comprising derived and/or modified sequence from LASV(GA391;Clade III)__CAA36645__GPC (opt1)
aggagaaagcuuaccaugggccagaucgugaccuucuuccaggaggucccccacgugaucgaggaggugaugaacaucguccugaucgcccucagcauccuggccauccugaaggggcucuacaacguggcgaccugcggccugaucgggcuggugacguuccuccugcuguccggccgcagcugcucccucaucuacaaggggaccuacgagcugcagacccuggagcucaacauggagacccugaacaugacgaugccgcugagcugcaccaagaacaacucccaccacuacauccgggucggcaacgagaccggccucgagcugacccugacgaacaccagcauccucaaccacaaguucugcaaccuguccgacgcccacaagcgcaaccuguacgaccacagccucauguccaucaucagcaccuuccaccuguccauccccaacuucaaccaguacgaggccaugagcugcgacuucaacgggggcaagaucaccgugcaguacaaccugucccacagcuucgccguggacgccgcggggcacugcggcacgcucgccaacgggguccugcagaccuucaugcggauggccuggggcggcuccuacaucgcccuggacagcgggcgcggcaacugggacugcaucaugaccuccuaccaguaccucaucauccagaacaccacgugggacgaccacugccaguucagccggcccucccccaucggguaccugggccugcucagccagcgcacccgggacaucuacaucagccgccggcugcugggcaccuucaccuggacgcucuccgacagcgaggggaacgagaccccgggcggguacugccugacccgcuggaugcugaucgaggcggagcucaagugcuucggcaacaccgccguggccaagugcaacgagaagcacgacgaggaguucugcgacaugcugcggcuguucgacuucaacaagcaggccauccgccggcucaagacggaggcccagauguccauccagcugaucaacaaggcggugaacgcccugaucaacgaccagcucaucaugaagaaccaccuccgcgacaucauggggauccccuacugcaacuacagccgguacugguaccugaaccacaccuccaccggcaagaccagccugccccgcugcuggcugaucuccaacggcagcuaccugaacgagacgaaguucuccgacgacaucgagcagcaggccgacaacaugaucaccgagaugcuccagaaggaguacaucgaccggcaggggaagacgccccugggccuggucgaccuguucguguucagcaccuccuucuaccucaucagcaucuuccugcaccuggugaagaucccgacccaccgccacaucgucgggaagcccugccccaagccccaccggcucaaccacaugggcaucugcuccugcgggcuguacaagcagccgggcgugcccgugcgcuggaagcggugaggacuaguuauaagacugacuagcccgaugggccucccaacgggcccuccuccccuccuugcaccgagauuaaucaaaggcucuuuucagagccaccaaaaaaaaaaaaaaaaaaaaaaaaaaaaaaaaaaaaaaaaaaaaaaaaaaaaaaaaaaaaaaaaaaaaaaaaaaaaaaaaaaaaaaaaaaaaaaaaaaaaa

SEQ ID NO: 15020 - RNA, 1689 nt, Artificial Sequence
  mRNA product Design i-3 (hSL-A100) comprising derived and/or modified sequence from LASV(AV;Clade V)__CCA30314__GPC (opt1)
aggagaaagcuuaccaugggccagaucgugaccuucuuccaggaggucccccacgugaucgaggaggugaugaacaucguccugaucgcccucagcauccuggccgugcugaaggggcucuacaacaucgcgaccugcggccugaucgggcugaucacguuccuccugcugugcggccgcuccugcagcuccaaccucuacaaggggguguacgagcugcagagccuggaccucaacauggagacccugaacaugaccaugccgcuguccugcaccaagaacaacagccaccacuacauccgggucggcaacgacacgggccucgagcugacccugaccaacaccuccauccucaaccacaaguucugcaaccugagcgacgcccacaagaaggaccuguacgaccacgcccucauguccaucaucagcacguuccaccuguccauccccaacuucaaccaguacgaggccaugagcugcgacuucaacgggggcaagaucuccgugcaguacaaccugagccacuccuacgccaucgacgcggccaaccacugcgggaccguggccaacggcauccuccagaccuucaugcgcauggccuggggcgggagcuacaucgcgcuggacuccggccgggggaacugggacugcaucaugaccagcuaccaguaccugaucauccagaacacgaccugggagaaccacugccaguucucccgccccagccccaucggcuaccucgggcugcugagccagcggacccgcgacaucuacaucucccggcgccuccugggcaccuucacguggacccugagcgacuccgagggcaacgccacccccgggggcuacugccucacccgguggaugcugaucgaggccgagcugaagugcuucgggaacacggccgucgccaagugcaacgagaagcacgacgaggaguucugcgacaugcuccgccuguucgacuucaacaagcaggcgaucagccggcugaaguccgaggcccagaugagcauccagcucaucaacaaggccgugaacgcccugaucaacgaccagcugaucaugaagaaccaccuccgcgacaucaugggcauccccuacugcaacuacuccaaguacugguaccugaaccacaccaucaccgggaagaccagccugcccaagugcuggcucguguccaacggcagcuaccugaacgagacgcacuucuccgacgacaucgagcagcaggccgacaacaugaucaccgagaugcugcagaaggaguacauggagcggcagggcaagaccccgcucgggcuggucgaccuguucguguucagcaccuccuucuaccugaucagcaucuuccuccgccuggugaagaucccgacgcaccggcacaucgucggcaagcccugccccaagccccaccgccugaaccacauggggaucugcuccugcggccucuacaagcagccgggggugcccgugcgguggaagcgcugaggacuaguuauaagacugacuagcccgaugggccucccaacgggcccuccuccccuccuugcaccgagauuaaucaaaggcucuuuucagagccaccaaaaaaaaaaaaaaaaaaaaaaaaaaaaaaaaaaaaaaaaaaaaaaaaaaaaaaaaaaaaaaaaaaaaaaaaaaaaaaaaaaaaaaaaaaaaaaaaaaaaa

SEQ ID NO: 15021 - RNA, 1686 nt, Artificial Sequence
  mRNA product Design i-3 (hSL-A100) comprising derived and/or modified sequence from LASV(Togo/2016/7082;Clade VI)__AMR44577__GPC (opt1)
aggagaaagcuuaccaugggccagaucaucaccuucuuccaggaggugccccacgucaucgaggaggugaugaacaucgugcugaucgcccucagccugcuggccauccucaagggggucuacaacguggcgaccugcggcaucaucgggcuggugacguuccuguuccucugcggccgcuccugcagccugaucuacaagggguccuacgagcugcagacccucgagcugaacauggagacccugaacaugaccaugccgcucagcugcacgaagaacuccagccaccacuacauccgggucggcaacgagaccggccuggagcugacccucaccaacacguccaucaucaaccacaaguucugcaaccugagcgacgcccacaagcgcaaccuguacgaccacgcccucauguccauccugagcaccuuccaccuguccauccccaacuucaaccaguacgaggccaugagcugcgacuucaacgggggcaagaucuccgugcaguacaaccucagccacgccuacgcgguggacgccgccgagcacugcgggaccgucgccaacggcgugcugcagaccuucaugcggauggcguggggcggguccuacaucgcccuggacagcggccgcgggaacugggacugcaucaugacguccuaccaguaccucaucauccagaacaccaccugggaggaccacugccaguucagccggcccucccccaucggcuaccuggggcugcucagccagcgcacccgggacaucuacaucagccgccggcugcugggcacguucaccuggacccucuccgacagcgagggcaacgagacccccgggggcuacugccugacgcgcuggaugcugaucgaggccgagcucaagugcuucgggaacaccgccguggccaagugcaacgagaagcacgacgaggaguucugcgacaugcugcggcuguucgacuucaacaagcaggcgauccagcgccucaaguccgaggcccagaugagcauccagcugaucaacaaggccgucaacgcccugaucaacgaccagcucaucaugaagaaccaccuccgggacaugaugggcauccccuacugcaacuacuccaaguacugguaccugaaccacaccagcuccgggcgcaccagccugcccaagugcuggcugguguccaacggcagcuaccugaacgagacgcacuucuccgacgacaucgagcagcaggccgacaacaugaucaccgagaugcuccagaaggaguacaucgaccggcagggcaagaccccgcuggggcugguggaccucuucgucuucagcaccuccuucuaccugaucagcaucuuccugcaccugaucaagaucccgacgcaccgccacaucgugggcaagcccugccccaagccccaccggcucaaccacauggggaucugcuccugcggccuguacaagcagccgggggugcccacccgcuggaagcggugaggacuaguuauaagacugacuagcccgaugggccucccaacgggcccuccuccccuccuugcaccgagauuaaucaaaggcucuuuucagagccaccaaaaaaaaaaaaaaaaaaaaaaaaaaaaaaaaaaaaaaaaaaaaaaaaaaaaaaaaaaaaaaaaaaaaaaaaaaaaaaaaaaaaaaaaaaaaaaaaaaaaa

SEQ ID NO: 15022 - RNA, 1686 nt, Artificial Sequence
  mRNA product Design i-3 (hSL-A100) comprising derived and/or modified sequence from LASV(KAK-428;Clade n.d. (VII))__ANH09740__GPC (opt1)
aggagaaagcuuaccaugggccagaucgugaccuucuuccaggaggucccccacgugaucgaggaggugaugaacaucguccugaucgcccucagccugcuggccauccucaaggggcuguacaacuucgcgaccugcggcgugaucgggcugaucacguuccuccugcugugcggccgcuccugcagcgccaccuacaaggggcaguacgagcuccagacccuggagcugaacauggagucccucaacaugaccaugccgcugagcugcacgaagaacaacucccaccacuacauccgggccggcaacaacaccggccuggagcucacccugaccaacacgagcaucaucucccacaaguucugcaaccugagcgacgcccacaagaagaaccucuacgaccacacccugauguccaucaucaccaccuuccaccugagcauccccaacuucaaccaguacgaggccauguccugcgacuucaacgggggcaagaucagcauccaguacaaccucucccacagcuacgcgggggacgccgcccagcacugcggcacgguggccaacgggguccugcagaccuucaugcgcauggcguggggcggcuccuaccuggcccucgacagcgggcggcgcggcugggacugcaucaucuccagcuaccaguaccugaucauccagaacaccaccugggacgaccacugccaguucucccggcccagccccaucggguaccugggcuucgugagccagaagacgcgcgacaucuacaucucccggcgccuccugggcaccuucaccuggacccugagcgacuccgaggggcacgacaugccgggcggguacugccucacgcgguggaugcugaucgaggccgaccugaagugcuucggcaacaccgccguggccaagugcaacgagaagcacgacgaggaguucugcgacauguggcgccucuucgacuucaacaagcaggcgauccagcggcugaaggccgaggcccagaugaacauccagcugaucaacaaggccgucaacgcccucaucaacgaccagcugaugaugaagaaccaccuccgcgacaucauggggauccccuacugcaacuacagcaaguucugguaccugaacaacaccaccacgggccggaccucccugccccgcugcuggcugaucagcaacggcuccuaccucaacgagacccacuucagcgacgacaucgagcagcaggcggacaacaugaucaccgagaugcugcagaaggaguacauggaccggcaggggaagacgccccugggccucguggaccuguucguguucuccaccagcuucuaccugaucaccaucuuccuccaccuggucaagaucccgacccaccgccacaucguggggaagcccugccccaagccccaccggcugaaccacaugggcaucugcuccugcgggcuguacaagcagccgggcgugcccguccgcuggaagcggugaggacuaguuauaagacugacuagcccgaugggccucccaacgggcccuccuccccuccuugcaccgagauuaaucaaaggcucuuuucagagccaccaaaaaaaaaaaaaaaaaaaaaaaaaaaaaaaaaaaaaaaaaaaaaaaaaaaaaaaaaaaaaaaaaaaaaaaaaaaaaaaaaaaaaaaaaaaaaaaaaaaaa

SEQ ID NO: 15023 - RNA, 1686 nt, Artificial Sequence; identical to SEQ ID NO: 15017
  mRNA product Design i-3 (hSL-A100) comprising derived and/or modified sequence from LASV(Pinneo-NIG-1969;Clade I)__AIT17836__GPC (opt1)

SEQ ID NO: 15024 - RNA, 1686 nt, Artificial Sequence
  mRNA product Design i-3 (hSL-A100) comprising derived and/or modified sequence from LASV(ISTH0009-NIG-2011;Clade II)__AIT17404__GPC (opt1)
aggagaaagcuuaccaugggccagaucaucaccuucuuccaggaggugccccacgucaucgaggaggugaugaacaucgugcugaucgcccucagccugcuggccauccucaaggggaucuacaacgucgcgaccugcggccuguucgggcugguguccuuccuccugcugugcggccgcagcugcuccacgaccuacaaggggguguacgagcuccagacccuggagcuggacauggccagccucaacaugaccaugccgcuguccugcacgaagaacaacagccaccacuacaucauggucggcaacgagaccggccuggagcucacccugaccaacacguccaucaucaaccacaaguucugcaaccugagcgacgcccacaagaagaaccucuacgaccacgcccugauguccaucaucagcaccuuccaccuguccauccccaacuucaaccaguacgaggccaugagcugcgacuucaacgggggcaagaucuccgugcaguacaaccucagccacgcguacgccguggacgccgccaaccacugcgggaccaucgcgaacggcguccugcagaccuucaugcggauggccuggggcggguccuacaucgcccuggacagcggcaagggguccugggacugcaucaugacgagcuaccaguaccucaucauccagaacaccaccugggaggaccacugccaguucucccgccccagccccaucggcuaccuggggcugcucagccagcggacccgcgacaucuacaucucccggcgccugcugggcacguucaccuggacccucagcgacuccgagggcaacgagacccccgggggcuacugccugacgcgguggaugcugaucgaggccgagcucaagugcuucgggaacaccgccguggcgaagugcaacgagaagcacgacgaggaguucugcgacaugcugcgccuguucgacuucaacaagcaggccauccggcgccucaagaccgaggcccagaugagcauccagcugaucaacaaggccgugaacgcccugaucaacgaccagcucaucaugaagaaccaccuccgggacaucaugggcaucccguacugcaacuacuccaaguacugguaccugaaccacaccgucacggggaagaccagccugccccgcugcuggcugguguccaacggcagcuaccugaacgagacccacuucuccgacgacaucgagcagcaggcggacaacaugaucaccgagcuccugcagaaggaguacauggaccggcagggcaagacgccccuggggcucguggaccuguucgucuucagcaccuccuucuaccugaucagcaucuuccugcaccucaucaagaucccgacccaccgccacaucaccggcaagcccugccccaagccccaccggcugaaccacauggggaucugcuccugcggccuguacaagcacccgggggugcccgugaaguggaagcgcugaggacuaguuauaagacugacuagcccgaugggccucccaacgggcccuccuccccuccuugcaccgagauuaaucaaaggcucuuuucagagccaccaaaaaaaaaaaaaaaaaaaaaaaaaaaaaaaaaaaaaaaaaaaaaaaaaaaaaaaaaaaaaaaaaaaaaaaaaaaaaaaaaaaaaaaaaaaaaaaaaaaaa

SEQ ID NO: 15025 - RNA, 1686 nt, Artificial Sequence
  mRNA product Design i-3 (hSL-A100) comprising derived and/or modified sequence from LASV(ISTH2010-NIG-2012;Clade II)__AIT17482__GPC (opt1)
aggagaaagcuuaccaugggccagaucaucaccuucuuccaggaggugccccacgucaucgaggaggugaugaacaucgugcugaucgcccucagccugcuggccauccucaaggggaucuacaacgucgcgaccugcggccuguucgggcugguguccuuccuccugcugugcggccgcagcugcuccacgaccuacaaggggguguacgagcuccagacccuggagcuggacauggccagccucaacaugaccaugccgcuguccugcacgaagaacaacagccaccacuacaucauggucggcaacgagaccggccuggagcucacccugaccaacacguccaucaucaaccacaaguucugcaaccugagcgacgcccacaagaagaaccucuacgaccacgcccugauguccaucaucagcaccuuccaccuguccauccccaacuucaaccaguacgaggccaugagcugcgacuucaacgggggcaagaucuccgugcaguacaaccucagccacgcguacgccguggacgccgccaaccacugcgggaccaucgcgaacggcguccugcagaccuucaugcggauggccuggggcggguccuacaucgcccuggacagcggcaagggguccugggacugcaucaugacgagcuaccaguaccucaucauccagaacaucaccugggaggaccacugccaguucucccgccccagccccaucggcuaccuggggcugcucagccagcggacccgcgacaucuacaucucccggcgccugcugggcaccuucacguggacccucagcgacuccgagggcaacgagacccccgggggcuacugccugacccgguggaugcugaucgaggccgagcucaagugcuucgggaacacggccguggcgaagugcaacgagaagcacgacgaggaguucugcgacaugcugcgccuguucgacuucaacaagcaggccauccggcgccucaagaccgaggcccagaugagcauccagcugaucaacaaggccgugaacgcccugaucaacgaccagcucaucaugaagaaccaccuccgggacaucaugggcauccccuacugcaacuacuccaaguacugguaccugaaccacaccgucaccgggaagacgagccugccccgcugcuggcugguguccaacggcagcuaccugaacgagacccacuucuccgacgacaucgagcagcaggcggacaacaugaucaccgagcuccugcagaaggaguacaucgaccggcagggcaagaccccgcuggggcucguggaccuguucgucuucagcacguccuucuaccugaucagcaucuuccugcaccucgugaagaucccgacccaccgccacguggucggcaagcccugccccaagccccaccggcugaaccacauggggaucugcuccugcggccuguacaagcacccgggggugcccgugaaguggaagcgcugaggacuaguuauaagacugacuagcccgaugggccucccaacgggcccuccuccccuccuugcaccgagauuaaucaaaggcucuuuucagagccaccaaaaaaaaaaaaaaaaaaaaaaaaaaaaaaaaaaaaaaaaaaaaaaaaaaaaaaaaaaaaaaaaaaaaaaaaaaaaaaaaaaaaaaaaaaaaaaaaaaaaa

SEQ ID NO: 15026 - RNA, 1686 nt, Artificial Sequence
  mRNA product Design i-3 (hSL-A100) comprising derived and/or modified sequence from LASV(Lassa virus/H.sapiens-wt/NGA/2015/ISTH_0543;Clade II)__AVO03639__GPC (opt1)
aggagaaagcuuaccaugggccagaucaucaccuucuuccaggaggugccccacgucaucgaggaggugaugaacaucgugcugaucgcccucagccugcuggccauccucaaggggaucuacaacgucgcgaccugcggccuguucgggcugguguccuuccuccugcugugcggccgcagcugcuccacgaccuacaaggggguguacgagcuccagacccuggagcuggacauggccaaccucaacaugaccaugccgcugagcugcacgaagaacaacucccaccacuacaucauggucggcaacgagaccggccuggagcucacccugaccaacacgagcaucaucaaccacaaguucugcaaccuguccgacgcccacaagaagaaccucuacgaccacgcccugaugagcaucaucuccaccuuccaccugagcauccccaacuucaaccaguacgaggccauguccugcgacuucaacgggggcaagaucagcgugcaguacaaccucucccacaccuacgcgguggacgccgccaaccacugcgggaccaucgccaacggcguccugcagacguucaugcggauggcguggggcgggagcuacaucgcccuggacuccggcaaggggagcugggacugcaucaugaccuccuaccaguaccucgugauccagaacaccaccugggaggaccacugccaguucagccgccccucccccaucggcuaccuggggcugcucagccagcggacgcgcgacaucuacaucagccggcgccugcugggcaccuucaccuggacccucuccgacagcgagggcaacgagacgcccgggggcuacugccugacccgguggaugcugaucgaggccgagcucaagugcuucgggaacaccgccguggccaagugcaacgagaagcacgacgaggaguucugcgacaugcugcgccuguucgacuucaacaagcaggcgauccggcgccucaagaccgaggcccagauguccauccagcugaucaacaaggccgucaacgcccugaucaacgaccagcucaucaugaagaaccaccuccgggacaucaugggcauccccuacugcaacuacagcaaguacugguaccugaaccacacggugaccgggaagaccucccugccccgcugcuggcuggugagcaacggcuccuaccugaacgagacccacuucagcgacgacaucgagcagcaggccgacaacaugaucacggagcuccugcagaaggaguacaucgaccggcagggcaagaccccgcuggggcucgucgaccuguucguguucuccaccagcuucuaccugaucuccaucuuccugcaccucgugaagaucccgacccaccgccacaucacgggcaagcccugccccaagccccaccggcugaaccacauggggaucugcagcugcggccuguacaagcacccggggguccccgugaaguggaagcgcugaggacuaguuauaagacugacuagcccgaugggccucccaacgggcccuccuccccuccuugcaccgagauuaaucaaaggcucuuuucagagccaccaaaaaaaaaaaaaaaaaaaaaaaaaaaaaaaaaaaaaaaaaaaaaaaaaaaaaaaaaaaaaaaaaaaaaaaaaaaaaaaaaaaaaaaaaaaaaaaaaaaaa

SEQ ID NO: 15027 - RNA, 1686 nt, Artificial Sequence
  mRNA product Design i-3 (hSL-A100) comprising derived and/or modified sequence from LASV(Lassa virus/H.sapiens-wt/NGA/2016/ISTH_0009;Clade II)__AVO03571__GPC (opt1)
aggagaaagcuuaccaugggccagaucaucaccuucuuccaggaggugccccacgucaucgaggaggugaugaacaucgugcugaucgcccucagccugcuggccauccucaaggggaucuacaacgucgcgaccugcggccugcuggggcucguguccuuccugcugcucugcggccgcagcugcuccacgaccuacaaggggguguacgagcugcagacccuggagcucgacauggccagccugaacaugaccaugccgcuguccugcacgaagaacaacagccaccacuacaucauggucggcaacgagaccggccucgagcugacccugaccaacacguccaucaucaaccacaaguucugcaaccucagcgacgcccacaagaagaaccuguacgaccacgcccugauguccaucaucagcaccuuccaccucuccauccccaacuucaaccaguacgaggccaugagcugcgacuucaacgggggccggaucuccgugcaguacaaccugagccacuccuacgcgguggacgccgccaaccacugcgggaccaucgccaacggcguccugcagaccuucaugcgcauggcguggggcgggagcuacaucgcccucgacuccggcaaggggagcugggacugcaucaugacguccuaccaguaccugaucauccagaacaccaccugggaggaccacugccaguucagccggcccagccccaucggcuaccuggggcuccugucccagcgcacccgggacaucuacaucagccgccggcugcucggcacguucaccuggacccuguccgacagcgagggcaacgagacccccgggggcuacugccugacgcgcuggaugcucaucgaggccgagcugaagugcuucgggaacaccgccguggccaagugcaacgagaagcacgacgaggaguucugcgacaugcugcggcuguucgacuucaacaagcaggcgauccgccggcugaagaccgaggcccagauguccauccagcugaucaacaaggccgugaacgcccucaucaacgaccagcugaucaugaagaaccaccuccgcgacaucaugggcaucccguacugcaacuacagcaaguacugguaccucaaccacaccgucacggggaagaccucccugccccggugcuggcuggugagcaacggcuccuaccucaacgagacccacuucagcgacgacaucgagcagcaggccgacaacaugaucaccgagcugcugcagaaggaguacaucgaccgccagggcaagacgccccucgggcugguggaccuguucgucuucuccaccagcuucuaccugaucuccaucuuccuccaccuggugaagaucccgacccaccggcacaucaccggcaagcccugccccaagccccaccgccugaaccacauggggaucugcagcugcggccucuacaaccacccgggggugcccgucaaguggaagcggugaggacuaguuauaagacugacuagcccgaugggccucccaacgggcccuccuccccuccuugcaccgagauuaaucaaaggcucuuuucagagccaccaaaaaaaaaaaaaaaaaaaaaaaaaaaaaaaaaaaaaaaaaaaaaaaaaaaaaaaaaaaaaaaaaaaaaaaaaaaaaaaaaaaaaaaaaaaaaaaaaaaaa

SEQ ID NO: 15028 - RNA, 1686 nt, Artificial Sequence
  mRNA product Design i-3 (hSL-A100) comprising derived and/or modified sequence from LASV(Lassa virus/H.sapiens-wt/NGA/2016/ISTH_0017;Clade II)__AVO03567__GPC (opt1)
aggagaaagcuuaccaugggccagaucaucaccuucuuccaggaggugccccacgucaucgaggaggugaugaacaucgugcugaucgcccucagccugcuggccauccucaaggggaucuacaacgucgcgaccugcggccuguucgggcugguguccuuccuccugcugugcggccgcagcugcuccacgaccuacaaggggguguacgagcuccagacccuggagcuggacauggccagccucaacaugaccaugccgcuguccugcacgaagaacaacagccaccacuacaucauggucggcaacgagaccggccuggagcucacccugaccaacacguccaucaucaaccacaaguucugcaaccugagcgacgcccacaagaagaaccucuacgaccacgcccugauguccaucaucagcaccuuccaccuguccauccccaacuucaaccaguacgaggccaugagcugcgacuucaacgggggcaagaucuccgugcaguacaaccucagccacaccuacgcgaucgacgccgccaaccacugcgggaccaucgccaacggcgugcugcagacguucaugcggauggcguggggcggguccuacaucgcccuggacagcggcaagggguccugggacugcaucaugaccagcuaccaguaccucaucauccagaacaccaccugggaggaccacugccaguucucccgccccagccccaucggcuaccuggggcugcucagccagcggacgcgcgacaucuacaucucccggcgccugcugggcaccuucaccuggacccucagcgacuccgagggcaacgagacgcccgggggcuacugccugacccgguggaugcugaucgaggccgagcucaagugcuucgggaacaccgccgucgccaagugcaacgagaagcacgacgaggaguucugcgacaugcugcgccuguucgacuucaacaagcaggcgauccggcgccucaagaccgaggcccagaugagcauccagcugaucaacaaggccgugaacgcccugaucaacgaccagcucaucaugaagaaccaccuccgggacaucaugggcauccccuacugcaacuacuccaaguacugguaccugaaccacacggugaccgggaagaccagccugccccgcugcuggcuggucuccaacggcagcuaccugaacgagacccacuucuccgacgacaucgagcagcaggccgacaacaugaucacggagcuccugcagaaggaguacauggaccggcagggcaagaccccgcuggggcucguggaccuguucguguucagcaccuccuucuaccugaucagcaucuuccugcaccucguccgcaucccgacccaccggcacgugaucggcaagcccugccccaagccccaccgccugaaccacauggggaucugcuccugcggccuguacaagcacccgggggugcccgucaaguggaagcggugaggacuaguuauaagacugacuagcccgaugggccucccaacgggcccuccuccccuccuugcaccgagauuaaucaaaggcucuuuucagagccaccaaaaaaaaaaaaaaaaaaaaaaaaaaaaaaaaaaaaaaaaaaaaaaaaaaaaaaaaaaaaaaaaaaaaaaaaaaaaaaaaaaaaaaaaaaaaaaaaaaaaa

SEQ ID NO: 15029 - RNA, 1686 nt, Artificial Sequence
  mRNA product Design i-3 (hSL-A100) comprising derived and/or modified sequence from LASV(Lassa virus/H.sapiens-wt/NGA/2018/ISTH_0959;Clade II)__AVV65099__GPC (opt1)
aggagaaagcuuaccaugggccagaucaucaccuucuuccaggaggugccccacgucaucgaggaggugaugaacaucgugcugaucgcccucagccugcuggccauccucaaggggaucuacaacgucgugaccugcggccuguucgggcugguguccuuccuccugcugugcggccgcagcugcuccacgaccuacaagggggucuacgagcuccagacccuggagcuggacauggcgagccucaacaugaccaugccgcuguccugcacgaagaacaacagccaccacuacaucauggugggcaacgagaccggccuggagcucacccugaccaacacguccaucaucaaccacaaguucugcaaccugagcgacgcccacaagaagaaccucuacgaccacgcccugauguccaucaucagcaccuuccaccuguccauccccaacuucaaccaguacgaggccaugagcugcgacuucaacgggggcaagaucuccgugcaguacaaccucagccacgccuacgcgaucgacgccgccaaccacugcgggaccaucgccaacggcguccugcagaccuucaugcggauggcguggggcggguccuacaucgcccuggacagcggcaagggguccugggacugcaucaugacgagcuaccaguaccucaucauccagaacaccaccugggaggaccacugccaguucucccgccccagccccaucggcuaccuggggcugcucagccagcggacccgcgacaucuacaucucccggcgccugcugggcacguucaccuggacccucagcgacuccgagggcaacgagacccccgggggcuacugccugacgcgguggaugcugaucgaggccgagcucaagugcuucgggaacaccgccguggccaagugcaacgagaagcacgacgaggaguucugcgacaugcugcgccuguucgacuucaacaagcaggcgauccggcgccucaagaccgaggcccagaugagcauccagcugaucaacaaggccgugaacgcccugaucaacgaccagcucaucaugaagaaccaccuccgggacaucaugggcaucccguacugcaacuacuccaaguacugguaccugaaccacaccgucacggggaagaccagccugccccgcugcuggcugguguccaacggcagcuaccugaacgagacccacuucuccgacgacaucgagcagcaggccgacaacaugaucaccgagcuccugcagaaggaguacaucgaccggcagggcaagacgccccuggggcucguggaccuguucgucuucagcaccuccuucuaccugaucagcaucuuccugcaccucgugaagaucccgacccaccgccacgugaucggcaagcccugccccaagccccaccggcugaaccacauggggaucugcuccugcggccuguacaagcacccggggguccccgugaaguggaagcgcugaggacuaguuauaagacugacuagcccgaugggccucccaacgggcccuccuccccuccuugcaccgagauuaaucaaaggcucuuuucagagccaccaaaaaaaaaaaaaaaaaaaaaaaaaaaaaaaaaaaaaaaaaaaaaaaaaaaaaaaaaaaaaaaaaaaaaaaaaaaaaaaaaaaaaaaaaaaaaaaaaaaaa

SEQ ID NO: 15030 - RNA, 1686 nt, Artificial Sequence
  mRNA product Design i-3 (hSL-A100) comprising derived and/or modified sequence from LASV(LASV003-NIG-2008;Clade II)__AIT17580__GPC (opt1)
aggagaaagcuuaccaugggccagaucaucaccuucuuccaggaggugccccacgucaucgaggaggugaugaacaucgugcugaucgcccucagccugcuggccauccucaaggggaucuacaacgucgcgaccugcggccuguucgggcugguguccuuccuccugcugugcggccgcagcugcuccacgaccuacaaggggguguacgagcuccagacccuggagcuggacauggccagccucaacaugaccaugccgcuguccugcacgaagaacaacagccaccacuacaucauggucggcaacgagaccggccuggagcucacccugaccaacacguccaucaucaaccacaaguucugcaaccugagcgacgcccacaagaagaaccucuacgaccacgcccugauguccaucaucagcaccuuccaccuguccauccccaacuucaaccaguacgaggccaugagcugcgacuucaacgggggcaagaucuccgugcaguacaaccucagccacaccuacgcgguggacgccgccaaccacugcgggaccaucgccaacggcguccugcagacguucaugcggauggcguggggcggguccuacaucgcccuggacagcggcaagggguccugggacugcaucaugaccagcuaccaguaccucaucauccagaacaccaccugggaggaccacugccaguucucccgccccagccccaucggcuaccuggggcugcucagccagcggacgcgcgacaucuacaucucccggcgccugcugggcaccuucaccuggacccucagcgacuccgagagcaacgagacgccgggcggguacugccugacccgguggaugcugaucgaggccgagcucaagugcuucggcaacaccgccguggccaagugcaacgagaagcacgacgaggaguucugcgacaugcugcgccuguucgacuucaacaagcaggcgauccggcgccucaaggccgaggcccagauguccauccagcugaucaacaaggccgugaacgcccugaucaacgaccagcucaucaugaagaaccaccuccgggacaucauggggauccccuacugcaacuacagcaaguacugguaccugaaccacaccgucacgggccgcaccucccugccccggugcuggcuggugagcaacggguccuaccugaacgagacccacuucagcgacgacaucgagcagcaggcggacaacaugaucaccgagcuccugcagaaggaguacauggaccgccagggcaagacgccccugggccucguggaccuguucgucuucuccaccagcuucuaccugaucuccaucuuccugcaccucgugaagaucccgacccaccggcacgugaucgggaagcccugccccaagccccaccgccugaaccacaugggcaucugcagcugcgggcuguacaagcacccgggcguccccgugaaguggaagcggugaggacuaguuauaagacugacuagcccgaugggccucccaacgggcccuccuccccuccuugcaccgagauuaaucaaaggcucuuuucagagccaccaaaaaaaaaaaaaaaaaaaaaaaaaaaaaaaaaaaaaaaaaaaaaaaaaaaaaaaaaaaaaaaaaaaaaaaaaaaaaaaaaaaaaaaaaaaaaaaaaaaaa

SEQ ID NO: 15031 - RNA, 1686 nt, Artificial Sequence
  mRNA product Design i-3 (hSL-A100) comprising derived and/or modified sequence from LASV(LASV035-NIG-2009;Clade II)__AIT17588__GPC (opt1)
aggagaaagcuuaccaugggccagaucaucaccuucuuccaggaggugccccacgucaucgaggaggugaugaacaucgugcugaucgcccucagccugcuggccauccucaaggggaucuacaacgucgcgaccugcggccuguucgggcugguguccuuccuccugcugugcggccgcagcugcuccacgaccuacaaggggguguacgagcuccagacccuggagcuggacauggccagccucaacaugaccaugccgcuguccugcacgaagaacaacagccaccacuacaucauggucggcaacgagaccggccuggagcucacccugaccaacacguccaucaucaaccacaaguucugcaaccugagcgacgcccacaagaagaaccucuacgaccacgcccugauguccaucaucagcaccuuccaccuguccauccccaacuucaaccaguacgaggccaugagcugcgacuucaacgggggcaagaucuccgugcaguacaaccucagccacgcguacgccguggacgccgccaaccacugcgggaccaucgcgaacggcguccugcagaccuucaugcggauggccuggggcggguccuacaucgcccuggacagcggcaagggguccugggacugcaucaugacgagcuaccaguaccucaucauccagaacaccaccugggaggaccacugccaguucucccgccccagccccaucggcuaccuggggcugcucagccagcggacccgcgacaucuacaucucccggcgccugcugggcacguucaccuggacccucagcgacuccgagggcaacgagacccccgggggcuacugccugacgcgguggaugcugaucgaggccgagcucaagugcuucgggaacaccgccguggcgaagugcaacgagaagcacgacgaggaguucugcgacaugcugcgccuguucgacuucaacaagcaggccauccggcgccucaaggccgaggcccagaugagcauccagcugaucaacaaggccgugaacgcgcugaucaacgaccagcucaucaugaagaaccaccuccgggacaucaugggcauccccuacugcaacuacuccaaguacugguaccugaaccacaccgucaccgggaagacgagccugccccgcugcuggcugguguccaacggcagcuaccugaacgagacccacuucuccgacgacaucgagcagcaggccgacaacaugaucaccgagcuccugcagaaggaguacaucgaccggcagggcaagaccccgcuggggcucguggaccuguucgucuucagcacguccuucuaccugaucagcaucuuccugcaccucgugaagaucccgacccaccgccacgugaucggcaagcccugccccaagccccaccggcugaaccacauggggaucugcuccugcggccuguacaagcacccggggguccccgugaaguggaagcgcugaggacuaguuauaagacugacuagcccgaugggccucccaacgggcccuccuccccuccuugcaccgagauuaaucaaaggcucuuuucagagccaccaaaaaaaaaaaaaaaaaaaaaaaaaaaaaaaaaaaaaaaaaaaaaaaaaaaaaaaaaaaaaaaaaaaaaaaaaaaaaaaaaaaaaaaaaaaaaaaaaaaaa

SEQ ID NO: 15032 - RNA, 1686 nt, Artificial Sequence
  mRNA product Design i-3 (hSL-A100) comprising derived and/or modified sequence from LASV(LASV1000-NIG-2009;Clade II)__AIT17782__GPC (opt1)
aggagaaagcuuaccaugggccagaucaucaccuucuuccaggaggugccccacgucaucgaggaggugaugaacaucgugcugaucgcccucagccugcuggccauccucaaggggaucuacaacgucgcgaccugcggccuguucgggcugguguccuuccuccugcugugcggccgcagcugcuccacgaccuacaaggggguguacgagcuccagacccuggagcuggacauggccagccucaacaugaccaugccgcuguccugcacgaagaacaacagccaccacuacaucauggucggcaacgagaccggccuggagcucacccugaccaacacguccaucaucaaccacaaguucugcaaccugagcgacgcccacaagaagaaccucuacgaccacgcccugauguccaucaucagcaccuuccaccuguccauccccaacuucaaccaguacgaggccaugagcugcgacuucaacgggggcaagaucuccgugcaguacaaccucagccacaccuacgcgguggacgccgccaaccacugcgggaccaucgccaacggcguccugcagacguucaugcggauggcguggggcggguccuacaucgcccuggacagcggcaagggguccugggacugcaucaugaccagcuaccaguaccucaucauccagaacaccaccugggaggaccacugccaguucucccgccccagccccaucggcuaccuggggcugcucagccagcggacgcgcgacaucuacaucucccggcgccugcugggcaccuucaccuggacccucagcgacuccgagggcaacgagacgcccgggggcuacugccugacccgguggaugcugaucgaggccgagcucaagugcuucgggaacaccgccguggccaagugcaacgagaagcacgacgaggaguucugcgacaugcugcgccuguucgacuucaacaagcaggcgaucaagcggcucaagaccgaggcccagaugagcauccagcugaucaacaaggccgugaacgcccugaucaacgaccagcucaucaugaagaaccaccuccgcgacaucaugggcauccccuacugcaacuacuccaaguacugguaccugaaccacacggucaccgggaagaccagccugccccggugcuggcugguguccaacggcagcuaccugaacgagacccacuucuccgacgacaucgagcagcaggccgacaacaugaucacggagcuccugcagaaggaguacaucgaccgccagggcaagaccccgcuggggcucguggaccuguucgucuucagcaccuccuucuaccugaucagcaucuuccugcaccucgugaagaucccgacccaccggcacguggucggcaagcccugccccaagccccaccgccugaaccacauggggaucugcuccugcggccuguacaagcacccgggggugcccgugaaguggaagcggugaggacuaguuauaagacugacuagcccgaugggccucccaacgggcccuccuccccuccuugcaccgagauuaaucaaaggcucuuuucagagccaccaaaaaaaaaaaaaaaaaaaaaaaaaaaaaaaaaaaaaaaaaaaaaaaaaaaaaaaaaaaaaaaaaaaaaaaaaaaaaaaaaaaaaaaaaaaaaaaaaaaaa

SEQ ID NO: 15033 - RNA, 1686 nt, Artificial Sequence
  mRNA product Design i-3 (hSL-A100) comprising derived and/or modified sequence from LASV(LASV221-NIG-2010;Clade II)__AIT17624__GPC (opt1)
aggagaaagcuuaccaugggccagaucaucaccuucuuccaggaggugccccacgucaucgaggaggugaugaacaucgugcugaucgcccucagccugcuggccauccucaaggggaucuacaacgucgcgaccugcggccuguucgggcugguguccuuccuccugcugugcggccgcagcugcuccacgaccuacaaggggguguacgagcuccagacccuggagcuggacauggccagccucaacaugaccaugccgcuguccugcacgaagaacaacagccaccacuacaucauggucggcaacgagaccggccuggagcucacccugaccaacacguccaucaucaaccacaaguucugcaaccugagcgacgcccacaagaagaaccucuacgaccacgcccugauguccaucaucagcaccuuccaccuguccauccccaacuucaaccaguacgaggccaugagcugcgacuucaacgggggcaagaucuccgugcaguacaaccucagccacaccuacgcgaucgacgccgccaaccacugcgggaccaucgccaacggcgugcugcagacguucaugcggauggcguggggcggguccuacaucgcccuggacagcggcaagggguccugggacugcaucaugaccagcuaccaguaccucaucauccagaacaccaccugggaggaccacugccaguucucccgccccagccccaucggcuaccuggggcugcucagccagcggacgcgcgacaucuacaucucccggcgccugcugggcaccuucaccuggacccucagcgacuccgagggcaacgagacgcccgggggcuacugccugacccgguggaugcugaucgaggccgagcucaagugcuucgggaacaccgccgucgccaagugcaacgagaagcacgacgaggaguucugcgacaugcugcgccuguucgacuucaacaagcaggcgauccggcgccucaagaccgaggcccagaugagcauccagcugaucaacaaggccgugaacgcccugaucaacgaccagcucaucaugaagaaccaccuccgggacaucaugggcauccccuacugcaacuacuccaaguacugguaccugaaccacacggugaccgggaagaccagccugccccgcugcuggcuggucuccaacggcagcuaccugaacgagacccacuucuccgacgacaucgagcagcaggccgacaacaugaucacggagaugcuccagaaggaguacauggaccggcagggcaagaccccgcuggggcugguggaccucuucguguucagcaccuccuucuaccugaucagcaucuuccugcaccuggucaagaucccgacccaccgccacgugaucggcaagcccugccccaagccccaccggcucaaccacauggggaucugcuccugcggccuguacaagcacccgggggugcccgucaaguggaagcgcugaggacuaguuauaagacugacuagcccgaugggccucccaacgggcccuccuccccuccuugcaccgagauuaaucaaaggcucuuuucagagccaccaaaaaaaaaaaaaaaaaaaaaaaaaaaaaaaaaaaaaaaaaaaaaaaaaaaaaaaaaaaaaaaaaaaaaaaaaaaaaaaaaaaaaaaaaaaaaaaaaaaaa

SEQ ID NO: 15034 - RNA, 1686 nt, Artificial Sequence
  mRNA product Design i-3 (hSL-A100) comprising derived and/or modified sequence from LASV(LASV237-NIG-2010;Clade II)__AIT17638__GPC (opt1)
aggagaaagcuuaccaugggccagaucaucaccuucuuccaggaggugccccacgucaucgaggaggugaugaacaucgugcugaucgcccucagccugcuggccauccucaaggggaucuacaacgucgcgaccugcggccuguucgggcugguguccuuccuccugcugugcggccgcagcugcuccacgaccuacaaggggguguacgagcuccagacccuggagcuggacauggccagccucaacaugaccaugccgcuguccugcacgaagaacaacagccaccacuacaucauggucggcaacgagaccggccuggagcucacccugaccaacacguccaucaucaaccacaaguucugcaaccugagcgacgcccacaagaaggaccucuacgaccacgcccugauguccaucaucagcaccuuccaccuguccauccccaacuucaaccaguacgaggccaugagcugcgacuucaacgggggcaagaucuccgugcaguacaaccucagccacaccuacgcgguggacgccgccaaccacugcgggaccaucgccaacggcguccugcagacguucaugcggauggcguggggcggguccuacaucgcccuggacagcggcaagggguccugggacugcaucaugaccagcuaccaguaccucaucauccagaacaccaccugggaggaccacugccaguucucccgccccagccccaucggcuaccuggggcugcucagccagcggacgcgcgacaucuacaucucccggcgccugcugggcaccuucaccuggacccucagcgacuccgagggcaacgagacgcccgggggcuacugccugacccgguggaugcugaucgaggccgagcucaagugcuucgggaacaccgccguggccaagugcaacgagaagcacgacgaggaguucugcgacaugcugcgccuguucgacuucaacaagcaggcgauccggcgccucaagaccgaggcccagaugagcauccagcugaucaacaaggccgugaacgcccugaucaacgaccagcucaucaugaagaaccaccuccgggacaucaugggcauccccuacugcaacuacuccaaguacugguaccugaaccacacggucaccgggaagaccagccugccccgcugcuggcugguguccaacggcagcuaccugaacgagacccacuucuccgacgacaucgagcagcaggccgacaacaugaucacggagcuccugcagaaggaguacauggaccggcagggcaagaccccgcuggggcucguggaccuguucgucuucagcaccuccuucuaccugaucagcaucuuccugcaccucaucaagaucccgacccaccgccacaucacgggcaagcccugccccaagccccaccggcugaaccacauggggaucugcuccugcggccuguacaagcacccgggggugcccgugaaguggaagcgcugaggacuaguuauaagacugacuagcccgaugggccucccaacgggcccuccuccccuccuugcaccgagauuaaucaaaggcucuuuucagagccaccaaaaaaaaaaaaaaaaaaaaaaaaaaaaaaaaaaaaaaaaaaaaaaaaaaaaaaaaaaaaaaaaaaaaaaaaaaaaaaaaaaaaaaaaaaaaaaaaaaaaa

SEQ ID NO: 15035 - RNA, 1686 nt, Artificial Sequence
  mRNA product Design i-3 (hSL-A100) comprising derived and/or modified sequence from LASV(LASV253-NIG-2011;Clade II)__AIT17670__GPC (opt1)
aggagaaagcuuaccaugggccagaucaucaccuucuuccaggaggugccccacgucaucgaggaggugaugaacaucgugcugaucgcccucagccugcuggccauccucaaggggaucuacaacgucgcgaccugcggccuguucgggcugguguccuuccuccugcugugcggccgcagcugcuccacgaccuacaaggggguguacgagcuccagacccuggagcuggacauggccagccucaacaugaccaugccgcuguccugcacgaagaacaacagccaccacuacaucauggucggcaacgagaccggccuggagcucacccugaccaacacguccaucaucaaccacaaguucugcaaccugagcgacgcccacaagaagaaccucuacgaccacgcccugauguccaucaucagcaccuuccaccuguccauccccaacuucaaccaguacgaggccaugagcugcgacuucaacgggggcaagaucuccgugcaguacaaccucagccacaccuacgcgguggacgccgccaaccacugcgggaccaucgccaacggcguccugcagacguucaugcggauggcguggggcggguccuacaucgcccuggacagcggcaagggguccugggacugcaucaugaccagcuaccaguaccucaucauccagaacaccaccugggaggaccacugccaguucucccgccccagccccaucggcuaccuggggcugcucagccagcggacgcgcgacaucuacaucucccggcgccugcugggcaccuucaccuggacccucagcgacuccgagggcaacgagacgcccgggggcuacugccugacccgguggaugcugaucgaggccgagcucaagugcuucgggaacaccgccguggccaagugcaacgagaagcacgacgaggaguucugcgacaugcugcgccuguucgacuucaacaagcaggcgauccggcgccucaaggccgaggcccagaugagcauccagcugaucaacaaggccgugaacgcccugaucaacgaccagcucaucaugaagaaccaccuccgggacaucaugggcaucccguacugcaacuacuccaaguacugguaccugaaccacaccgucacggggcgcaccagccugccccggugcuggcugguguccaacggcagcuaccugaacgagacccacuucuccgacgacaucgagcagcaggcggacaacaugaucaccgagcuccugcagaaggaguacaucgaccgccagggcaagacgccccuggggcucguggaccuguucgucuucagcaccuccuucuaccugaucagcaucuuccugcaccucgugaagaucccgacccaccggcacaucaucggcaagcccugccccaagccccaccgccugaaccacauggggaucugcuccugcggccuguacaagcacccgggggugcccgucaaguggaagcggugaggacuaguuauaagacugacuagcccgaugggccucccaacgggcccuccuccccuccuugcaccgagauuaaucaaaggcucuuuucagagccaccaaaaaaaaaaaaaaaaaaaaaaaaaaaaaaaaaaaaaaaaaaaaaaaaaaaaaaaaaaaaaaaaaaaaaaaaaaaaaaaaaaaaaaaaaaaaaaaaaaaaa

SEQ ID NO: 15036 - RNA, 1686 nt, Artificial Sequence
  mRNA product Design i-3 (hSL-A100) comprising derived and/or modified sequence from LASV(LASV254-NIG-2011;Clade II)__AIT17674__GPC (opt1)
aggagaaagcuuaccaugggccagaucaucaccuucuuccaggaggugccccacgucaucgaggaggugaugaacaucgugcugaucgcccucagccugcuggccauccucaaggggaucuacaacgucgcgaccugcggccuguucgggcugguguccuuccuccugcugugcggccgcagcugcuccacgaccuacaaggggguguacgagcuccagacccuggagcuggacaugaccaaccucaacaugacgaugccgcugagcugcaccaagaacaacucccaccacuacaucauggucggcaacgagaccggccuggagcucacccugacgaacaccagcaucaucaaccacaaguucugcaaccuguccgacgcccacaagaagaaccucuacaaccacgcccugaugagcaucaucuccaccuuccaccugagcauccccaacuucaaccaguacgaggccauguccugcgacuucaacgggggcaagaucagcgugcaguacaaccucucccacagcuacgccguggacgcggccaaccacugcgggaccaucgccaacggcguccugcagacguucaugcggauggccuggggcggguccuacaucgcgcuggacagcggcaaggggaacugggacugcaucaugaccuccuaccaguaccucaucauccagaacaccaccugggaggaccacugccaguucagccgccccucccccaucggcuaccuggggcugcucagccagcggacgcgcgacaucuacaucagccggcgccugcugggcaccuucaccuggacccucuccgacagcgagggcaacgagacgcccgggggcuacugccugacccgguggaugcugaucgaggccgagcucaagugcuucgggaacaccgccguggccaagugcaacgagaagcacgacgaggaguucugcgacaugcugcgccuguucgacuucaacaagcaggccauccggcgccucaagaccgaggcgcaggccaacauccagcugaucaacaaggccgugaacgcccugaucaacgaccagcucaucaugaagaaccaccuccgggacaucaugggcauccccuacugcaacuacuccaaguacugguaccugaaccacacggucaccgggaagaccagccugccccgcugcuggcugguguccaacggcagcuaccugaacgagacccacuucuccgacgacaucgagcagcaggccgacaacaugaucacggagcuccugcagaaggaguacauggaccggcagggcaagaccccgcuggggcucguggaccuguucgucuucagcaccuccuucuaccugaucagcaucuuccugcaccucgugaagaucccgacccaccgccacgugaucggcaagcccugccccaagccccaccggcugaaccacauggggaucugcuccugcggccuguacaagcacccggggguccccgugaaguggaagcgcugaggacuaguuauaagacugacuagcccgaugggccucccaacgggcccuccuccccuccuugcaccgagauuaaucaaaggcucuuuucagagccaccaaaaaaaaaaaaaaaaaaaaaaaaaaaaaaaaaaaaaaaaaaaaaaaaaaaaaaaaaaaaaaaaaaaaaaaaaaaaaaaaaaaaaaaaaaaaaaaaaaaaa

SEQ ID NO: 15037 - RNA, 1686 nt, Artificial Sequence
  mRNA product Design i-3 (hSL-A100) comprising derived and/or modified sequence from LASV(Nig08-A19;Clade III)__ADU56618__GPC (opt1)
aggagaaagcuuaccaugggccagaucgugaccuucuuccaggaggucccccacgugaucgaggaggugaugaacaucguccugaucgcccucagcauccuggccauccugaaggggcucuacaacaucgcgaccugcggccugaucgggcuggugacguuccuccugcuguccggccgcagcugcuccaugaccuacaaggggguguacgagcuccagacccuggagcugaacaugaacacccucaacaugacgaugccgcugagcugcaccaagaacaacucccaccacuacaucauggucggcaacgagaccggccuggagcucacccugacgaacaccagccugcuccaccacaaguucugcaaccuguccgacgcccacaagaagaaccuguacgaccacacccucaugagcaucaucuccaccuuccaccugagcauccccaacuucaaccaguacgaggccauguccugcgacuucaacgggggcaagaucacggugcaguacaaccugagccacuccuacgccaucgacgccgcgaaccacugcgggaccguggccaacggcguccuccagaccuucaugcggauggccuggggcgggagcuacaucgcccuggacuccggccgcgggaagugggacugcaucaugaccagcuaccaguaccugaucauccagaacacgaccugggaggaccacugccaguucucccggcccagccccaucggcuaccucgggcugcugucccagcgcacccgggacaucuacaucagccgccggcuccugggcaccuucacguggacccugagcgacuccgagggcaacgagacccccgggggcuacugccucacccgcuggaugcugaucgaggcggagcugaagugcuucgggaacacggccguggccaagugcaacgagaagcacgacgaggaguucugcgacaugcuccggcuguucgacuucaacaagcaggccauccgccggcugaaggccgaggcgcagaugagcauccagcucaucaacaaggccgugaacgcccugaucaacgaccagcugaucaugaagaaccaccuccgcgacaucaugggcauccccuacugcaacuacuccaaguacugguaccugaaccacaccagcaccgggcggaccucccugccccgcugcuggcucgucagcaacggcuccuaccugaacgagacgcacuucagcgacgacaucgagcagcaggccgacaacaugaucaccgagaugcugcagaaggaguaccucgaccggcagggcaagaccccgcuggggcugguggaccuguucguguucuccaccagcuucuaccucaucuccaucuuccugcaccuggucaagaucccgacgcaccgccacaucgugggcaagcccugccccaagccccaccggcucaaccacauggggaucugcagcugcggccuguacaagcagccgggggugcccguccgcuggaagcggugaggacuaguuauaagacugacuagcccgaugggccucccaacgggcccuccuccccuccuugcaccgagauuaaucaaaggcucuuuucagagccaccaaaaaaaaaaaaaaaaaaaaaaaaaaaaaaaaaaaaaaaaaaaaaaaaaaaaaaaaaaaaaaaaaaaaaaaaaaaaaaaaaaaaaaaaaaaaaaaaaaaaa

SEQ ID NO: 15038 - RNA, 1689 nt, Artificial Sequence
  mRNA product Design i-3 (hSL-A100) comprising derived and/or modified sequence from LASV(G1180-SLE-2010;Clade IV)__AIT17168__GPC (opt1)
aggagaaagcuuaccaugggccagaucgugaccuucuuccaggaggucccccacgugaucgaggaggugaugaacaucguccugaucgcccucagcauccuggccgugcugaaggggcucuacaacuucgcgaccugcggccugguggggcugcucaccuuccugcugcucugcggccgcuccugcaccgccagccgguacaagggggucuacgagcugcagacccuggagcucaacauggagacccugaacaugacgaugccgcuguccugcaccaagaacaacagccaccacuacaucauggugggcaacgagaccggccucgagcugacccugacgaacaccuccaucaucaaccacaaguucugcaaccucagcgacgcccacaagaagaaccuguacgaccacgcccugauguccaucaucagcaccuuccaccucuccauccccaacuucaaccaguacgaggccaugagcugcgacuucaacgggggcaagaucuccgugcaguacaaccugagccacuccuacgcgggggacgccgccaaccacugcggcaccgucgccaacggggugcugcagacguucaugcgcauggcguggggcggcagcuacaucgcccucgacuccgggcacggcagcugggacugcaucaugaccuccuaccaguaccugaucauccagaacaccaccugggaggaccacugccaguucagccggcccucccccaucggguaccugggccuccugagccagcgcacgcgggacaucuacaucagccgccggcugcucggcaccuucaccuggacccuguccgacagcgaggggaaggacacgccgggcggguacugccugacccgcuggaugcucaucgaggccgagcugaagugcuucggcaacaccgccguggccaagugcaacgagaagcacgacgaggaguucugcgacaugcugcggcuguucgacuucaacaagcaggcgauccagcgccugaaggccgaggcccagauguccauccagcugaucaacaaggccgucaacgcccucaucaacgaccagcugaucaugaagaaccaccuccgggacaucauggggauccccuacugcaacuacagcaaguacugguaccucaaccacaccacgaccggcaagaccucccugcccaagugcuggcuggugagcaacggcuccuaccucaacgagacccacuucagcgacgacaucgagcagcaggcggacaacaugaucacggagaugcugcagaaggaguacauggagcgccaggggaagacgccccugggccucguggaccuguucgucuucuccaccagcuucuaccugaucuccaucuuccugcaccucgugaagaucccgacccaccggcacaucgugggcaagagcugccccaagccccaccgccugaaccacauggggaucugcuccugcgggcuguacaagcagcccggcgucccggugaaguggaagcggugaggacuaguuauaagacugacuagcccgaugggccucccaacgggcccuccuccccuccuugcaccgagauuaaucaaaggcucuuuucagagccaccaaaaaaaaaaaaaaaaaaaaaaaaaaaaaaaaaaaaaaaaaaaaaaaaaaaaaaaaaaaaaaaaaaaaaaaaaaaaaaaaaaaaaaaaaaaaaaaaaaaaa

SEQ ID NO: 15039 - RNA, 1689 nt, Artificial Sequence
  mRNA product Design i-3 (hSL-A100) comprising derived and/or modified sequence from LASV(G1442-SLE-2011;Clade IV)__AIT17180__GPC (opt1)
aggagaaagcuuaccaugggccagaucgugaccuucuuccaggaggucccccacgugaucgaggaggugaugaacaucguccugaucgcccucagcauccuggccgugcugaaggggcucuacaacguggcgaccugcggccugaucgggcuggucacguuccuccugcugugcggccgcuccugcaccaccacccucuacaaggggguguacgagcugcagacgcuggagcucaacauggagacccugaacaugaccaugccgcugagcugcaccaagaacaacucccaccacuacauccgggugggcaacgagacgggccucgagcugacccugaccaacaccagcaucaucaaccacaaguucugcaaccucuccgacgcccacaagaagaaccuguacgaccacgcccugaugagcaucaucuccacguuccaccucagcauccccaacuucaaccaguacgaggccauguccugcgacuucaacgggggcaagaucagcguccaguacaaccugucccacagcuacgccggggacgcggccaaccacugcggcaccguggccaacggggugcugcagaccuucaugcgcauggccuggggcggcuccuacaucgcgcucgacagcgggcggggcaacugggacugcaucaugaccuccuaccaguaccugaucauccagaacacgaccugggacgaccacugccaguucagccgccccucccccaucggguaccugggccuccugagccagcggacccgcgacgucuacaucucccggcgccugcucggcaccuucacguggacccugagcgacagcgaggggaaggacaccccgggcggguacugccugacccgguggaugcucaucgaggccgagcugaagugcuucggcaacacggccguggccaagugcaacgagaagcacgacgaggaguucugcgacaugcugcgccucuucgacuucaacaagcaggccauccagcggcugaaggcggaggcccagauguccauccagcugaucaacaaggccgugaacgcccucaucaacgaccagcugaucaugaagaaccaccuccgcgacaucauggggauccccuacugcaacuacagcaaguacugguaccugaacaacaccgccaccggcaagaccucccugcccaagugcuggcugaucagcaacggcuccuaccucaacgagacgcacuucagcgacgacaucgagcaggaggcggacaacaugaucaccgagaugcugcagaaggaguacauggagcggcaggggaagacgccccugggccucgucgaccuguucguguucuccaccagcuucuaccugaucuccaucuuccugcaccucgugaagaucccgacccaccgccacaucgucggcaagagcugccccaagccccaccggcugaaccacauggggaucugcuccugcgggcuguacaagcagcccggcgugccggugcgcuggaagcggugaggacuaguuauaagacugacuagcccgaugggccucccaacgggcccuccuccccuccuugcaccgagauuaaucaaaggcucuuuucagagccaccaaaaaaaaaaaaaaaaaaaaaaaaaaaaaaaaaaaaaaaaaaaaaaaaaaaaaaaaaaaaaaaaaaaaaaaaaaaaaaaaaaaaaaaaaaaaaaaaaaaaa

SEQ ID NO: 15040 - RNA, 1689 nt, Artificial Sequence
  mRNA product Design i-3 (hSL-A100) comprising derived and/or modified sequence from LASV(G3010-SLE-2013;Clade IV)__AIT17344__GPC (opt1)
aggagaaagcuuaccaugggccagaucgugaccuucuuccaggaggucccccacgugaucgaggaggugaugaacaucguccugaucgcccucagcauccuggccgugcugaaggggcucuacaacuucgcgaccugcggccugguggggcuggucacguuccuccugcugugcggccgcuccugcaccaccagccucuacaaggggguguacgagcugcagacccuggagcucaacauggagacgcugaacaugaccaugccgcuguccugcaccaagaacaacagccaccacuacaucauggugggcaacgagaccggccucgagcugacgcugaccaacaccuccaucaucaaccacaaguucugcaaccucagcgacgcccacaagaagaaccuguacaaccacgcccugauguccaucaucagcaccuuccaccucuccauccccaacuucaaccaguacgaggccaugagcugcgacuucaacgggggcaagaucuccguccaguacaaccugagccacuccuacgccggggacgcggccagccacugcggcacgguggccaacggggugcugcagaccuucaugcggauggccuggggcggcuccuacaucgcgcucgacagcggguacggcaagugggacugcaucaugaccuccuaccaguaccugaucauccagaacaccacgugggaggaccacugccaguucagccgccccucccccaucggguaccugggccuccugagccagcggacccgcgacaucuacaucagccggcgccugcucggcaccuucaccuggacgcuguccgacagcgaggggaaggacaccccgggcggguacugccugacccgguggaugcucaucgaggccgagcugaagugcuucggcaacaccgccgucgccaagugcaacgagaagcacgacgaggaguucugcgacaugcugcgccucuucgacuucaacaagcaggccauccagcggcugaagacggaggcgcagauguccauccagcugaucaacaaggccgugaacgcccucaucaacgaccagcugaucaugaagaaccaccuccgcgacaucauggggauccccuacugcaacuacagcaaguacugguaccugaaccacaccaccaccggcaagacgucccugcccaagugcuggcuggugagcaacggcuccuaccucaacgagacccacuucagcgacgacaucgagcagcaggccgacaacaugaucaccgagaugcugcagaaggaguacauggagcggcaggggaagacgccccugggccucgucgaccuguucguguucuccaccagcuucuaccugaucuccaucuuccugcaccucgugaagaucccgacccaccgccacaucgucggcaagagcugccccaagccccaccggcugaaccacauggggaucugcuccugcgggcuguacaagcagcccggcgugccggugcgcuggaagcggugaggacuaguuauaagacugacuagcccgaugggccucccaacgggcccuccuccccuccuugcaccgagauuaaucaaaggcucuuuucagagccaccaaaaaaaaaaaaaaaaaaaaaaaaaaaaaaaaaaaaaaaaaaaaaaaaaaaaaaaaaaaaaaaaaaaaaaaaaaaaaaaaaaaaaaaaaaaaaaaaaaaaa

SEQ ID NO: 15041 - RNA, 1689 nt, Artificial Sequence
  mRNA product Design i-3 (hSL-A100) comprising derived and/or modified sequence from LASV(G502-SLE-2009;Clade IV)__AIT17126__GPC (opt1)
aggagaaagcuuaccaugggccagaucgugaccuucuuccaggaggucccccacgugaucgaggaggugaugaacaucguccugaucgcccucagcauccuggccgugcugaaggggcucuacaacuucgcgaccugcggccugguggggcugcucacguuccugcugcucugcggccgcuccugcaccaccgggcuguacaagggcgucuacgagcugcagacccucgagcugaacauggagacgcugaacaugaccaugccgcucagcugcaccaagaacaacucccaccacuacaucauggugggcaacgagaccgggcuggagcugacgcucaccaacaccagcaucaucaaccacaaguucugcaaccuguccgacgcccacaagaagaaccuguacgaccacgcccucaugagcaucaucuccaccuuccaccugagcauccccaacuucaaccaguacgaggccauguccugcgacuucaacggcgggaagaucagcgugcaguacaaccugucccacagcuacgccggcgacgcggccgaccacugcgggacggucgccaacggcgugcuccagaccuucaugcggauggccuggggcggguccuacaucgcgcuggacagcggccgcgggcggugggacugcaucaugaccuccuaccaguaccugaucauccagaacaccacgugggaggaccacugccaguucagccgccccucccccaucggcuaccucggccugcugagccagcggacccgcgacaucuacaucucccggcgccuccuggggaccuucaccuggacgcugagcgacagcgagggcaaggacacccccgggggcuacugccucacccgguggaugcugaucgaggccgagcugaagugcuucgggaacaccgccguggccaagugcaacgagaagcacgacgaggaguucugcgacaugcuccgccuguucgacuucaacaagcaggccauccagcggcugaaggcggaggcccagauguccauccagcucaucaacaaggccgucaacgcccugaucaacgaccagcuggugaugaagaaccaccuccgcgacaucaugggcauccccuacugcaacuacagccgguacugguaccugaaccacacgaccaccggccgcaccucccugcccaagugcuggcucgugagcaacggguccuaccugaacgagacgcacuucagcgacgacaucgagcagcaggccgacaacaugaucaccgagaugcugcagaaggaguacauggagcggcagggcaagaccccgcucgggcuggucgaccuguucguguucuccaccagcuucuaccugaucuccaucuuccuccaccuggugaagaucccgacgcaccgccacaucgucggcaagagcugccccaagccccaccggcugaaccacauggggaucugcuccugcggccucuacaagcagcccggcgugccggugaaguggaagcgcugaggacuaguuauaagacugacuagcccgaugggccucccaacgggcccuccuccccuccuugcaccgagauuaaucaaaggcucuuuucagagccaccaaaaaaaaaaaaaaaaaaaaaaaaaaaaaaaaaaaaaaaaaaaaaaaaaaaaaaaaaaaaaaaaaaaaaaaaaaaaaaaaaaaaaaaaaaaaaaaaaaaaa

SEQ ID NO: 15042 - RNA, 1689 nt, Artificial Sequence
  mRNA product Design i-3 (hSL-A100) comprising derived and/or modified sequence from LASV(G733-SLE-2010;Clade IV)__AIT17154__GPC (opt1)
aggagaaagcuuaccaugggccagaucgugaccuucuuccaggaggucccccacgugaucgaggaggugaugaacaucguccugaucgcccucagcauccuggccgugcugaaggggcucuacaacuucgcgaccugcggcaucguggggcuggucuccuuccugcuccugugcggccgcagcugcacgaccucccuguacaaggggguguacgagcuccagacccuggagcugaacauggagacccucaacaugacgaugccgcugagcugcaccaagaacaacucccaccacuacaucauggugggcaacgagaccggccuggagcucacccugacgaacaccagcaucaucaaccacaaguucugcaaccuguccgacgcccacaagaagaaccucuacgaccacgcccugaugagcaucaucuccaccuuccaccugagcauccccaacuucaaccaguacgaggccauguccugcgacuucaacgggggcaagaucagcguccaguacaaccucucccacagcuacgccggggacgcggccaaccacugcggcaccaucgccaacggggugcugcagacguucaugcggauggccuggggcggcuccuacaucgcgcuggacagcgggcgcgaccggugggacugcaucaugaccuccuaccaguaccucaucauccagaacaccaccugggaggaccacugccaguucagccgccccucccccaucggcuaccuggggcugcucagccagcggacgcgcgacaucuacaucagccggcgccugcugggcaccuucaccuggacccucuccgacagcgagggcaaggacacgcccgggggcuacugccugacccgguggaugcugaucgaggccgagcucaagugcuucgggaacaccgccguggccaagugcaacgagaagcacgacgaggaguucugcgacaugcugcgccuguucgacuucaacaagcaggccauccagcggcucaaggcggaggcccagauguccauccagcugaucaacaaggccgucaacgcccugaucaacgaccagcucaucaugaagaaccaccuccgcgacaucaugggcauccccuacugcaacuacagcaaguacugguaccugaaccacaccacgaccgggaagaccucccugcccaagugcuggcuggugagcaacggcuccuaccugaacgagacccacuucagcgacgacaucgagcagcaggccgacaacaugaucacggagaugcuccagaaggaguacauggagcggcagggcaagaccccgcuggggcugguggaccucuucgucuucuccaccagcuucuaccugaucuccaucuuccugcaccuggugaagaucccgacccaccgccacguggucggcaagagcugccccaagccccaccggcucaaccacauggggaucugcuccugcggccuguacgggcagcccggcgugccggugaaguggaagcgcugaggacuaguuauaagacugacuagcccgaugggccucccaacgggcccuccuccccuccuugcaccgagauuaaucaaaggcucuuuucagagccaccaaaaaaaaaaaaaaaaaaaaaaaaaaaaaaaaaaaaaaaaaaaaaaaaaaaaaaaaaaaaaaaaaaaaaaaaaaaaaaaaaaaaaaaaaaaaaaaaaaaaa

SEQ ID NO: 15043 - RNA, 1689 nt, Artificial Sequence
  mRNA product Design i-3 (hSL-A100) comprising derived and/or modified sequence from MOPV/LASV reassortant(IGS-1;Clade IV)__AFY05576__GPC (opt1)
aggagaaagcuuaccaugggccagaucgugaccuucuuccaggaggucccccacgugaucgaggaggugaugaacaucguccugaucgcccucagcgugcuggccgugcugaaggggcucuacaacuucgcgaccugcggccuggucgggcuggugacguuccuccugcugugcggccgcuccugcaccaccagccucuacaaggggguguacgagcugcagacccuggagcucaacauggagacgcugaacaugaccaugccgcuguccugcaccaagaacaacagccaccacuacaucauggucggcaacgagaccggccucgagcugacgcugaccaacaccuccaucaucaaccacaaguucugcaaccucagcgacgcccacaagaagaaccuguacgaccacgcccugauguccaucaucagcaccuuccaccucuccauccccaacuucaaccaguacgaggccaugagcugcgacuucaacgggggcaagaucuccgugcaguacaaccugagccacuccuacgccggggacgcggccaaccacugcggcacgguggccaacgggguccugcagaccuucaugcggauggccuggggcggcagcuacaucgcgcucgacuccgggcgcggcaacugggacugcaucaugaccagcuaccaguaccugaucauccagaacaccacgugggaggaccacugccaguucucccggcccagccccaucggguaccugggccuccugucccagcgcacccgggacaucuacaucagccgccggcugcucggcaccuucaccuggacgcugagcgacuccgagggggaggacaccccgggcggguacugccugacccgcuggaugcucaucgaggccgagcugaagugcuucggcaacaccgccguggccaagugcaacgagaagcacgacgaggaguucugcgacaugcugcggcuguucgacuucaacaagcaggccauccagcgccugaaggcggaggcccagaugagcauccagcugaucaacaaggccgugaacgcccucaucaacgaccagcugaucaugaagaaccaccuccgggacaucauggggauccccuacugcaacuacuccaaguacugguaccucaaccacacgaccaccggccgcaccagccugcccaagugcuggcuggucuccaacggcagcuaccucaacgagacgcacuucuccgacgacaucgagcagcaggccgacaacaugaucaccgagaugcugcagaaggaguacauggagcggcaggggaagacgccccugggccucguggaccuguucguguucagcaccuccuucuaccugaucagcaucuuccugcaccucgucaagaucccgacccaccgccacaucguggggaaguccugccccaagccccaccggcugaaccacaugggcaucugcagcugcgggcuguacaagcagcccggcgugccggucaaguggaagcgcugaggacuaguuauaagacugacuagcccgaugggccucccaacgggcccuccuccccuccuugcaccgagauuaaucaaaggcucuuuucagagccaccaaaaaaaaaaaaaaaaaaaaaaaaaaaaaaaaaaaaaaaaaaaaaaaaaaaaaaaaaaaaaaaaaaaaaaaaaaaaaaaaaaaaaaaaaaaaaaaaaaaaa

SEQ ID NO: 15044 - RNA, 1689 nt, Artificial Sequence
  mRNA product Design i-3 (hSL-A100) comprising derived and/or modified sequence from LASV(LM765-SLE-2012;Clade IV)__AIT17814__GPC (opt1)
aggagaaagcuuaccaugggccagaucgugaccuucuuccaggaggucccccacgugaucgaggaggugaugaacaucguccugaucgcccucagcauccuggccgugcugaaggggcucuacaacuucgcgaccugcggccugguggggcuggucacguuccuccugcugugcggccgcuccugcaccaccagccucuacaaggggguguacgagcugcagacccuggagcucaacauggagacgcugaacaugaccaugccgcuguccugcaccaagaacaacagccaccacuacaucauggugggcaacgagaccggccucgagcugacgcugaccaacaccuccaucaucgaccacaaguucugcaaccucagcgacgcccaccggaagaaccuguacgaccacgcccugauguccaucaucagcaccuuccaccucuccauccccaacuucaaccaguacgaggccaugagcugcgacuucaacgggggcaagaucuccguccaguacaaccugagccacuccuacgccaaggacgcggccgaccacugcgggacgguggccaacggcgugcugcagaccuucaugcgcauggccuggggcgggagcuacaucgcgcucgacuccggccgggggcgcugggacugcaucaugaccagcuaccaguaccugaucauccagaacaccacgugggaggaccacugccaguucucccggcccagccccaucggcuaccuggggcuccugucccagcgcacccgggacaucuacaucagccgccggcugcucggcaccuucaccuggacgcugagcgacuccgagggcaaggacacccccgggggcuacugccugacccgcuggaugcucaucgaggccgagcugaagugcuucgggaacaccgccgucgccaagugcaacgagaagcacgacgaggaguucugcgacaugcugcggcuguucgacuucaacaagcaggccauccagcgccugaaggcggaggcccagaugagcauccagcugaucaacaaggccgugaacgcccucaucaacgaccagcugaucaugaagaaccaccuccgggacaucaugggcauccccuacugcaacuacuccaaguacugguaccucaaccacacgaccaccgggaagaccagccugcccaagugcuggcugguguccaacggcagcuaccucaacgagacgcacuucuccgacgacaucgagcagcaggccgacaacaugaucaccgagaugcugcagaaggaguacauggagcgccagggcaagaccccgcuggggcucgucgaccuguucguguucagcaccuccuucuaccugaucagcaucuuccugcaccucgugaagaucccgacgcaccggcacaucgucggcaagcccugccccaagccccaccgccugaaccacauggggaucugcuccugcggccuguacaagcagccgggggugcccgugaaguggaagcggugaggacuaguuauaagacugacuagcccgaugggccucccaacgggcccuccuccccuccuugcaccgagauuaaucaaaggcucuuuucagagccaccaaaaaaaaaaaaaaaaaaaaaaaaaaaaaaaaaaaaaaaaaaaaaaaaaaaaaaaaaaaaaaaaaaaaaaaaaaaaaaaaaaaaaaaaaaaaaaaaaaaaa

SEQ ID NO: 15045 - RNA, 1689 nt, Artificial Sequence
  mRNA product Design i-3 (hSL-A100) comprising derived and/or modified sequence from LASV(LM776-SLE-2012;Clade IV)__AIT17824__GPC (opt1)
aggagaaagcuuaccaugggccagaucgugaccuucuuccaggaggucccccacgugaucgaggaggugaugaacaucguccugaucgcccucagcauccuggccgugcugaaggggcucuacaacuucgcgaccugcggccugguggggcuggucacguuccuccugcugugcggccgcuccugcaccaccagcguguacaaggggguguacgagcuccagacccuggagcugaacauggagacgcucaacaugaccaugccgcuguccugcaccaagaacaacagccaccacuacaucauggucggcaacgagaccggccuggagcucacgcugaccaacaccuccaucaucaaccacaaguucugcaaccugagcgacgcccacaagaagaaccucuacgaccacgcccugauguccaucaucagcaccuuccaccuguccauccccaacuucaaccaguacgaggccaugagcugcgacuucaacgggggcaagaucuccgugcaguacaaccucagccacuccuacgccggggacgcggccaaccacugcggcacgguggccaacgggguccugcagaccuucaugcggauggccuggggcggcagcuacaucgcgcuggacuccgggcacggcaagugggacugcaucaugaccagcuaccaguaccucaucauccagaacaccacgugggaggaccacugccaguucucccgccccagccccaucggguaccugggccugcucucccagcggacccgcgacaucuacaucagccggcgccugcugggcaccuucaccuggacgcucagcgacuccgaggggaaggacaccccgggcggguacugccugacccgguggaugcugaucgaggccgagcucaagugcuucggcaacaccgccguggccaagugcaacgagaagcacgacgaggaguucugcgacaugcugcgccuguucgacuucaacaagcaggccauccagcggcucaaggcggaggcccagaugagcauccagcugaucaacaaggccgugaacgcccugaucaacgaccagcucaucaugaagaaccaccuccgcgacaucauggggauccccuacugcaacuacuccaaguacugguaccugaaccacacgaccaccggcaagaccagccugcccaagugcuggcuggucuccaacggcagcuaccugaacgagacgcacuucuccgacgacaucgagcagcaggccgacaacaugaucaccgagaugcuccagaaggaguacauggagcggcaggggaagacgccccugggccugguggaccucuucguguucagcaccuccuucuaccugaucagcaucuuccugcaccuggucaagaucccgacccaccgccacaucguggggaaguccugccccaagccccaccggcucaaccacaugggcaucugcagcugcgggcuguacaagcagcccggcgugccgguccgcuggaagcggugaggacuaguuauaagacugacuagcccgaugggccucccaacgggcccuccuccccuccuugcaccgagauuaaucaaaggcucuuuucagagccaccaaaaaaaaaaaaaaaaaaaaaaaaaaaaaaaaaaaaaaaaaaaaaaaaaaaaaaaaaaaaaaaaaaaaaaaaaaaaaaaaaaaaaaaaaaaaaaaaaaaaa

SEQ ID NO: 15046 - RNA, 1689 nt, Artificial Sequence
  mRNA product Design i-3 (hSL-A100) comprising derived and/or modified sequence from LASV(Mad39;Clade IV)__ANH09722__GPC (opt1)
aggagaaagcuuaccaugggccagaucgugaccuucuuccaggaggucccccacgugaucgaggaggugaugaacaucguccugaucgcccucagcauccuggccgugcugaaggggcucuacaacguggcgaccugcggccugaucgggcuggucacguuccuccugcugugcggccgcuccugcaccaccacccucuacaaggggguguacgagcugcaggcccuggagcucaacauggagacgcugaacaugaccaugccgcugagcugcaccaagaacaacucccaccacuacauccgggugggcaacgagaccggccucgagcugacgcugaccaacaccagccucaucaaccacaaguucugcaaccuguccgacgcccacaagaagaaccuguacgaccacgcccucaugagcaucaucuccaccuuccaccugagcauccccaacuucaaccaguacgaggccauguccugcgacuucaacgacgggaagaucagcguccaguacaaccugucccacacguacgcgggcgacaccgccaaccacugcgggaccguggccaacggcgugcuccagaccuucaugcgcauggccuggggcgggagcuacaucgcgcuggacuccggccgcgggggcugggacugcaucaugacgagcuaccaguaccugaucauccagaacaccaccugggaggaccacugccaguucucccggcccagccccaucggguaccucggccugcugucccagcggacccgcgacaucuacaucagccggcgccuccugggcacguucaccuggacccuguccgacagcgaggggaaggacaccccgggcggguacugccucacgcgguggaugcugaucgaggccgagcugaagugcuucggcaacaccgccgucgccaagugcaacgagaagcacgacgaggaguucugcgacaugcuccgccuguucgacuucaacaagcaggccauccagcggcugaaggcggaggcccagaugagcauccagcucaucaacaaggccgugaacgcccugaucaacgaccagcugaucaugaagaaccaccuccgcgacaucauggggauccccuacugcaacuacuccaaguacugguaccugaaccacaccgugaccggcaagacgagccugcccaagugcuggcucgucuccaacggcagcuaccugaacgagacccacuucuccgacgacaucgagcagcaggccgacaacaugaucaccgagaugcugcagaaggaguacauggagcggcaggggaagacgccccucggccugguggaccuguucguguucagcaccuccuucuaccugaucagcaucuuccuccaccuggucaagaucccgacccaccgccacgugguggggaagcccugccccaagccccaccggcugaaccacaugggcaucugcuccugcggguucuacaagcagccgggcguccccgugcgcuggaagcggugaggacuaguuauaagacugacuagcccgaugggccucccaacgggcccuccuccccuccuugcaccgagauuaaucaaaggcucuuuucagagccaccaaaaaaaaaaaaaaaaaaaaaaaaaaaaaaaaaaaaaaaaaaaaaaaaaaaaaaaaaaaaaaaaaaaaaaaaaaaaaaaaaaaaaaaaaaaaaaaaaaaaa

SEQ ID NO: 15047 - RNA, 1689 nt, Artificial Sequence
  mRNA product Design i-3 (hSL-A100) comprising derived and/or modified sequence from LASV(Z0947-SLE-2011;Clade IV)__AIT17840__GPC (opt1)
aggagaaagcuuaccaugggccagaucgugaccuucuuccaggaggucccccacgugaucgaggaggugaugaacaucguccugaucgcccucagcauccuggccgugcugaaggggcucuacaacuucgcgaccugcggccugguggggcuggucacguuccuccugcugugcggccgcuccugcaccaucagccucuacaaggggguguacgagcugcagacccuggagcucaacauggagacccugaacaugacgaugccgcuguccugcaccaagaacaacagccaccacuacaucauggugggcaacgagaccggccucgagcugacccugacgaacaccuccaucaucaaccacaaguucugcaaccucagcgacgcccacaagaagaaccuguacgaccacgcccugauguccaucaucagcaccuuccaccucuccauccccaacuucaaccaguacgaggccaugagcugcgacuucaacgggggcaagaucuccguccaguacaaccugagccacuccuacgccggggacgcggccaaccacugcggcaccguggccaacggggugcugcagacguucaugcggauggccuggggcggcagcuacaucgcgcucgacuccgggcgcgaccggugggacugcaucaugaccagcuaccaguaccugaucauccagaacaccaccugggaggaccacugccaguucucccgccccagccccaucggcuaccuggggcuccugucccagcggacgcgcgacaucuacaucagccggcgccugcucggcaccuucaccuggacccugagcgacuccgagggcaaggacacgcccgggggcuacugccugacccgguggaugcucaucgaggccgagcugaagugcuucgggaacaccgccgucgccaagugcaacgagaagcacgacgaggaguucugcgacaugcugcgccucuucgacuucaacaagcaggccauccagcggcugaaggcggaggcccagaugagcauccagcugaucaacaaggccgugaacgcccucaucaacgaccagcugaucaugaagaaccaccuccgcgacaucaugggcauccccuacugcaacuacuccaaguacugguaccugaaccacaccacgaccgggaagaccagccugcccaagugcuggcugguguccaacggcagcuaccucaacgagacccacuucuccgacgacaucgagcagcaggccgacaacaugaucacggagaugcugcagaaggaguacauggagcggcagggcaagaccccgcuggggcucgucgaccuguucguguucagcaccuccuucuaccugaucagcaucuuccugcaccucgugaagaucccgacccaccgccacaucgucggcaagcccugccccaagccccaccggcugaaccacauggggaucugcuccugcggccuguacaagcagccgggggugcccgugaaguggaagcgcugaggacuaguuauaagacugacuagcccgaugggccucccaacgggcccuccuccccuccuugcaccgagauuaaucaaaggcucuuuucagagccaccaaaaaaaaaaaaaaaaaaaaaaaaaaaaaaaaaaaaaaaaaaaaaaaaaaaaaaaaaaaaaaaaaaaaaaaaaaaaaaaaaaaaaaaaaaaaaaaaaaaaa

SEQ ID NO: 15048 - RNA, 1689 nt, Artificial Sequence
  mRNA product Design i-3 (hSL-A100) comprising derived and/or modified sequence from LASV(Josiah;Clade IV)__NP_694870__GPC (opt4)
aggagaaagcuuaccaugggccagaucgugaccuucuuccaggaggugccccacgugaucgaggaggugaugaacaucgugcugaucgcccugagcgugcuggccgugcugaagggccuguacaacuucgccaccugcggccuggugggccuggugaccuuccugcugcugugcggcagaagcugcaccaccagccuguacaagggcguguacgagcugcagacccuggagcugaacauggagacccugaacaugaccaugccccugagcugcaccaagaacaacagccaccacuacaucauggugggcaacgagaccggccuggagcugacccugaccaacaccagcaucaucaaccacaaguucugcaaccugagcgacgcccacaagaagaaccuguacgaccacgcccugaugagcaucaucagcaccuuccaccugagcauccccaacuucaaccaguacgaggccaugagcugcgacuucaacggcggcaagaucagcgugcaguacaaccugagccacagcuacgccggcgacgccgccaaccacugcggcaccguggccaacggcgugcugcagaccuucaugagaauggccuggggcggcagcuacaucgcccuggacagcggcagaggcaacugggacugcaucaugaccagcuaccaguaccugaucauccagaacaccaccugggaggaccacugccaguucagcagacccagccccaucggcuaccugggccugcugagccagagaaccagagacaucuacaucagcagaagacugcugggcaccuucaccuggacccugagcgacagcgagggcaaggacacccccggcggcuacugccugaccagauggaugcugaucgaggccgagcugaagugcuucggcaacaccgccguggccaagugcaacgagaagcacgacgaggaguucugcgacaugcugagacuguucgacuucaacaagcaggccauccagagacugaaggccgaggcccagaugagcauccagcugaucaacaaggccgugaacgcccugaucaacgaccagcugaucaugaagaaccaccugagagacaucaugggcauccccuacugcaacuacagcaaguacugguaccugaaccacaccaccaccggcagaaccagccugcccaagugcuggcuggugagcaacggcagcuaccugaacgagacccacuucagcgacgacaucgagcagcaggccgacaacaugaucaccgagaugcugcagaaggaguacauggagagacagggcaagaccccccugggccugguggaccuguucguguucagcaccagcuucuaccugaucagcaucuuccugcaccuggugaagauccccacccacagacacaucgugggcaagagcugccccaagccccacagacugaaccacaugggcaucugcagcugcggccuguacaagcagcccggcgugcccgugaaguggaagagaugaggacuaguuauaagacugacuagcccgaugggccucccaacgggcccuccuccccuccuugcaccgagauuaaucaaaggcucuuuucagagccaccaaaaaaaaaaaaaaaaaaaaaaaaaaaaaaaaaaaaaaaaaaaaaaaaaaaaaaaaaaaaaaaaaaaaaaaaaaaaaaaaaaaaaaaaaaaaaaaaaaaaa

SEQ ID NO: 15049 - RNA, 1686 nt, Artificial Sequence
  mRNA product Design i-3 (hSL-A100) comprising derived and/or modified sequence from LASV(LP;Clade I)__AAF86701__GPC (opt4)
aggagaaagcuuaccaugggccagaucaucaccuucuuccaggaggugccccacgugaucgaggaggugaugaacaucgugcugaucgcccugagccugcuggccauccugaagggccuguacaacaucgccaccugcggcaucaucggccugguggccuuccuguuccugugcggcaagagcugcagccugacccugaagggcggcuacgagcugcagacccuggagcugaacauggagacccugaacaugaccaugccccugagcugcaccaagaacagcagccaccacuacaucagagugggcaacgagaccggccuggagcugacccugaccaacaccagcaucaucaaccacaaguucugcaaccugagcgacgcccacaagaagaaccuguacgaccacgcccugaugagcaucaucagcaccuuccaccugagcauccccaacuucaaccaguacgaggccaugagcugcgacuucaacggcggcaagaucagcgugcaguacaaccugagccacagcuacgccggcgacgccgccgagcacugcggcaccguggccaacggcgugcugcagaccuucaugagaauggccuggggcggcagauacaucgcccuggacagcggcaagggcaacugggacugcaucaugaccagcuaccaguaccugaucauccagaacaccaccugggaggaccacugccaguucagcagacccagccccaucggcuaccugggccugcugagccagagaaccagagacaucuacaucagcagaagacugcugggcaccuucaccuggacccugagcgacagcgagggcaacgagacccccggcggcuacugccugaccagauggaugcugaucgaggccgagcugaagugcuucggcaacaccgccguggccaagugcaacgagaagcacgacgaggaguucugcgacaugcugagacuguucgacuucaacaagcaggccaucagaagacugaaggccgaggcccagaugagcauccagcugaucaacaaggccgugaacgcccugaucaacgaccagcugaucaugaagaaccaccugagagacaucaugggcauccccuacugcaacuacagcaaguacugguaccugaaccacaccagcagcggcagaaccagccugcccaagugcuggcugaucagcaacggcagcuaccugaacgagacccaguucagcgacgacaucgagcagcaggccgacaacaugaucaccgagaugcugcagaaggaguacaucgagagacagggcaagaccccccugggccugguggacaucuucaucuucagcaccagcuucuaccugaucagcaucuuccugcaccugaucaagauccccacccacagacacaucgugggcaagcccugccccaagccccacagacugaaccacaugggcgugugcagcugcggccuguacaagcaccccggcgugcccaccaaguggaagagaugaggacuaguuauaagacugacuagcccgaugggccucccaacgggcccuccuccccuccuugcaccgagauuaaucaaaggcucuuuucagagccaccaaaaaaaaaaaaaaaaaaaaaaaaaaaaaaaaaaaaaaaaaaaaaaaaaaaaaaaaaaaaaaaaaaaaaaaaaaaaaaaaaaaaaaaaaaaaaaaaaaaaa

SEQ ID NO: 15050 - RNA, 1686 nt, Artificial Sequence
  mRNA product Design i-3 (hSL-A100) comprising derived and/or modified sequence from LASV(803213;Clade II)__AAF86703__GPC (opt4)
aggagaaagcuuaccaugggccagaucaucaccuucuuccaggaggugccccacgugaucgaggaggugaugaacaucgugcugaucgcccugagccugcuggccauccugaagggcaucuacaacguggccaccugcggccuguucggccugaucagcuuccugcugcugugcggcagaagcugcagcgugaccuacaagggcguguacgagcugcagacccuggagcugaacauggccaaccugaacaugaccaugccccugagcugcaccaagaacaacagccaccacuacaucauggugggcaacgagaccggccuggagcugacccugaccaacaccagcaucaucaaccacaaguucugcaaccugagcgacgcccacaagaagaaccuguacgaccacgcccugaugagcaucaucagcaccuuccaccugagcauccccaacuucaaccaguacgaggccaugagcugcgacuucaacggcggcaagaucagcgugcaguacaaccugagccacagcuucgccguggacgccgccaaccacugcggcaccaucgccaacggcgugcugcagaccuucaugagaauggccuggggcggcagcuacaucgcccuggacagcggcaagggcaacugggacugcaucaugaccagcuaccaguaccugaucauccagaacaccaccugggaggaccacugccaguucagcagacccagccccaucggcuaccugggccugcugagccagagaaccagagacaucuacaucagcagaagacugcugggcaccuucaccuggacccugagcgacagcgagggcaacgaggcccccggcggcuacugccugaccagauggaugcugaucgaggccgagcugaagugcuucggcaacaccgccguggccaagugcaacgagaagcacgacgaggaguucugcgacaugcugagacuguucgacuucaacaagcaggccaucaagagacugaagaccgaggcccagaugagcauccagcugaucaacaaggccgugaacgcccugaucaacgaccagcugaucaugaagaaccaccugagagacaucaugggcauccccuacugcaacuacagcagauacugguaccugaaccacaccgugaccggcaagaccagccugcccagaugcuggcuggugagcaacggcagcuaccugaacgagacccacuucagcgacgacaucgagcagcaggccgacaacaugaucaccgagaugcugcagaaggaguacauggacagacagggcaagaccccccugggccugguggaccuguucguguucagcaccagcuucuaccugaucagcaucuuccugcaccuggugaagauccccacccacagacacaucgugggcaagcccugccccaagccccacagacugaaccacaugggcaucugcagcugcggccuguacaagcaccccggcgugcccgugaaguggaagagaugaggacuaguuauaagacugacuagcccgaugggccucccaacgggcccuccuccccuccuugcaccgagauuaaucaaaggcucuuuucagagccaccaaaaaaaaaaaaaaaaaaaaaaaaaaaaaaaaaaaaaaaaaaaaaaaaaaaaaaaaaaaaaaaaaaaaaaaaaaaaaaaaaaaaaaaaaaaaaaaaaaaaa

SEQ ID NO: 15051 - RNA, 1686 nt, Artificial Sequence
  mRNA product Design i-3 (hSL-A100) comprising derived and/or modified sequence from LASV(GA391;Clade III)__CAA36645__GPC (opt4)
aggagaaagcuuaccaugggccagaucgugaccuucuuccaggaggugccccacgugaucgaggaggugaugaacaucgugcugaucgcccugagcauccuggccauccugaagggccuguacaacguggccaccugcggccugaucggccuggugaccuuccugcugcugagcggcagaagcugcagccugaucuacaagggcaccuacgagcugcagacccuggagcugaacauggagacccugaacaugaccaugccccugagcugcaccaagaacaacagccaccacuacaucagagugggcaacgagaccggccuggagcugacccugaccaacaccagcauccugaaccacaaguucugcaaccugagcgacgcccacaagagaaaccuguacgaccacagccugaugagcaucaucagcaccuuccaccugagcauccccaacuucaaccaguacgaggccaugagcugcgacuucaacggcggcaagaucaccgugcaguacaaccugagccacagcuucgccguggacgccgccggccacugcggcacccuggccaacggcgugcugcagaccuucaugagaauggccuggggcggcagcuacaucgcccuggacagcggcagaggcaacugggacugcaucaugaccagcuaccaguaccugaucauccagaacaccaccugggacgaccacugccaguucagcagacccagccccaucggcuaccugggccugcugagccagagaaccagagacaucuacaucagcagaagacugcugggcaccuucaccuggacccugagcgacagcgagggcaacgagacccccggcggcuacugccugaccagauggaugcugaucgaggccgagcugaagugcuucggcaacaccgccguggccaagugcaacgagaagcacgacgaggaguucugcgacaugcugagacuguucgacuucaacaagcaggccaucagaagacugaagaccgaggcccagaugagcauccagcugaucaacaaggccgugaacgcccugaucaacgaccagcugaucaugaagaaccaccugagagacaucaugggcauccccuacugcaacuacagcagauacugguaccugaaccacaccagcaccggcaagaccagccugcccagaugcuggcugaucagcaacggcagcuaccugaacgagaccaaguucagcgacgacaucgagcagcaggccgacaacaugaucaccgagaugcugcagaaggaguacaucgacagacagggcaagaccccccugggccugguggaccuguucguguucagcaccagcuucuaccugaucagcaucuuccugcaccuggugaagauccccacccacagacacaucgugggcaagcccugccccaagccccacagacugaaccacaugggcaucugcagcugcggccuguacaagcagcccggcgugcccgugagauggaagagaugaggacuaguuauaagacugacuagcccgaugggccucccaacgggcccuccuccccuccuugcaccgagauuaaucaaaggcucuuuucagagccaccaaaaaaaaaaaaaaaaaaaaaaaaaaaaaaaaaaaaaaaaaaaaaaaaaaaaaaaaaaaaaaaaaaaaaaaaaaaaaaaaaaaaaaaaaaaaaaaaaaaaa

SEQ ID NO: 15052 - RNA, 1689 nt, Artificial Sequence
  mRNA product Design i-3 (hSL-A100) comprising derived and/or modified sequence from LASV(AV;Clade V)__CCA30314__GPC (opt4)
aggagaaagcuuaccaugggccagaucgugaccuucuuccaggaggugccccacgugaucgaggaggugaugaacaucgugcugaucgcccugagcauccuggccgugcugaagggccuguacaacaucgccaccugcggccugaucggccugaucaccuuccugcugcugugcggcagaagcugcagcagcaaccuguacaagggcguguacgagcugcagagccuggaccugaacauggagacccugaacaugaccaugccccugagcugcaccaagaacaacagccaccacuacaucagagugggcaacgacaccggccuggagcugacccugaccaacaccagcauccugaaccacaaguucugcaaccugagcgacgcccacaagaaggaccuguacgaccacgcccugaugagcaucaucagcaccuuccaccugagcauccccaacuucaaccaguacgaggccaugagcugcgacuucaacggcggcaagaucagcgugcaguacaaccugagccacagcuacgccaucgacgccgccaaccacugcggcaccguggccaacggcauccugcagaccuucaugagaauggccuggggcggcagcuacaucgcccuggacagcggcagaggcaacugggacugcaucaugaccagcuaccaguaccugaucauccagaacaccaccugggagaaccacugccaguucagcagacccagccccaucggcuaccugggccugcugagccagagaaccagagacaucuacaucagcagaagacugcugggcaccuucaccuggacccugagcgacagcgagggcaacgccacccccggcggcuacugccugaccagauggaugcugaucgaggccgagcugaagugcuucggcaacaccgccguggccaagugcaacgagaagcacgacgaggaguucugcgacaugcugagacuguucgacuucaacaagcaggccaucagcagacugaagagcgaggcccagaugagcauccagcugaucaacaaggccgugaacgcccugaucaacgaccagcugaucaugaagaaccaccugagagacaucaugggcauccccuacugcaacuacagcaaguacugguaccugaaccacaccaucaccggcaagaccagccugcccaagugcuggcuggugagcaacggcagcuaccugaacgagacccacuucagcgacgacaucgagcagcaggccgacaacaugaucaccgagaugcugcagaaggaguacauggagagacagggcaagaccccccugggccugguggaccuguucguguucagcaccagcuucuaccugaucagcaucuuccugagacuggugaagauccccacccacagacacaucgugggcaagcccugccccaagccccacagacugaaccacaugggcaucugcagcugcggccuguacaagcagcccggcgugcccgugagauggaagagaugaggacuaguuauaagacugacuagcccgaugggccucccaacgggcccuccuccccuccuugcaccgagauuaaucaaaggcucuuuucagagccaccaaaaaaaaaaaaaaaaaaaaaaaaaaaaaaaaaaaaaaaaaaaaaaaaaaaaaaaaaaaaaaaaaaaaaaaaaaaaaaaaaaaaaaaaaaaaaaaaaaaaa

SEQ ID NO: 15053 - RNA, 1686 nt, Artificial Sequence
  mRNA product Design i-3 (hSL-A100) comprising derived and/or modified sequence from LASV(Togo/2016/7082;Clade VI)__AMR44577__GPC (opt4)
aggagaaagcuuaccaugggccagaucaucaccuucuuccaggaggugccccacgugaucgaggaggugaugaacaucgugcugaucgcccugagccugcuggccauccugaagggcguguacaacguggccaccugcggcaucaucggccuggugaccuuccuguuccugugcggcagaagcugcagccugaucuacaagggcagcuacgagcugcagacccuggagcugaacauggagacccugaacaugaccaugccccugagcugcaccaagaacagcagccaccacuacaucagagugggcaacgagaccggccuggagcugacccugaccaacaccagcaucaucaaccacaaguucugcaaccugagcgacgcccacaagagaaaccuguacgaccacgcccugaugagcauccugagcaccuuccaccugagcauccccaacuucaaccaguacgaggccaugagcugcgacuucaacggcggcaagaucagcgugcaguacaaccugagccacgccuacgccguggacgccgccgagcacugcggcaccguggccaacggcgugcugcagaccuucaugagaauggccuggggcggcagcuacaucgcccuggacagcggcagaggcaacugggacugcaucaugaccagcuaccaguaccugaucauccagaacaccaccugggaggaccacugccaguucagcagacccagccccaucggcuaccugggccugcugagccagagaaccagagacaucuacaucagcagaagacugcugggcaccuucaccuggacccugagcgacagcgagggcaacgagacccccggcggcuacugccugaccagauggaugcugaucgaggccgagcugaagugcuucggcaacaccgccguggccaagugcaacgagaagcacgacgaggaguucugcgacaugcugagacuguucgacuucaacaagcaggccauccagagacugaagagcgaggcccagaugagcauccagcugaucaacaaggccgugaacgcccugaucaacgaccagcugaucaugaagaaccaccugagagacaugaugggcauccccuacugcaacuacagcaaguacugguaccugaaccacaccagcagcggcagaaccagccugcccaagugcuggcuggugagcaacggcagcuaccugaacgagacccacuucagcgacgacaucgagcagcaggccgacaacaugaucaccgagaugcugcagaaggaguacaucgacagacagggcaagaccccccugggccugguggaccuguucguguucagcaccagcuucuaccugaucagcaucuuccugcaccugaucaagauccccacccacagacacaucgugggcaagcccugccccaagccccacagacugaaccacaugggcaucugcagcugcggccuguacaagcagcccggcgugcccaccagauggaagagaugaggacuaguuauaagacugacuagcccgaugggccucccaacgggcccuccuccccuccuugcaccgagauuaaucaaaggcucuuuucagagccaccaaaaaaaaaaaaaaaaaaaaaaaaaaaaaaaaaaaaaaaaaaaaaaaaaaaaaaaaaaaaaaaaaaaaaaaaaaaaaaaaaaaaaaaaaaaaaaaaaaaaa

SEQ ID NO: 15054 - RNA, 1686 nt, Artificial Sequence
  mRNA product Design i-3 (hSL-A100) comprising derived and/or modified sequence from LASV(KAK-428;Clade n.d. (VII))__ANH09740__GPC (opt4)
aggagaaagcuuaccaugggccagaucgugaccuucuuccaggaggugccccacgugaucgaggaggugaugaacaucgugcugaucgcccugagccugcuggccauccugaagggccuguacaacuucgccaccugcggcgugaucggccugaucaccuuccugcugcugugcggcagaagcugcagcgccaccuacaagggccaguacgagcugcagacccuggagcugaacauggagagccugaacaugaccaugccccugagcugcaccaagaacaacagccaccacuacaucagagccggcaacaacaccggccuggagcugacccugaccaacaccagcaucaucagccacaaguucugcaaccugagcgacgcccacaagaagaaccuguacgaccacacccugaugagcaucaucaccaccuuccaccugagcauccccaacuucaaccaguacgaggccaugagcugcgacuucaacggcggcaagaucagcauccaguacaaccugagccacagcuacgccggcgacgccgcccagcacugcggcaccguggccaacggcgugcugcagaccuucaugagaauggccuggggcggcagcuaccuggcccuggacagcggcagaagaggcugggacugcaucaucagcagcuaccaguaccugaucauccagaacaccaccugggacgaccacugccaguucagcagacccagccccaucggcuaccugggcuucgugagccagaagaccagagacaucuacaucagcagaagacugcugggcaccuucaccuggacccugagcgacagcgagggccacgacaugcccggcggcuacugccugaccagauggaugcugaucgaggccgaccugaagugcuucggcaacaccgccguggccaagugcaacgagaagcacgacgaggaguucugcgacauguggagacuguucgacuucaacaagcaggccauccagagacugaaggccgaggcccagaugaacauccagcugaucaacaaggccgugaacgcccugaucaacgaccagcugaugaugaagaaccaccugagagacaucaugggcauccccuacugcaacuacagcaaguucugguaccugaacaacaccaccaccggcagaaccagccugcccagaugcuggcugaucagcaacggcagcuaccugaacgagacccacuucagcgacgacaucgagcagcaggccgacaacaugaucaccgagaugcugcagaaggaguacauggacagacagggcaagaccccccugggccugguggaccuguucguguucagcaccagcuucuaccugaucaccaucuuccugcaccuggugaagauccccacccacagacacaucgugggcaagcccugccccaagccccacagacugaaccacaugggcaucugcagcugcggccuguacaagcagcccggcgugcccgugagauggaagagaugaggacuaguuauaagacugacuagcccgaugggccucccaacgggcccuccuccccuccuugcaccgagauuaaucaaaggcucuuuucagagccaccaaaaaaaaaaaaaaaaaaaaaaaaaaaaaaaaaaaaaaaaaaaaaaaaaaaaaaaaaaaaaaaaaaaaaaaaaaaaaaaaaaaaaaaaaaaaaaaaaaaaa

SEQ ID NO: 15055 - RNA, 1686 nt, Artificial Sequence; identical to SEQ ID NO: 15049
  mRNA product Design i-3 (hSL-A100) comprising derived and/or modified sequence from LASV(Pinneo-NIG-1969;Clade I)__AIT17836__GPC (opt4)

SEQ ID NO: 15056 - RNA, 1686 nt, Artificial Sequence
  mRNA product Design i-3 (hSL-A100) comprising derived and/or modified sequence from LASV(ISTH0009-NIG-2011;Clade II)__AIT17404__GPC (opt4)
aggagaaagcuuaccaugggccagaucaucaccuucuuccaggaggugccccacgugaucgaggaggugaugaacaucgugcugaucgcccugagccugcuggccauccugaagggcaucuacaacguggccaccugcggccuguucggccuggugagcuuccugcugcugugcggcagaagcugcagcaccaccuacaagggcguguacgagcugcagacccuggagcuggacauggccagccugaacaugaccaugccccugagcugcaccaagaacaacagccaccacuacaucauggugggcaacgagaccggccuggagcugacccugaccaacaccagcaucaucaaccacaaguucugcaaccugagcgacgcccacaagaagaaccuguacgaccacgcccugaugagcaucaucagcaccuuccaccugagcauccccaacuucaaccaguacgaggccaugagcugcgacuucaacggcggcaagaucagcgugcaguacaaccugagccacgccuacgccguggacgccgccaaccacugcggcaccaucgccaacggcgugcugcagaccuucaugagaauggccuggggcggcagcuacaucgcccuggacagcggcaagggcagcugggacugcaucaugaccagcuaccaguaccugaucauccagaacaccaccugggaggaccacugccaguucagcagacccagccccaucggcuaccugggccugcugagccagagaaccagagacaucuacaucagcagaagacugcugggcaccuucaccuggacccugagcgacagcgagggcaacgagacccccggcggcuacugccugaccagauggaugcugaucgaggccgagcugaagugcuucggcaacaccgccguggccaagugcaacgagaagcacgacgaggaguucugcgacaugcugagacuguucgacuucaacaagcaggccaucagaagacugaagaccgaggcccagaugagcauccagcugaucaacaaggccgugaacgcccugaucaacgaccagcugaucaugaagaaccaccugagagacaucaugggcauccccuacugcaacuacagcaaguacugguaccugaaccacaccgugaccggcaagaccagccugcccagaugcuggcuggugagcaacggcagcuaccugaacgagacccacuucagcgacgacaucgagcagcaggccgacaacaugaucaccgagcugcugcagaaggaguacauggacagacagggcaagaccccccugggccugguggaccuguucguguucagcaccagcuucuaccugaucagcaucuuccugcaccugaucaagauccccacccacagacacaucaccggcaagcccugccccaagccccacagacugaaccacaugggcaucugcagcugcggccuguacaagcaccccggcgugcccgugaaguggaagagaugaggacuaguuauaagacugacuagcccgaugggccucccaacgggcccuccuccccuccuugcaccgagauuaaucaaaggcucuuuucagagccaccaaaaaaaaaaaaaaaaaaaaaaaaaaaaaaaaaaaaaaaaaaaaaaaaaaaaaaaaaaaaaaaaaaaaaaaaaaaaaaaaaaaaaaaaaaaaaaaaaaaaa

SEQ ID NO: 15057 - RNA, 1686 nt, Artificial Sequence
  mRNA product Design i-3 (hSL-A100) comprising derived and/or modified sequence from LASV(ISTH2010-NIG-2012;Clade II)__AIT17482__GPC (opt4)
aggagaaagcuuaccaugggccagaucaucaccuucuuccaggaggugccccacgugaucgaggaggugaugaacaucgugcugaucgcccugagccugcuggccauccugaagggcaucuacaacguggccaccugcggccuguucggccuggugagcuuccugcugcugugcggcagaagcugcagcaccaccuacaagggcguguacgagcugcagacccuggagcuggacauggccagccugaacaugaccaugccccugagcugcaccaagaacaacagccaccacuacaucauggugggcaacgagaccggccuggagcugacccugaccaacaccagcaucaucaaccacaaguucugcaaccugagcgacgcccacaagaagaaccuguacgaccacgcccugaugagcaucaucagcaccuuccaccugagcauccccaacuucaaccaguacgaggccaugagcugcgacuucaacggcggcaagaucagcgugcaguacaaccugagccacgccuacgccguggacgccgccaaccacugcggcaccaucgccaacggcgugcugcagaccuucaugagaauggccuggggcggcagcuacaucgcccuggacagcggcaagggcagcugggacugcaucaugaccagcuaccaguaccugaucauccagaacaucaccugggaggaccacugccaguucagcagacccagccccaucggcuaccugggccugcugagccagagaaccagagacaucuacaucagcagaagacugcugggcaccuucaccuggacccugagcgacagcgagggcaacgagacccccggcggcuacugccugaccagauggaugcugaucgaggccgagcugaagugcuucggcaacaccgccguggccaagugcaacgagaagcacgacgaggaguucugcgacaugcugagacuguucgacuucaacaagcaggccaucagaagacugaagaccgaggcccagaugagcauccagcugaucaacaaggccgugaacgcccugaucaacgaccagcugaucaugaagaaccaccugagagacaucaugggcauccccuacugcaacuacagcaaguacugguaccugaaccacaccgugaccggcaagaccagccugcccagaugcuggcuggugagcaacggcagcuaccugaacgagacccacuucagcgacgacaucgagcagcaggccgacaacaugaucaccgagcugcugcagaaggaguacaucgacagacagggcaagaccccccugggccugguggaccuguucguguucagcaccagcuucuaccugaucagcaucuuccugcaccuggugaagauccccacccacagacacguggugggcaagcccugccccaagccccacagacugaaccacaugggcaucugcagcugcggccuguacaagcaccccggcgugcccgugaaguggaagagaugaggacuaguuauaagacugacuagcccgaugggccucccaacgggcccuccuccccuccuugcaccgagauuaaucaaaggcucuuuucagagccaccaaaaaaaaaaaaaaaaaaaaaaaaaaaaaaaaaaaaaaaaaaaaaaaaaaaaaaaaaaaaaaaaaaaaaaaaaaaaaaaaaaaaaaaaaaaaaaaaaaaaa

SEQ ID NO: 15058 - RNA, 1686 nt, Artificial Sequence
  mRNA product Design i-3 (hSL-A100) comprising derived and/or modified sequence from LASV(Lassa virus/H.sapiens-wt/NGA/2015/ISTH_0543;Clade II)__AVO03639__GPC (opt4)
aggagaaagcuuaccaugggccagaucaucaccuucuuccaggaggugccccacgugaucgaggaggugaugaacaucgugcugaucgcccugagccugcuggccauccugaagggcaucuacaacguggccaccugcggccuguucggccuggugagcuuccugcugcugugcggcagaagcugcagcaccaccuacaagggcguguacgagcugcagacccuggagcuggacauggccaaccugaacaugaccaugccccugagcugcaccaagaacaacagccaccacuacaucauggugggcaacgagaccggccuggagcugacccugaccaacaccagcaucaucaaccacaaguucugcaaccugagcgacgcccacaagaagaaccuguacgaccacgcccugaugagcaucaucagcaccuuccaccugagcauccccaacuucaaccaguacgaggccaugagcugcgacuucaacggcggcaagaucagcgugcaguacaaccugagccacaccuacgccguggacgccgccaaccacugcggcaccaucgccaacggcgugcugcagaccuucaugagaauggccuggggcggcagcuacaucgcccuggacagcggcaagggcagcugggacugcaucaugaccagcuaccaguaccuggugauccagaacaccaccugggaggaccacugccaguucagcagacccagccccaucggcuaccugggccugcugagccagagaaccagagacaucuacaucagcagaagacugcugggcaccuucaccuggacccugagcgacagcgagggcaacgagacccccggcggcuacugccugaccagauggaugcugaucgaggccgagcugaagugcuucggcaacaccgccguggccaagugcaacgagaagcacgacgaggaguucugcgacaugcugagacuguucgacuucaacaagcaggccaucagaagacugaagaccgaggcccagaugagcauccagcugaucaacaaggccgugaacgcccugaucaacgaccagcugaucaugaagaaccaccugagagacaucaugggcauccccuacugcaacuacagcaaguacugguaccugaaccacaccgugaccggcaagaccagccugcccagaugcuggcuggugagcaacggcagcuaccugaacgagacccacuucagcgacgacaucgagcagcaggccgacaacaugaucaccgagcugcugcagaaggaguacaucgacagacagggcaagaccccccugggccugguggaccuguucguguucagcaccagcuucuaccugaucagcaucuuccugcaccuggugaagauccccacccacagacacaucaccggcaagcccugccccaagccccacagacugaaccacaugggcaucugcagcugcggccuguacaagcaccccggcgugcccgugaaguggaagagaugaggacuaguuauaagacugacuagcccgaugggccucccaacgggcccuccuccccuccuugcaccgagauuaaucaaaggcucuuuucagagccaccaaaaaaaaaaaaaaaaaaaaaaaaaaaaaaaaaaaaaaaaaaaaaaaaaaaaaaaaaaaaaaaaaaaaaaaaaaaaaaaaaaaaaaaaaaaaaaaaaaaaa

SEQ ID NO: 15059 - RNA, 1686 nt, Artificial Sequence
  mRNA product Design i-3 (hSL-A100) comprising derived and/or modified sequence from LASV(Lassa virus/H.sapiens-wt/NGA/2016/ISTH_0009;Clade II)__AVO03571__GPC (opt4)
aggagaaagcuuaccaugggccagaucaucaccuucuuccaggaggugccccacgugaucgaggaggugaugaacaucgugcugaucgcccugagccugcuggccauccugaagggcaucuacaacguggccaccugcggccugcugggccuggugagcuuccugcugcugugcggcagaagcugcagcaccaccuacaagggcguguacgagcugcagacccuggagcuggacauggccagccugaacaugaccaugccccugagcugcaccaagaacaacagccaccacuacaucauggugggcaacgagaccggccuggagcugacccugaccaacaccagcaucaucaaccacaaguucugcaaccugagcgacgcccacaagaagaaccuguacgaccacgcccugaugagcaucaucagcaccuuccaccugagcauccccaacuucaaccaguacgaggccaugagcugcgacuucaacggcggcagaaucagcgugcaguacaaccugagccacagcuacgccguggacgccgccaaccacugcggcaccaucgccaacggcgugcugcagaccuucaugagaauggccuggggcggcagcuacaucgcccuggacagcggcaagggcagcugggacugcaucaugaccagcuaccaguaccugaucauccagaacaccaccugggaggaccacugccaguucagcagacccagccccaucggcuaccugggccugcugagccagagaaccagagacaucuacaucagcagaagacugcugggcaccuucaccuggacccugagcgacagcgagggcaacgagacccccggcggcuacugccugaccagauggaugcugaucgaggccgagcugaagugcuucggcaacaccgccguggccaagugcaacgagaagcacgacgaggaguucugcgacaugcugagacuguucgacuucaacaagcaggccaucagaagacugaagaccgaggcccagaugagcauccagcugaucaacaaggccgugaacgcccugaucaacgaccagcugaucaugaagaaccaccugagagacaucaugggcauccccuacugcaacuacagcaaguacugguaccugaaccacaccgugaccggcaagaccagccugcccagaugcuggcuggugagcaacggcagcuaccugaacgagacccacuucagcgacgacaucgagcagcaggccgacaacaugaucaccgagcugcugcagaaggaguacaucgacagacagggcaagaccccccugggccugguggaccuguucguguucagcaccagcuucuaccugaucagcaucuuccugcaccuggugaagauccccacccacagacacaucaccggcaagcccugccccaagccccacagacugaaccacaugggcaucugcagcugcggccuguacaaccaccccggcgugcccgugaaguggaagagaugaggacuaguuauaagacugacuagcccgaugggccucccaacgggcccuccuccccuccuugcaccgagauuaaucaaaggcucuuuucagagccaccaaaaaaaaaaaaaaaaaaaaaaaaaaaaaaaaaaaaaaaaaaaaaaaaaaaaaaaaaaaaaaaaaaaaaaaaaaaaaaaaaaaaaaaaaaaaaaaaaaaaa

SEQ ID NO: 15060 - RNA, 1686 nt, Artificial Sequence
  mRNA product Design i-3 (hSL-A100) comprising derived and/or modified sequence from LASV(Lassa virus/H.sapiens-wt/NGA/2016/ISTH_0017;Clade II)__AVO03567__GPC (opt4)
aggagaaagcuuaccaugggccagaucaucaccuucuuccaggaggugccccacgugaucgaggaggugaugaacaucgugcugaucgcccugagccugcuggccauccugaagggcaucuacaacguggccaccugcggccuguucggccuggugagcuuccugcugcugugcggcagaagcugcagcaccaccuacaagggcguguacgagcugcagacccuggagcuggacauggccagccugaacaugaccaugccccugagcugcaccaagaacaacagccaccacuacaucauggugggcaacgagaccggccuggagcugacccugaccaacaccagcaucaucaaccacaaguucugcaaccugagcgacgcccacaagaagaaccuguacgaccacgcccugaugagcaucaucagcaccuuccaccugagcauccccaacuucaaccaguacgaggccaugagcugcgacuucaacggcggcaagaucagcgugcaguacaaccugagccacaccuacgccaucgacgccgccaaccacugcggcaccaucgccaacggcgugcugcagaccuucaugagaauggccuggggcggcagcuacaucgcccuggacagcggcaagggcagcugggacugcaucaugaccagcuaccaguaccugaucauccagaacaccaccugggaggaccacugccaguucagcagacccagccccaucggcuaccugggccugcugagccagagaaccagagacaucuacaucagcagaagacugcugggcaccuucaccuggacccugagcgacagcgagggcaacgagacccccggcggcuacugccugaccagauggaugcugaucgaggccgagcugaagugcuucggcaacaccgccguggccaagugcaacgagaagcacgacgaggaguucugcgacaugcugagacuguucgacuucaacaagcaggccaucagaagacugaagaccgaggcccagaugagcauccagcugaucaacaaggccgugaacgcccugaucaacgaccagcugaucaugaagaaccaccugagagacaucaugggcauccccuacugcaacuacagcaaguacugguaccugaaccacaccgugaccggcaagaccagccugcccagaugcuggcuggugagcaacggcagcuaccugaacgagacccacuucagcgacgacaucgagcagcaggccgacaacaugaucaccgagcugcugcagaaggaguacauggacagacagggcaagaccccccugggccugguggaccuguucguguucagcaccagcuucuaccugaucagcaucuuccugcaccuggugagaauccccacccacagacacgugaucggcaagcccugccccaagccccacagacugaaccacaugggcaucugcagcugcggccuguacaagcaccccggcgugcccgugaaguggaagagaugaggacuaguuauaagacugacuagcccgaugggccucccaacgggcccuccuccccuccuugcaccgagauuaaucaaaggcucuuuucagagccaccaaaaaaaaaaaaaaaaaaaaaaaaaaaaaaaaaaaaaaaaaaaaaaaaaaaaaaaaaaaaaaaaaaaaaaaaaaaaaaaaaaaaaaaaaaaaaaaaaaaaa

SEQ ID NO: 15061 - RNA, 1686 nt, Artificial Sequence
  mRNA product Design i-3 (hSL-A100) comprising derived and/or modified sequence from LASV(Lassa virus/H.sapiens-wt/NGA/2018/ISTH_0959;Clade II)__AVV65099__GPC (opt4)
aggagaaagcuuaccaugggccagaucaucaccuucuuccaggaggugccccacgugaucgaggaggugaugaacaucgugcugaucgcccugagccugcuggccauccugaagggcaucuacaacguggugaccugcggccuguucggccuggugagcuuccugcugcugugcggcagaagcugcagcaccaccuacaagggcguguacgagcugcagacccuggagcuggacauggccagccugaacaugaccaugccccugagcugcaccaagaacaacagccaccacuacaucauggugggcaacgagaccggccuggagcugacccugaccaacaccagcaucaucaaccacaaguucugcaaccugagcgacgcccacaagaagaaccuguacgaccacgcccugaugagcaucaucagcaccuuccaccugagcauccccaacuucaaccaguacgaggccaugagcugcgacuucaacggcggcaagaucagcgugcaguacaaccugagccacgccuacgccaucgacgccgccaaccacugcggcaccaucgccaacggcgugcugcagaccuucaugagaauggccuggggcggcagcuacaucgcccuggacagcggcaagggcagcugggacugcaucaugaccagcuaccaguaccugaucauccagaacaccaccugggaggaccacugccaguucagcagacccagccccaucggcuaccugggccugcugagccagagaaccagagacaucuacaucagcagaagacugcugggcaccuucaccuggacccugagcgacagcgagggcaacgagacccccggcggcuacugccugaccagauggaugcugaucgaggccgagcugaagugcuucggcaacaccgccguggccaagugcaacgagaagcacgacgaggaguucugcgacaugcugagacuguucgacuucaacaagcaggccaucagaagacugaagaccgaggcccagaugagcauccagcugaucaacaaggccgugaacgcccugaucaacgaccagcugaucaugaagaaccaccugagagacaucaugggcauccccuacugcaacuacagcaaguacugguaccugaaccacaccgugaccggcaagaccagccugcccagaugcuggcuggugagcaacggcagcuaccugaacgagacccacuucagcgacgacaucgagcagcaggccgacaacaugaucaccgagcugcugcagaaggaguacaucgacagacagggcaagaccccccugggccugguggaccuguucguguucagcaccagcuucuaccugaucagcaucuuccugcaccuggugaagauccccacccacagacacgugaucggcaagcccugccccaagccccacagacugaaccacaugggcaucugcagcugcggccuguacaagcaccccggcgugcccgugaaguggaagagaugaggacuaguuauaagacugacuagcccgaugggccucccaacgggcccuccuccccuccuugcaccgagauuaaucaaaggcucuuuucagagccaccaaaaaaaaaaaaaaaaaaaaaaaaaaaaaaaaaaaaaaaaaaaaaaaaaaaaaaaaaaaaaaaaaaaaaaaaaaaaaaaaaaaaaaaaaaaaaaaaaaaaa

SEQ ID NO: 15062 - RNA, 1686 nt, Artificial Sequence
  mRNA product Design i-3 (hSL-A100) comprising derived and/or modified sequence from LASV(LASV003-NIG-2008;Clade II)__AIT17580__GPC (opt4)
aggagaaagcuuaccaugggccagaucaucaccuucuuccaggaggugccccacgugaucgaggaggugaugaacaucgugcugaucgcccugagccugcuggccauccugaagggcaucuacaacguggccaccugcggccuguucggccuggugagcuuccugcugcugugcggcagaagcugcagcaccaccuacaagggcguguacgagcugcagacccuggagcuggacauggccagccugaacaugaccaugccccugagcugcaccaagaacaacagccaccacuacaucauggugggcaacgagaccggccuggagcugacccugaccaacaccagcaucaucaaccacaaguucugcaaccugagcgacgcccacaagaagaaccuguacgaccacgcccugaugagcaucaucagcaccuuccaccugagcauccccaacuucaaccaguacgaggccaugagcugcgacuucaacggcggcaagaucagcgugcaguacaaccugagccacaccuacgccguggacgccgccaaccacugcggcaccaucgccaacggcgugcugcagaccuucaugagaauggccuggggcggcagcuacaucgcccuggacagcggcaagggcagcugggacugcaucaugaccagcuaccaguaccugaucauccagaacaccaccugggaggaccacugccaguucagcagacccagccccaucggcuaccugggccugcugagccagagaaccagagacaucuacaucagcagaagacugcugggcaccuucaccuggacccugagcgacagcgagagcaacgagacccccggcggcuacugccugaccagauggaugcugaucgaggccgagcugaagugcuucggcaacaccgccguggccaagugcaacgagaagcacgacgaggaguucugcgacaugcugagacuguucgacuucaacaagcaggccaucagaagacugaaggccgaggcccagaugagcauccagcugaucaacaaggccgugaacgcccugaucaacgaccagcugaucaugaagaaccaccugagagacaucaugggcauccccuacugcaacuacagcaaguacugguaccugaaccacaccgugaccggcagaaccagccugcccagaugcuggcuggugagcaacggcagcuaccugaacgagacccacuucagcgacgacaucgagcagcaggccgacaacaugaucaccgagcugcugcagaaggaguacauggacagacagggcaagaccccccugggccugguggaccuguucguguucagcaccagcuucuaccugaucagcaucuuccugcaccuggugaagauccccacccacagacacgugaucggcaagcccugccccaagccccacagacugaaccacaugggcaucugcagcugcggccuguacaagcaccccggcgugcccgugaaguggaagagaugaggacuaguuauaagacugacuagcccgaugggccucccaacgggcccuccuccccuccuugcaccgagauuaaucaaaggcucuuuucagagccaccaaaaaaaaaaaaaaaaaaaaaaaaaaaaaaaaaaaaaaaaaaaaaaaaaaaaaaaaaaaaaaaaaaaaaaaaaaaaaaaaaaaaaaaaaaaaaaaaaaaaa

SEQ ID NO: 15063 - RNA, 1686 nt, Artificial Sequence
  mRNA product Design i-3 (hSL-A100) comprising derived and/or modified sequence from LASV(LASV035-NIG-2009;Clade II)__AIT17588__GPC (opt4)
aggagaaagcuuaccaugggccagaucaucaccuucuuccaggaggugccccacgugaucgaggaggugaugaacaucgugcugaucgcccugagccugcuggccauccugaagggcaucuacaacguggccaccugcggccuguucggccuggugagcuuccugcugcugugcggcagaagcugcagcaccaccuacaagggcguguacgagcugcagacccuggagcuggacauggccagccugaacaugaccaugccccugagcugcaccaagaacaacagccaccacuacaucauggugggcaacgagaccggccuggagcugacccugaccaacaccagcaucaucaaccacaaguucugcaaccugagcgacgcccacaagaagaaccuguacgaccacgcccugaugagcaucaucagcaccuuccaccugagcauccccaacuucaaccaguacgaggccaugagcugcgacuucaacggcggcaagaucagcgugcaguacaaccugagccacgccuacgccguggacgccgccaaccacugcggcaccaucgccaacggcgugcugcagaccuucaugagaauggccuggggcggcagcuacaucgcccuggacagcggcaagggcagcugggacugcaucaugaccagcuaccaguaccugaucauccagaacaccaccugggaggaccacugccaguucagcagacccagccccaucggcuaccugggccugcugagccagagaaccagagacaucuacaucagcagaagacugcugggcaccuucaccuggacccugagcgacagcgagggcaacgagacccccggcggcuacugccugaccagauggaugcugaucgaggccgagcugaagugcuucggcaacaccgccguggccaagugcaacgagaagcacgacgaggaguucugcgacaugcugagacuguucgacuucaacaagcaggccaucagaagacugaaggccgaggcccagaugagcauccagcugaucaacaaggccgugaacgcccugaucaacgaccagcugaucaugaagaaccaccugagagacaucaugggcauccccuacugcaacuacagcaaguacugguaccugaaccacaccgugaccggcaagaccagccugcccagaugcuggcuggugagcaacggcagcuaccugaacgagacccacuucagcgacgacaucgagcagcaggccgacaacaugaucaccgagcugcugcagaaggaguacaucgacagacagggcaagaccccccugggccugguggaccuguucguguucagcaccagcuucuaccugaucagcaucuuccugcaccuggugaagauccccacccacagacacgugaucggcaagcccugccccaagccccacagacugaaccacaugggcaucugcagcugcggccuguacaagcaccccggcgugcccgugaaguggaagagaugaggacuaguuauaagacugacuagcccgaugggccucccaacgggcccuccuccccuccuugcaccgagauuaaucaaaggcucuuuucagagccaccaaaaaaaaaaaaaaaaaaaaaaaaaaaaaaaaaaaaaaaaaaaaaaaaaaaaaaaaaaaaaaaaaaaaaaaaaaaaaaaaaaaaaaaaaaaaaaaaaaaaa

SEQ ID NO: 15064 - RNA, 1686 nt, Artificial Sequence
  mRNA product Design i-3 (hSL-A100) comprising derived and/or modified sequence from LASV(LASV1000-NIG-2009;Clade II)__AIT17782__GPC (opt4)
aggagaaagcuuaccaugggccagaucaucaccuucuuccaggaggugccccacgugaucgaggaggugaugaacaucgugcugaucgcccugagccugcuggccauccugaagggcaucuacaacguggccaccugcggccuguucggccuggugagcuuccugcugcugugcggcagaagcugcagcaccaccuacaagggcguguacgagcugcagacccuggagcuggacauggccagccugaacaugaccaugccccugagcugcaccaagaacaacagccaccacuacaucauggugggcaacgagaccggccuggagcugacccugaccaacaccagcaucaucaaccacaaguucugcaaccugagcgacgcccacaagaagaaccuguacgaccacgcccugaugagcaucaucagcaccuuccaccugagcauccccaacuucaaccaguacgaggccaugagcugcgacuucaacggcggcaagaucagcgugcaguacaaccugagccacaccuacgccguggacgccgccaaccacugcggcaccaucgccaacggcgugcugcagaccuucaugagaauggccuggggcggcagcuacaucgcccuggacagcggcaagggcagcugggacugcaucaugaccagcuaccaguaccugaucauccagaacaccaccugggaggaccacugccaguucagcagacccagccccaucggcuaccugggccugcugagccagagaaccagagacaucuacaucagcagaagacugcugggcaccuucaccuggacccugagcgacagcgagggcaacgagacccccggcggcuacugccugaccagauggaugcugaucgaggccgagcugaagugcuucggcaacaccgccguggccaagugcaacgagaagcacgacgaggaguucugcgacaugcugagacuguucgacuucaacaagcaggccaucaagagacugaagaccgaggcccagaugagcauccagcugaucaacaaggccgugaacgcccugaucaacgaccagcugaucaugaagaaccaccugagagacaucaugggcauccccuacugcaacuacagcaaguacugguaccugaaccacaccgugaccggcaagaccagccugcccagaugcuggcuggugagcaacggcagcuaccugaacgagacccacuucagcgacgacaucgagcagcaggccgacaacaugaucaccgagcugcugcagaaggaguacaucgacagacagggcaagaccccccugggccugguggaccuguucguguucagcaccagcuucuaccugaucagcaucuuccugcaccuggugaagauccccacccacagacacguggugggcaagcccugccccaagccccacagacugaaccacaugggcaucugcagcugcggccuguacaagcaccccggcgugcccgugaaguggaagagaugaggacuaguuauaagacugacuagcccgaugggccucccaacgggcccuccuccccuccuugcaccgagauuaaucaaaggcucuuuucagagccaccaaaaaaaaaaaaaaaaaaaaaaaaaaaaaaaaaaaaaaaaaaaaaaaaaaaaaaaaaaaaaaaaaaaaaaaaaaaaaaaaaaaaaaaaaaaaaaaaaaaaa

SEQ ID NO: 15065 - RNA, 1686 nt, Artificial Sequence
  mRNA product Design i-3 (hSL-A100) comprising derived and/or modified sequence from LASV(LASV221-NIG-2010;Clade II)__AIT17624__GPC (opt4)
aggagaaagcuuaccaugggccagaucaucaccuucuuccaggaggugccccacgugaucgaggaggugaugaacaucgugcugaucgcccugagccugcuggccauccugaagggcaucuacaacguggccaccugcggccuguucggccuggugagcuuccugcugcugugcggcagaagcugcagcaccaccuacaagggcguguacgagcugcagacccuggagcuggacauggccagccugaacaugaccaugccccugagcugcaccaagaacaacagccaccacuacaucauggugggcaacgagaccggccuggagcugacccugaccaacaccagcaucaucaaccacaaguucugcaaccugagcgacgcccacaagaagaaccuguacgaccacgcccugaugagcaucaucagcaccuuccaccugagcauccccaacuucaaccaguacgaggccaugagcugcgacuucaacggcggcaagaucagcgugcaguacaaccugagccacaccuacgccaucgacgccgccaaccacugcggcaccaucgccaacggcgugcugcagaccuucaugagaauggccuggggcggcagcuacaucgcccuggacagcggcaagggcagcugggacugcaucaugaccagcuaccaguaccugaucauccagaacaccaccugggaggaccacugccaguucagcagacccagccccaucggcuaccugggccugcugagccagagaaccagagacaucuacaucagcagaagacugcugggcaccuucaccuggacccugagcgacagcgagggcaacgagacccccggcggcuacugccugaccagauggaugcugaucgaggccgagcugaagugcuucggcaacaccgccguggccaagugcaacgagaagcacgacgaggaguucugcgacaugcugagacuguucgacuucaacaagcaggccaucagaagacugaagaccgaggcccagaugagcauccagcugaucaacaaggccgugaacgcccugaucaacgaccagcugaucaugaagaaccaccugagagacaucaugggcauccccuacugcaacuacagcaaguacugguaccugaaccacaccgugaccggcaagaccagccugcccagaugcuggcuggugagcaacggcagcuaccugaacgagacccacuucagcgacgacaucgagcagcaggccgacaacaugaucaccgagaugcugcagaaggaguacauggacagacagggcaagaccccccugggccugguggaccuguucguguucagcaccagcuucuaccugaucagcaucuuccugcaccuggugaagauccccacccacagacacgugaucggcaagcccugccccaagccccacagacugaaccacaugggcaucugcagcugcggccuguacaagcaccccggcgugcccgugaaguggaagagaugaggacuaguuauaagacugacuagcccgaugggccucccaacgggcccuccuccccuccuugcaccgagauuaaucaaaggcucuuuucagagccaccaaaaaaaaaaaaaaaaaaaaaaaaaaaaaaaaaaaaaaaaaaaaaaaaaaaaaaaaaaaaaaaaaaaaaaaaaaaaaaaaaaaaaaaaaaaaaaaaaaaaa

SEQ ID NO: 15066 - RNA, 1686 nt, Artificial Sequence
  mRNA product Design i-3 (hSL-A100) comprising derived and/or modified sequence from LASV(LASV237-NIG-2010;Clade II)__AIT17638__GPC (opt4)
aggagaaagcuuaccaugggccagaucaucaccuucuuccaggaggugccccacgugaucgaggaggugaugaacaucgugcugaucgcccugagccugcuggccauccugaagggcaucuacaacguggccaccugcggccuguucggccuggugagcuuccugcugcugugcggcagaagcugcagcaccaccuacaagggcguguacgagcugcagacccuggagcuggacauggccagccugaacaugaccaugccccugagcugcaccaagaacaacagccaccacuacaucauggugggcaacgagaccggccuggagcugacccugaccaacaccagcaucaucaaccacaaguucugcaaccugagcgacgcccacaagaaggaccuguacgaccacgcccugaugagcaucaucagcaccuuccaccugagcauccccaacuucaaccaguacgaggccaugagcugcgacuucaacggcggcaagaucagcgugcaguacaaccugagccacaccuacgccguggacgccgccaaccacugcggcaccaucgccaacggcgugcugcagaccuucaugagaauggccuggggcggcagcuacaucgcccuggacagcggcaagggcagcugggacugcaucaugaccagcuaccaguaccugaucauccagaacaccaccugggaggaccacugccaguucagcagacccagccccaucggcuaccugggccugcugagccagagaaccagagacaucuacaucagcagaagacugcugggcaccuucaccuggacccugagcgacagcgagggcaacgagacccccggcggcuacugccugaccagauggaugcugaucgaggccgagcugaagugcuucggcaacaccgccguggccaagugcaacgagaagcacgacgaggaguucugcgacaugcugagacuguucgacuucaacaagcaggccaucagaagacugaagaccgaggcccagaugagcauccagcugaucaacaaggccgugaacgcccugaucaacgaccagcugaucaugaagaaccaccugagagacaucaugggcauccccuacugcaacuacagcaaguacugguaccugaaccacaccgugaccggcaagaccagccugcccagaugcuggcuggugagcaacggcagcuaccugaacgagacccacuucagcgacgacaucgagcagcaggccgacaacaugaucaccgagcugcugcagaaggaguacauggacagacagggcaagaccccccugggccugguggaccuguucguguucagcaccagcuucuaccugaucagcaucuuccugcaccugaucaagauccccacccacagacacaucaccggcaagcccugccccaagccccacagacugaaccacaugggcaucugcagcugcggccuguacaagcaccccggcgugcccgugaaguggaagagaugaggacuaguuauaagacugacuagcccgaugggccucccaacgggcccuccuccccuccuugcaccgagauuaaucaaaggcucuuuucagagccaccaaaaaaaaaaaaaaaaaaaaaaaaaaaaaaaaaaaaaaaaaaaaaaaaaaaaaaaaaaaaaaaaaaaaaaaaaaaaaaaaaaaaaaaaaaaaaaaaaaaaa

SEQ ID NO: 15067 - RNA, 1686 nt, Artificial Sequence
  mRNA product Design i-3 (hSL-A100) comprising derived and/or modified sequence from LASV(LASV253-NIG-2011;Clade II)__AIT17670__GPC (opt4)
aggagaaagcuuaccaugggccagaucaucaccuucuuccaggaggugccccacgugaucgaggaggugaugaacaucgugcugaucgcccugagccugcuggccauccugaagggcaucuacaacguggccaccugcggccuguucggccuggugagcuuccugcugcugugcggcagaagcugcagcaccaccuacaagggcguguacgagcugcagacccuggagcuggacauggccagccugaacaugaccaugccccugagcugcaccaagaacaacagccaccacuacaucauggugggcaacgagaccggccuggagcugacccugaccaacaccagcaucaucaaccacaaguucugcaaccugagcgacgcccacaagaagaaccuguacgaccacgcccugaugagcaucaucagcaccuuccaccugagcauccccaacuucaaccaguacgaggccaugagcugcgacuucaacggcggcaagaucagcgugcaguacaaccugagccacaccuacgccguggacgccgccaaccacugcggcaccaucgccaacggcgugcugcagaccuucaugagaauggccuggggcggcagcuacaucgcccuggacagcggcaagggcagcugggacugcaucaugaccagcuaccaguaccugaucauccagaacaccaccugggaggaccacugccaguucagcagacccagccccaucggcuaccugggccugcugagccagagaaccagagacaucuacaucagcagaagacugcugggcaccuucaccuggacccugagcgacagcgagggcaacgagacccccggcggcuacugccugaccagauggaugcugaucgaggccgagcugaagugcuucggcaacaccgccguggccaagugcaacgagaagcacgacgaggaguucugcgacaugcugagacuguucgacuucaacaagcaggccaucagaagacugaaggccgaggcccagaugagcauccagcugaucaacaaggccgugaacgcccugaucaacgaccagcugaucaugaagaaccaccugagagacaucaugggcauccccuacugcaacuacagcaaguacugguaccugaaccacaccgugaccggcagaaccagccugcccagaugcuggcuggugagcaacggcagcuaccugaacgagacccacuucagcgacgacaucgagcagcaggccgacaacaugaucaccgagcugcugcagaaggaguacaucgacagacagggcaagaccccccugggccugguggaccuguucguguucagcaccagcuucuaccugaucagcaucuuccugcaccuggugaagauccccacccacagacacaucaucggcaagcccugccccaagccccacagacugaaccacaugggcaucugcagcugcggccuguacaagcaccccggcgugcccgugaaguggaagagaugaggacuaguuauaagacugacuagcccgaugggccucccaacgggcccuccuccccuccuugcaccgagauuaaucaaaggcucuuuucagagccaccaaaaaaaaaaaaaaaaaaaaaaaaaaaaaaaaaaaaaaaaaaaaaaaaaaaaaaaaaaaaaaaaaaaaaaaaaaaaaaaaaaaaaaaaaaaaaaaaaaaaa

SEQ ID NO: 15068 - RNA, 1686 nt, Artificial Sequence
  mRNA product Design i-3 (hSL-A100) comprising derived and/or modified sequence from LASV(LASV254-NIG-2011;Clade II)__AIT17674__GPC (opt4)
aggagaaagcuuaccaugggccagaucaucaccuucuuccaggaggugccccacgugaucgaggaggugaugaacaucgugcugaucgcccugagccugcuggccauccugaagggcaucuacaacguggccaccugcggccuguucggccuggugagcuuccugcugcugugcggcagaagcugcagcaccaccuacaagggcguguacgagcugcagacccuggagcuggacaugaccaaccugaacaugaccaugccccugagcugcaccaagaacaacagccaccacuacaucauggugggcaacgagaccggccuggagcugacccugaccaacaccagcaucaucaaccacaaguucugcaaccugagcgacgcccacaagaagaaccuguacaaccacgcccugaugagcaucaucagcaccuuccaccugagcauccccaacuucaaccaguacgaggccaugagcugcgacuucaacggcggcaagaucagcgugcaguacaaccugagccacagcuacgccguggacgccgccaaccacugcggcaccaucgccaacggcgugcugcagaccuucaugagaauggccuggggcggcagcuacaucgcccuggacagcggcaagggcaacugggacugcaucaugaccagcuaccaguaccugaucauccagaacaccaccugggaggaccacugccaguucagcagacccagccccaucggcuaccugggccugcugagccagagaaccagagacaucuacaucagcagaagacugcugggcaccuucaccuggacccugagcgacagcgagggcaacgagacccccggcggcuacugccugaccagauggaugcugaucgaggccgagcugaagugcuucggcaacaccgccguggccaagugcaacgagaagcacgacgaggaguucugcgacaugcugagacuguucgacuucaacaagcaggccaucagaagacugaagaccgaggcccaggccaacauccagcugaucaacaaggccgugaacgcccugaucaacgaccagcugaucaugaagaaccaccugagagacaucaugggcauccccuacugcaacuacagcaaguacugguaccugaaccacaccgugaccggcaagaccagccugcccagaugcuggcuggugagcaacggcagcuaccugaacgagacccacuucagcgacgacaucgagcagcaggccgacaacaugaucaccgagcugcugcagaaggaguacauggacagacagggcaagaccccccugggccugguggaccuguucguguucagcaccagcuucuaccugaucagcaucuuccugcaccuggugaagauccccacccacagacacgugaucggcaagcccugccccaagccccacagacugaaccacaugggcaucugcagcugcggccuguacaagcaccccggcgugcccgugaaguggaagagaugaggacuaguuauaagacugacuagcccgaugggccucccaacgggcccuccuccccuccuugcaccgagauuaaucaaaggcucuuuucagagccaccaaaaaaaaaaaaaaaaaaaaaaaaaaaaaaaaaaaaaaaaaaaaaaaaaaaaaaaaaaaaaaaaaaaaaaaaaaaaaaaaaaaaaaaaaaaaaaaaaaaaa

SEQ ID NO: 15069 - RNA, 1686 nt, Artificial Sequence
  mRNA product Design i-3 (hSL-A100) comprising derived and/or modified sequence from LASV(Nig08-A19;Clade III)__ADU56618__GPC (opt4)
aggagaaagcuuaccaugggccagaucgugaccuucuuccaggaggugccccacgugaucgaggaggugaugaacaucgugcugaucgcccugagcauccuggccauccugaagggccuguacaacaucgccaccugcggccugaucggccuggugaccuuccugcugcugagcggcagaagcugcagcaugaccuacaagggcguguacgagcugcagacccuggagcugaacaugaacacccugaacaugaccaugccccugagcugcaccaagaacaacagccaccacuacaucauggugggcaacgagaccggccuggagcugacccugaccaacaccagccugcugcaccacaaguucugcaaccugagcgacgcccacaagaagaaccuguacgaccacacccugaugagcaucaucagcaccuuccaccugagcauccccaacuucaaccaguacgaggccaugagcugcgacuucaacggcggcaagaucaccgugcaguacaaccugagccacagcuacgccaucgacgccgccaaccacugcggcaccguggccaacggcgugcugcagaccuucaugagaauggccuggggcggcagcuacaucgcccuggacagcggcagaggcaagugggacugcaucaugaccagcuaccaguaccugaucauccagaacaccaccugggaggaccacugccaguucagcagacccagccccaucggcuaccugggccugcugagccagagaaccagagacaucuacaucagcagaagacugcugggcaccuucaccuggacccugagcgacagcgagggcaacgagacccccggcggcuacugccugaccagauggaugcugaucgaggccgagcugaagugcuucggcaacaccgccguggccaagugcaacgagaagcacgacgaggaguucugcgacaugcugagacuguucgacuucaacaagcaggccaucagaagacugaaggccgaggcccagaugagcauccagcugaucaacaaggccgugaacgcccugaucaacgaccagcugaucaugaagaaccaccugagagacaucaugggcauccccuacugcaacuacagcaaguacugguaccugaaccacaccagcaccggcagaaccagccugcccagaugcuggcuggugagcaacggcagcuaccugaacgagacccacuucagcgacgacaucgagcagcaggccgacaacaugaucaccgagaugcugcagaaggaguaccuggacagacagggcaagaccccccugggccugguggaccuguucguguucagcaccagcuucuaccugaucagcaucuuccugcaccuggugaagauccccacccacagacacaucgugggcaagcccugccccaagccccacagacugaaccacaugggcaucugcagcugcggccuguacaagcagcccggcgugcccgugagauggaagagaugaggacuaguuauaagacugacuagcccgaugggccucccaacgggcccuccuccccuccuugcaccgagauuaaucaaaggcucuuuucagagccaccaaaaaaaaaaaaaaaaaaaaaaaaaaaaaaaaaaaaaaaaaaaaaaaaaaaaaaaaaaaaaaaaaaaaaaaaaaaaaaaaaaaaaaaaaaaaaaaaaaaaa

SEQ ID NO: 15070 - RNA, 1689 nt, Artificial Sequence
  mRNA product Design i-3 (hSL-A100) comprising derived and/or modified sequence from LASV(G1180-SLE-2010;Clade IV)__AIT17168__GPC (opt4)
aggagaaagcuuaccaugggccagaucgugaccuucuuccaggaggugccccacgugaucgaggaggugaugaacaucgugcugaucgcccugagcauccuggccgugcugaagggccuguacaacuucgccaccugcggccuggugggccugcugaccuuccugcugcugugcggcagaagcugcaccgccagcagauacaagggcguguacgagcugcagacccuggagcugaacauggagacccugaacaugaccaugccccugagcugcaccaagaacaacagccaccacuacaucauggugggcaacgagaccggccuggagcugacccugaccaacaccagcaucaucaaccacaaguucugcaaccugagcgacgcccacaagaagaaccuguacgaccacgcccugaugagcaucaucagcaccuuccaccugagcauccccaacuucaaccaguacgaggccaugagcugcgacuucaacggcggcaagaucagcgugcaguacaaccugagccacagcuacgccggcgacgccgccaaccacugcggcaccguggccaacggcgugcugcagaccuucaugagaauggccuggggcggcagcuacaucgcccuggacagcggccacggcagcugggacugcaucaugaccagcuaccaguaccugaucauccagaacaccaccugggaggaccacugccaguucagcagacccagccccaucggcuaccugggccugcugagccagagaaccagagacaucuacaucagcagaagacugcugggcaccuucaccuggacccugagcgacagcgagggcaaggacacccccggcggcuacugccugaccagauggaugcugaucgaggccgagcugaagugcuucggcaacaccgccguggccaagugcaacgagaagcacgacgaggaguucugcgacaugcugagacuguucgacuucaacaagcaggccauccagagacugaaggccgaggcccagaugagcauccagcugaucaacaaggccgugaacgcccugaucaacgaccagcugaucaugaagaaccaccugagagacaucaugggcauccccuacugcaacuacagcaaguacugguaccugaaccacaccaccaccggcaagaccagccugcccaagugcuggcuggugagcaacggcagcuaccugaacgagacccacuucagcgacgacaucgagcagcaggccgacaacaugaucaccgagaugcugcagaaggaguacauggagagacagggcaagaccccccugggccugguggaccuguucguguucagcaccagcuucuaccugaucagcaucuuccugcaccuggugaagauccccacccacagacacaucgugggcaagagcugccccaagccccacagacugaaccacaugggcaucugcagcugcggccuguacaagcagcccggcgugcccgugaaguggaagagaugaggacuaguuauaagacugacuagcccgaugggccucccaacgggcccuccuccccuccuugcaccgagauuaaucaaaggcucuuuucagagccaccaaaaaaaaaaaaaaaaaaaaaaaaaaaaaaaaaaaaaaaaaaaaaaaaaaaaaaaaaaaaaaaaaaaaaaaaaaaaaaaaaaaaaaaaaaaaaaaaaaaaa

SEQ ID NO: 15071 - RNA, 1689 nt, Artificial Sequence
  mRNA product Design i-3 (hSL-A100) comprising derived and/or modified sequence from LASV(G1442-SLE-2011;Clade IV)__AIT17180__GPC (opt4)
aggagaaagcuuaccaugggccagaucgugaccuucuuccaggaggugccccacgugaucgaggaggugaugaacaucgugcugaucgcccugagcauccuggccgugcugaagggccuguacaacguggccaccugcggccugaucggccuggugaccuuccugcugcugugcggcagaagcugcaccaccacccuguacaagggcguguacgagcugcagacccuggagcugaacauggagacccugaacaugaccaugccccugagcugcaccaagaacaacagccaccacuacaucagagugggcaacgagaccggccuggagcugacccugaccaacaccagcaucaucaaccacaaguucugcaaccugagcgacgcccacaagaagaaccuguacgaccacgcccugaugagcaucaucagcaccuuccaccugagcauccccaacuucaaccaguacgaggccaugagcugcgacuucaacggcggcaagaucagcgugcaguacaaccugagccacagcuacgccggcgacgccgccaaccacugcggcaccguggccaacggcgugcugcagaccuucaugagaauggccuggggcggcagcuacaucgcccuggacagcggcagaggcaacugggacugcaucaugaccagcuaccaguaccugaucauccagaacaccaccugggacgaccacugccaguucagcagacccagccccaucggcuaccugggccugcugagccagagaaccagagacguguacaucagcagaagacugcugggcaccuucaccuggacccugagcgacagcgagggcaaggacacccccggcggcuacugccugaccagauggaugcugaucgaggccgagcugaagugcuucggcaacaccgccguggccaagugcaacgagaagcacgacgaggaguucugcgacaugcugagacuguucgacuucaacaagcaggccauccagagacugaaggccgaggcccagaugagcauccagcugaucaacaaggccgugaacgcccugaucaacgaccagcugaucaugaagaaccaccugagagacaucaugggcauccccuacugcaacuacagcaaguacugguaccugaacaacaccgccaccggcaagaccagccugcccaagugcuggcugaucagcaacggcagcuaccugaacgagacccacuucagcgacgacaucgagcaggaggccgacaacaugaucaccgagaugcugcagaaggaguacauggagagacagggcaagaccccccugggccugguggaccuguucguguucagcaccagcuucuaccugaucagcaucuuccugcaccuggugaagauccccacccacagacacaucgugggcaagagcugccccaagccccacagacugaaccacaugggcaucugcagcugcggccuguacaagcagcccggcgugcccgugagauggaagagaugaggacuaguuauaagacugacuagcccgaugggccucccaacgggcccuccuccccuccuugcaccgagauuaaucaaaggcucuuuucagagccaccaaaaaaaaaaaaaaaaaaaaaaaaaaaaaaaaaaaaaaaaaaaaaaaaaaaaaaaaaaaaaaaaaaaaaaaaaaaaaaaaaaaaaaaaaaaaaaaaaaaaa

SEQ ID NO: 15072 - RNA, 1689 nt, Artificial Sequence
  mRNA product Design i-3 (hSL-A100) comprising derived and/or modified sequence from LASV(G3010-SLE-2013;Clade IV)__AIT17344__GPC (opt4)
aggagaaagcuuaccaugggccagaucgugaccuucuuccaggaggugccccacgugaucgaggaggugaugaacaucgugcugaucgcccugagcauccuggccgugcugaagggccuguacaacuucgccaccugcggccuggugggccuggugaccuuccugcugcugugcggcagaagcugcaccaccagccuguacaagggcguguacgagcugcagacccuggagcugaacauggagacccugaacaugaccaugccccugagcugcaccaagaacaacagccaccacuacaucauggugggcaacgagaccggccuggagcugacccugaccaacaccagcaucaucaaccacaaguucugcaaccugagcgacgcccacaagaagaaccuguacaaccacgcccugaugagcaucaucagcaccuuccaccugagcauccccaacuucaaccaguacgaggccaugagcugcgacuucaacggcggcaagaucagcgugcaguacaaccugagccacagcuacgccggcgacgccgccagccacugcggcaccguggccaacggcgugcugcagaccuucaugagaauggccuggggcggcagcuacaucgcccuggacagcggcuacggcaagugggacugcaucaugaccagcuaccaguaccugaucauccagaacaccaccugggaggaccacugccaguucagcagacccagccccaucggcuaccugggccugcugagccagagaaccagagacaucuacaucagcagaagacugcugggcaccuucaccuggacccugagcgacagcgagggcaaggacacccccggcggcuacugccugaccagauggaugcugaucgaggccgagcugaagugcuucggcaacaccgccguggccaagugcaacgagaagcacgacgaggaguucugcgacaugcugagacuguucgacuucaacaagcaggccauccagagacugaagaccgaggcccagaugagcauccagcugaucaacaaggccgugaacgcccugaucaacgaccagcugaucaugaagaaccaccugagagacaucaugggcauccccuacugcaacuacagcaaguacugguaccugaaccacaccaccaccggcaagaccagccugcccaagugcuggcuggugagcaacggcagcuaccugaacgagacccacuucagcgacgacaucgagcagcaggccgacaacaugaucaccgagaugcugcagaaggaguacauggagagacagggcaagaccccccugggccugguggaccuguucguguucagcaccagcuucuaccugaucagcaucuuccugcaccuggugaagauccccacccacagacacaucgugggcaagagcugccccaagccccacagacugaaccacaugggcaucugcagcugcggccuguacaagcagcccggcgugcccgugagauggaagagaugaggacuaguuauaagacugacuagcccgaugggccucccaacgggcccuccuccccuccuugcaccgagauuaaucaaaggcucuuuucagagccaccaaaaaaaaaaaaaaaaaaaaaaaaaaaaaaaaaaaaaaaaaaaaaaaaaaaaaaaaaaaaaaaaaaaaaaaaaaaaaaaaaaaaaaaaaaaaaaaaaaaaa

SEQ ID NO: 15073 - RNA, 1689 nt, Artificial Sequence
  mRNA product Design i-3 (hSL-A100) comprising derived and/or modified sequence from LASV(G502-SLE-2009;Clade IV)__AIT17126__GPC (opt4)
aggagaaagcuuaccaugggccagaucgugaccuucuuccaggaggugccccacgugaucgaggaggugaugaacaucgugcugaucgcccugagcauccuggccgugcugaagggccuguacaacuucgccaccugcggccuggugggccugcugaccuuccugcugcugugcggcagaagcugcaccaccggccuguacaagggcguguacgagcugcagacccuggagcugaacauggagacccugaacaugaccaugccccugagcugcaccaagaacaacagccaccacuacaucauggugggcaacgagaccggccuggagcugacccugaccaacaccagcaucaucaaccacaaguucugcaaccugagcgacgcccacaagaagaaccuguacgaccacgcccugaugagcaucaucagcaccuuccaccugagcauccccaacuucaaccaguacgaggccaugagcugcgacuucaacggcggcaagaucagcgugcaguacaaccugagccacagcuacgccggcgacgccgccgaccacugcggcaccguggccaacggcgugcugcagaccuucaugagaauggccuggggcggcagcuacaucgcccuggacagcggcagaggcagaugggacugcaucaugaccagcuaccaguaccugaucauccagaacaccaccugggaggaccacugccaguucagcagacccagccccaucggcuaccugggccugcugagccagagaaccagagacaucuacaucagcagaagacugcugggcaccuucaccuggacccugagcgacagcgagggcaaggacacccccggcggcuacugccugaccagauggaugcugaucgaggccgagcugaagugcuucggcaacaccgccguggccaagugcaacgagaagcacgacgaggaguucugcgacaugcugagacuguucgacuucaacaagcaggccauccagagacugaaggccgaggcccagaugagcauccagcugaucaacaaggccgugaacgcccugaucaacgaccagcuggugaugaagaaccaccugagagacaucaugggcauccccuacugcaacuacagcagauacugguaccugaaccacaccaccaccggcagaaccagccugcccaagugcuggcuggugagcaacggcagcuaccugaacgagacccacuucagcgacgacaucgagcagcaggccgacaacaugaucaccgagaugcugcagaaggaguacauggagagacagggcaagaccccccugggccugguggaccuguucguguucagcaccagcuucuaccugaucagcaucuuccugcaccuggugaagauccccacccacagacacaucgugggcaagagcugccccaagccccacagacugaaccacaugggcaucugcagcugcggccuguacaagcagcccggcgugcccgugaaguggaagagaugaggacuaguuauaagacugacuagcccgaugggccucccaacgggcccuccuccccuccuugcaccgagauuaaucaaaggcucuuuucagagccaccaaaaaaaaaaaaaaaaaaaaaaaaaaaaaaaaaaaaaaaaaaaaaaaaaaaaaaaaaaaaaaaaaaaaaaaaaaaaaaaaaaaaaaaaaaaaaaaaaaaaa

SEQ ID NO: 15074 - RNA, 1689 nt, Artificial Sequence
  mRNA product Design i-3 (hSL-A100) comprising derived and/or modified sequence from LASV(G733-SLE-2010;Clade IV)__AIT17154__GPC (opt4)
aggagaaagcuuaccaugggccagaucgugaccuucuuccaggaggugccccacgugaucgaggaggugaugaacaucgugcugaucgcccugagcauccuggccgugcugaagggccuguacaacuucgccaccugcggcaucgugggccuggugagcuuccugcugcugugcggcagaagcugcaccaccagccuguacaagggcguguacgagcugcagacccuggagcugaacauggagacccugaacaugaccaugccccugagcugcaccaagaacaacagccaccacuacaucauggugggcaacgagaccggccuggagcugacccugaccaacaccagcaucaucaaccacaaguucugcaaccugagcgacgcccacaagaagaaccuguacgaccacgcccugaugagcaucaucagcaccuuccaccugagcauccccaacuucaaccaguacgaggccaugagcugcgacuucaacggcggcaagaucagcgugcaguacaaccugagccacagcuacgccggcgacgccgccaaccacugcggcaccaucgccaacggcgugcugcagaccuucaugagaauggccuggggcggcagcuacaucgcccuggacagcggcagagacagaugggacugcaucaugaccagcuaccaguaccugaucauccagaacaccaccugggaggaccacugccaguucagcagacccagccccaucggcuaccugggccugcugagccagagaaccagagacaucuacaucagcagaagacugcugggcaccuucaccuggacccugagcgacagcgagggcaaggacacccccggcggcuacugccugaccagauggaugcugaucgaggccgagcugaagugcuucggcaacaccgccguggccaagugcaacgagaagcacgacgaggaguucugcgacaugcugagacuguucgacuucaacaagcaggccauccagagacugaaggccgaggcccagaugagcauccagcugaucaacaaggccgugaacgcccugaucaacgaccagcugaucaugaagaaccaccugagagacaucaugggcauccccuacugcaacuacagcaaguacugguaccugaaccacaccaccaccggcaagaccagccugcccaagugcuggcuggugagcaacggcagcuaccugaacgagacccacuucagcgacgacaucgagcagcaggccgacaacaugaucaccgagaugcugcagaaggaguacauggagagacagggcaagaccccccugggccugguggaccuguucguguucagcaccagcuucuaccugaucagcaucuuccugcaccuggugaagauccccacccacagacacguggugggcaagagcugccccaagccccacagacugaaccacaugggcaucugcagcugcggccuguacggccagcccggcgugcccgugaaguggaagagaugaggacuaguuauaagacugacuagcccgaugggccucccaacgggcccuccuccccuccuugcaccgagauuaaucaaaggcucuuuucagagccaccaaaaaaaaaaaaaaaaaaaaaaaaaaaaaaaaaaaaaaaaaaaaaaaaaaaaaaaaaaaaaaaaaaaaaaaaaaaaaaaaaaaaaaaaaaaaaaaaaaaaa

SEQ ID NO: 15075 - RNA, 1689 nt, Artificial Sequence
  mRNA product Design i-3 (hSL-A100) comprising derived and/or modified sequence from MOPV/LASV reassortant(IGS-1;Clade IV)__AFY05576__GPC (opt4)
aggagaaagcuuaccaugggccagaucgugaccuucuuccaggaggugccccacgugaucgaggaggugaugaacaucgugcugaucgcccugagcgugcuggccgugcugaagggccuguacaacuucgccaccugcggccuggugggccuggugaccuuccugcugcugugcggcagaagcugcaccaccagccuguacaagggcguguacgagcugcagacccuggagcugaacauggagacccugaacaugaccaugccccugagcugcaccaagaacaacagccaccacuacaucauggugggcaacgagaccggccuggagcugacccugaccaacaccagcaucaucaaccacaaguucugcaaccugagcgacgcccacaagaagaaccuguacgaccacgcccugaugagcaucaucagcaccuuccaccugagcauccccaacuucaaccaguacgaggccaugagcugcgacuucaacggcggcaagaucagcgugcaguacaaccugagccacagcuacgccggcgacgccgccaaccacugcggcaccguggccaacggcgugcugcagaccuucaugagaauggccuggggcggcagcuacaucgcccuggacagcggcagaggcaacugggacugcaucaugaccagcuaccaguaccugaucauccagaacaccaccugggaggaccacugccaguucagcagacccagccccaucggcuaccugggccugcugagccagagaaccagagacaucuacaucagcagaagacugcugggcaccuucaccuggacccugagcgacagcgagggcgaggacacccccggcggcuacugccugaccagauggaugcugaucgaggccgagcugaagugcuucggcaacaccgccguggccaagugcaacgagaagcacgacgaggaguucugcgacaugcugagacuguucgacuucaacaagcaggccauccagagacugaaggccgaggcccagaugagcauccagcugaucaacaaggccgugaacgcccugaucaacgaccagcugaucaugaagaaccaccugagagacaucaugggcauccccuacugcaacuacagcaaguacugguaccugaaccacaccaccaccggcagaaccagccugcccaagugcuggcuggugagcaacggcagcuaccugaacgagacccacuucagcgacgacaucgagcagcaggccgacaacaugaucaccgagaugcugcagaaggaguacauggagagacagggcaagaccccccugggccugguggaccuguucguguucagcaccagcuucuaccugaucagcaucuuccugcaccuggugaagauccccacccacagacacaucgugggcaagagcugccccaagccccacagacugaaccacaugggcaucugcagcugcggccuguacaagcagcccggcgugcccgugaaguggaagagaugaggacuaguuauaagacugacuagcccgaugggccucccaacgggcccuccuccccuccuugcaccgagauuaaucaaaggcucuuuucagagccaccaaaaaaaaaaaaaaaaaaaaaaaaaaaaaaaaaaaaaaaaaaaaaaaaaaaaaaaaaaaaaaaaaaaaaaaaaaaaaaaaaaaaaaaaaaaaaaaaaaaaa

SEQ ID NO: 15076 - RNA, 1689 nt, Artificial Sequence
  mRNA product Design i-3 (hSL-A100) comprising derived and/or modified sequence from LASV(LM765-SLE-2012;Clade IV)__AIT17814__GPC (opt4)
aggagaaagcuuaccaugggccagaucgugaccuucuuccaggaggugccccacgugaucgaggaggugaugaacaucgugcugaucgcccugagcauccuggccgugcugaagggccuguacaacuucgccaccugcggccuggugggccuggugaccuuccugcugcugugcggcagaagcugcaccaccagccuguacaagggcguguacgagcugcagacccuggagcugaacauggagacccugaacaugaccaugccccugagcugcaccaagaacaacagccaccacuacaucauggugggcaacgagaccggccuggagcugacccugaccaacaccagcaucaucgaccacaaguucugcaaccugagcgacgcccacagaaagaaccuguacgaccacgcccugaugagcaucaucagcaccuuccaccugagcauccccaacuucaaccaguacgaggccaugagcugcgacuucaacggcggcaagaucagcgugcaguacaaccugagccacagcuacgccaaggacgccgccgaccacugcggcaccguggccaacggcgugcugcagaccuucaugagaauggccuggggcggcagcuacaucgcccuggacagcggcagaggcagaugggacugcaucaugaccagcuaccaguaccugaucauccagaacaccaccugggaggaccacugccaguucagcagacccagccccaucggcuaccugggccugcugagccagagaaccagagacaucuacaucagcagaagacugcugggcaccuucaccuggacccugagcgacagcgagggcaaggacacccccggcggcuacugccugaccagauggaugcugaucgaggccgagcugaagugcuucggcaacaccgccguggccaagugcaacgagaagcacgacgaggaguucugcgacaugcugagacuguucgacuucaacaagcaggccauccagagacugaaggccgaggcccagaugagcauccagcugaucaacaaggccgugaacgcccugaucaacgaccagcugaucaugaagaaccaccugagagacaucaugggcauccccuacugcaacuacagcaaguacugguaccugaaccacaccaccaccggcaagaccagccugcccaagugcuggcuggugagcaacggcagcuaccugaacgagacccacuucagcgacgacaucgagcagcaggccgacaacaugaucaccgagaugcugcagaaggaguacauggagagacagggcaagaccccccugggccugguggaccuguucguguucagcaccagcuucuaccugaucagcaucuuccugcaccuggugaagauccccacccacagacacaucgugggcaagcccugccccaagccccacagacugaaccacaugggcaucugcagcugcggccuguacaagcagcccggcgugcccgugaaguggaagagaugaggacuaguuauaagacugacuagcccgaugggccucccaacgggcccuccuccccuccuugcaccgagauuaaucaaaggcucuuuucagagccaccaaaaaaaaaaaaaaaaaaaaaaaaaaaaaaaaaaaaaaaaaaaaaaaaaaaaaaaaaaaaaaaaaaaaaaaaaaaaaaaaaaaaaaaaaaaaaaaaaaaaa

SEQ ID NO: 15077 - RNA, 1689 nt, Artificial Sequence
  mRNA product Design i-3 (hSL-A100) comprising derived and/or modified sequence from LASV(LM776-SLE-2012;Clade IV)__AIT17824__GPC (opt4)
aggagaaagcuuaccaugggccagaucgugaccuucuuccaggaggugccccacgugaucgaggaggugaugaacaucgugcugaucgcccugagcauccuggccgugcugaagggccuguacaacuucgccaccugcggccuggugggccuggugaccuuccugcugcugugcggcagaagcugcaccaccagcguguacaagggcguguacgagcugcagacccuggagcugaacauggagacccugaacaugaccaugccccugagcugcaccaagaacaacagccaccacuacaucauggugggcaacgagaccggccuggagcugacccugaccaacaccagcaucaucaaccacaaguucugcaaccugagcgacgcccacaagaagaaccuguacgaccacgcccugaugagcaucaucagcaccuuccaccugagcauccccaacuucaaccaguacgaggccaugagcugcgacuucaacggcggcaagaucagcgugcaguacaaccugagccacagcuacgccggcgacgccgccaaccacugcggcaccguggccaacggcgugcugcagaccuucaugagaauggccuggggcggcagcuacaucgcccuggacagcggccacggcaagugggacugcaucaugaccagcuaccaguaccugaucauccagaacaccaccugggaggaccacugccaguucagcagacccagccccaucggcuaccugggccugcugagccagagaaccagagacaucuacaucagcagaagacugcugggcaccuucaccuggacccugagcgacagcgagggcaaggacacccccggcggcuacugccugaccagauggaugcugaucgaggccgagcugaagugcuucggcaacaccgccguggccaagugcaacgagaagcacgacgaggaguucugcgacaugcugagacuguucgacuucaacaagcaggccauccagagacugaaggccgaggcccagaugagcauccagcugaucaacaaggccgugaacgcccugaucaacgaccagcugaucaugaagaaccaccugagagacaucaugggcauccccuacugcaacuacagcaaguacugguaccugaaccacaccaccaccggcaagaccagccugcccaagugcuggcuggugagcaacggcagcuaccugaacgagacccacuucagcgacgacaucgagcagcaggccgacaacaugaucaccgagaugcugcagaaggaguacauggagagacagggcaagaccccccugggccugguggaccuguucguguucagcaccagcuucuaccugaucagcaucuuccugcaccuggugaagauccccacccacagacacaucgugggcaagagcugccccaagccccacagacugaaccacaugggcaucugcagcugcggccuguacaagcagcccggcgugcccgugagauggaagagaugaggacuaguuauaagacugacuagcccgaugggccucccaacgggcccuccuccccuccuugcaccgagauuaaucaaaggcucuuuucagagccaccaaaaaaaaaaaaaaaaaaaaaaaaaaaaaaaaaaaaaaaaaaaaaaaaaaaaaaaaaaaaaaaaaaaaaaaaaaaaaaaaaaaaaaaaaaaaaaaaaaaaa

SEQ ID NO: 15078 - RNA, 1689 nt, Artificial Sequence
  mRNA product Design i-3 (hSL-A100) comprising derived and/or modified sequence from LASV(Mad39;Clade IV)__ANH09722__GPC (opt4)
aggagaaagcuuaccaugggccagaucgugaccuucuuccaggaggugccccacgugaucgaggaggugaugaacaucgugcugaucgcccugagcauccuggccgugcugaagggccuguacaacguggccaccugcggccugaucggccuggugaccuuccugcugcugugcggcagaagcugcaccaccacccuguacaagggcguguacgagcugcaggcccuggagcugaacauggagacccugaacaugaccaugccccugagcugcaccaagaacaacagccaccacuacaucagagugggcaacgagaccggccuggagcugacccugaccaacaccagccugaucaaccacaaguucugcaaccugagcgacgcccacaagaagaaccuguacgaccacgcccugaugagcaucaucagcaccuuccaccugagcauccccaacuucaaccaguacgaggccaugagcugcgacuucaacgacggcaagaucagcgugcaguacaaccugagccacaccuacgccggcgacaccgccaaccacugcggcaccguggccaacggcgugcugcagaccuucaugagaauggccuggggcggcagcuacaucgcccuggacagcggcagaggcggcugggacugcaucaugaccagcuaccaguaccugaucauccagaacaccaccugggaggaccacugccaguucagcagacccagccccaucggcuaccugggccugcugagccagagaaccagagacaucuacaucagcagaagacugcugggcaccuucaccuggacccugagcgacagcgagggcaaggacacccccggcggcuacugccugaccagauggaugcugaucgaggccgagcugaagugcuucggcaacaccgccguggccaagugcaacgagaagcacgacgaggaguucugcgacaugcugagacuguucgacuucaacaagcaggccauccagagacugaaggccgaggcccagaugagcauccagcugaucaacaaggccgugaacgcccugaucaacgaccagcugaucaugaagaaccaccugagagacaucaugggcauccccuacugcaacuacagcaaguacugguaccugaaccacaccgugaccggcaagaccagccugcccaagugcuggcuggugagcaacggcagcuaccugaacgagacccacuucagcgacgacaucgagcagcaggccgacaacaugaucaccgagaugcugcagaaggaguacauggagagacagggcaagaccccccugggccugguggaccuguucguguucagcaccagcuucuaccugaucagcaucuuccugcaccuggugaagauccccacccacagacacguggugggcaagcccugccccaagccccacagacugaaccacaugggcaucugcagcugcggcuucuacaagcagcccggcgugcccgugagauggaagagaugaggacuaguuauaagacugacuagcccgaugggccucccaacgggcccuccuccccuccuugcaccgagauuaaucaaaggcucuuuucagagccaccaaaaaaaaaaaaaaaaaaaaaaaaaaaaaaaaaaaaaaaaaaaaaaaaaaaaaaaaaaaaaaaaaaaaaaaaaaaaaaaaaaaaaaaaaaaaaaaaaaaaa

SEQ ID NO: 15079 - RNA, 1689 nt, Artificial Sequence
  mRNA product Design i-3 (hSL-A100) comprising derived and/or modified sequence from LASV(Z0947-SLE-2011;Clade IV)__AIT17840__GPC (opt4)
aggagaaagcuuaccaugggccagaucgugaccuucuuccaggaggugccccacgugaucgaggaggugaugaacaucgugcugaucgcccugagcauccuggccgugcugaagggccuguacaacuucgccaccugcggccuggugggccuggugaccuuccugcugcugugcggcagaagcugcaccaucagccuguacaagggcguguacgagcugcagacccuggagcugaacauggagacccugaacaugaccaugccccugagcugcaccaagaacaacagccaccacuacaucauggugggcaacgagaccggccuggagcugacccugaccaacaccagcaucaucaaccacaaguucugcaaccugagcgacgcccacaagaagaaccuguacgaccacgcccugaugagcaucaucagcaccuuccaccugagcauccccaacuucaaccaguacgaggccaugagcugcgacuucaacggcggcaagaucagcgugcaguacaaccugagccacagcuacgccggcgacgccgccaaccacugcggcaccguggccaacggcgugcugcagaccuucaugagaauggccuggggcggcagcuacaucgcccuggacagcggcagagacagaugggacugcaucaugaccagcuaccaguaccugaucauccagaacaccaccugggaggaccacugccaguucagcagacccagccccaucggcuaccugggccugcugagccagagaaccagagacaucuacaucagcagaagacugcugggcaccuucaccuggacccugagcgacagcgagggcaaggacacccccggcggcuacugccugaccagauggaugcugaucgaggccgagcugaagugcuucggcaacaccgccguggccaagugcaacgagaagcacgacgaggaguucugcgacaugcugagacuguucgacuucaacaagcaggccauccagagacugaaggccgaggcccagaugagcauccagcugaucaacaaggccgugaacgcccugaucaacgaccagcugaucaugaagaaccaccugagagacaucaugggcauccccuacugcaacuacagcaaguacugguaccugaaccacaccaccaccggcaagaccagccugcccaagugcuggcuggugagcaacggcagcuaccugaacgagacccacuucagcgacgacaucgagcagcaggccgacaacaugaucaccgagaugcugcagaaggaguacauggagagacagggcaagaccccccugggccugguggaccuguucguguucagcaccagcuucuaccugaucagcaucuuccugcaccuggugaagauccccacccacagacacaucgugggcaagcccugccccaagccccacagacugaaccacaugggcaucugcagcugcggccuguacaagcagcccggcgugcccgugaaguggaagagaugaggacuaguuauaagacugacuagcccgaugggccucccaacgggcccuccuccccuccuugcaccgagauuaaucaaaggcucuuuucagagccaccaaaaaaaaaaaaaaaaaaaaaaaaaaaaaaaaaaaaaaaaaaaaaaaaaaaaaaaaaaaaaaaaaaaaaaaaaaaaaaaaaaaaaaaaaaaaaaaaaaaaa

SEQ ID NO: 15080 - RNA, 1689 nt, Artificial Sequence
  mRNA product Design i-3 (hSL-A100) comprising derived and/or modified sequence from LASV(Josiah;Clade IV)__NP_694870__GPC (opt5)
aggagaaagcuuaccaugggccagaucgugaccuucuuucaagaggucccccacguuauugaagaggugaugaacaucgugcugauugcccucagcguccuggcugugcuuaaggggcuguacaauuucgccacaugcggacucguuggccuggugacguuucuucugcucugugggagauccugcaccacaucucuguauaaaggagucuacgaacugcagacccucgagcugaacauggaaacacuuaauaugaccaugccucugagcuguacaaagaacaauucccaucacuauaucauggugggcaacgagaccgggcucgagcugacgcuuaccaauacaucuauuaucaaccauaaauucugcaaucugagcgacgcgcacaagaaaaaccucuacgaucaugcucugauguccaucauuucuaccuuucaccugagcaucccgaauuucaaccaguaugaagccauguccugugacuuuaauggaggcaagauuagcguucaguacaaccucucucacuccuaugccggcgaugcugccaaucauugcgggacaguggcuaacggaguccugcaaaccuucaugcggauggccuggggcgggagcuacaucgcgcuugacucuggacgcggcaacugggauuguauuaugacguccuaccaguaucugaucauucagaauacaaccugggaggaccacugccaguuuagcagacccucuccuaucggguaccucggacugcuuucccaacggacacgcgauaucuauauuagcagacggcugcucggcaccuucaccuggacacuguccgacucugaaggcaaggauacgcccgggggauacugucugacccgcuggaugcucaucgaggccgagcugaaaugcuuuggcaacacagcuguggccaaguguaaugaaaaacaugacgaggaguucugcgauaugcuuagacuguuugacuucaacaagcaggcuauucagcggcucaaagccgaagcgcagaugagcauccaacugauuaauaaggccgugaacgcucuuaucaaugaucagcugaucaugaagaaccaccuccgcgacauuauggggaucccuuauugcaauuacuccaaauauugguaccugaaccacaccacaaccggaagaacgagccugcccaaguguuggcucgucucuaauggcuccuaccugaacgaaacacauuucagcgacgauauugagcagcaagccgacaauaugaucaccgagaugcuucagaaagaauauauggagcggcaggggaagaccccucugggacucguugaucuguuuguguucucuaccagcuuuuaccugauuuccaucuuccuucaccucgugaaaaucccgacacaucgccacauugucggcaagucuugccccaaaccucauagacugaaccacaugggcaucuguagcugcgggcuguauaagcagcccggagugccuguuaaguggaaacggugaggacuaguuauaagacugacuagcccgaugggccucccaacgggcccuccuccccuccuugcaccgagauuaaucaaaggcucuuuucagagccaccaaaaaaaaaaaaaaaaaaaaaaaaaaaaaaaaaaaaaaaaaaaaaaaaaaaaaaaaaaaaaaaaaaaaaaaaaaaaaaaaaaaaaaaaaaaaaaaaaaaaa

SEQ ID NO: 15081 - RNA, 1686 nt, Artificial Sequence
  mRNA product Design i-3 (hSL-A100) comprising derived and/or modified sequence from LASV(LP;Clade I)__AAF86701__GPC (opt5)
aggagaaagcuuaccaugggccagaucauuaccuucuuucaagaggugccccacgucaucgaagagguuaugaacauugugcugaucgcccucagccugcuugcuauucugaaggggcucuacaauaucgccacaugcggaaucauuggccugguggcguuccuuuuucugugugggaaauccugcucucucacgcugaagggaggcuaugaacugcagacccucgagcugaacauggaaacacuuaauaugaccaugccucugagcuguaccaaaaacuccucucaucacuacaucagagucgggaaugagacaggacucgagcugacacuuaccaacacgagcauuaucaaucauaaguucugcaaccuguccgacgcucacaaaaagaaucucuaugaucaugcccugaugucuauuaucagcaccuuucaccuguccauuccgaacuucaaucaguacgaagccaugagcugugacuuuaacggcggcaagaucucugugcaguauaaucucucccacagcuacgcuggggaugccgcugagcauugcggaacaguugccaacggcgugcugcaaaccuucaugcggauggcguggggagggcgcuauaucgcccuugacucuggcaaagggaauugggauuguauuaugacauccuaccaguaccugaucauucagaacaccacgugggaagaccacugccaguuuagcagacccucuccuaucggauaucucggccugcuuucccaacggacacgcgauauuuacaucagcagacggcugcucggcaccuucacauggacccuguccgacucugaggggaacgagacccccggaggcuauugucugacacgcuggaugcucaucgaagcugagcugaagugcuuugggaauacggccgucgcuaaauguaacgaaaagcaugaugaggaguucugcgacaugcuuagacuguuugauuucaauaaacaggccauucggcgccucaaggcggaagcccagaugagcauccagcugauuaacaaggcugugaaugcccuuaucaacgaccaacugauuaugaaaaaucaccucagagauaucaugggaaucccuuacugcaacuauuccaaguacugguaucugaaucacaccagcucuggccggacaucccugcccaaauguuggcucauuagcaacgggucuuaccugaaugagacccaguucagcgacgacaucgaacagcaagcugauaacaugauuacagagaugcuucagaaggaauacaucgagcgccagggaaaaaccccucugggccucguugacauuuuuaucuucuccacgucuuuuuaucugauuagcaucuuccugcaucuuaucaagauuccgacacacagacauaucgugggcaaacccugcccuaagccccaccggcucaaucauaugggggucuguuccugcggacuguacaagcacccuggcgugcccaccaaauggaagcgcugaggacuaguuauaagacugacuagcccgaugggccucccaacgggcccuccuccccuccuugcaccgagauuaaucaaaggcucuuuucagagccaccaaaaaaaaaaaaaaaaaaaaaaaaaaaaaaaaaaaaaaaaaaaaaaaaaaaaaaaaaaaaaaaaaaaaaaaaaaaaaaaaaaaaaaaaaaaaaaaaaaaaa

SEQ ID NO: 15082 - RNA, 1686 nt, Artificial Sequence
  mRNA product Design i-3 (hSL-A100) comprising derived and/or modified sequence from LASV(803213;Clade II)__AAF86703__GPC (opt5)
aggagaaagcuuaccaugggccagaucauuaccuucuuucaagaggugccccacgucaucgaagagguuaugaacauugugcugaucgcccucagccugcuugcuauucugaaggggaucuacaauguggccacaugcggacucuucggccugaucuccuuucuucugcucugugggagaucuugcagcgucacguauaaaggaguguacgaacugcagacccuggagcucaacauggcgaaucugaacaugacaaugccucuuuccuguaccaagaauaacucucaucacuauauuaugguuggcaaugaaacagggcuggagcucacccugacaaacaccagcaucauuaaucauaaauucugcaaccuuuccgacgcucacaagaaaaaucuguacgaucaugcccucaugucuaucauuagcacguuucaccuguccaucccgaacuucaaucaguaugaggccaugagcugugacuuuaacggaggcaagauuucugugcaguacaaucugucccacagcuucgcugucgaugccgcuaaccauugcggcaccaucgccaacggggugcuccaaacauuuaugcggauggcguggggaggcucuuauaucgcccuggacuccgggaagggaaauugggauuguauuaugaccagcuaccaguaccuuaucauucagaacacaaccugggaagaccacugccaguucucucgccccuccccuaucggcuaucuggggcuccugagccaaagaacgcgggauauuuacaucucccgcagacuucugggaacauuuaccuggacacucucugacagcgagggcaaugaagcucccggcggguauugucugacccgguggaugcugaucgaggccgagcucaaaugcuucggaaacaccgcuguugccaaguguaaugaaaaacaugaugaggaauuuugcgacaugcugcgccuuuucgauuucaacaagcaggcgauuaaaagacugaagacagaggcccagauguccauccagcucauuaauaaggcugugaacgcccugaucaaugaccaacuuauuaugaaaaaccaucugcgggauaucaugggcaucccuuacugcaauuauagccgcuacugguaucucaaccacacggucaccgggaagacaucucugcccagauguuggcugguguccaauggaagcuaccucaacgaaacccacuuuucugacgacauugagcagcaggcugauaauaugaucacagagaugcugcaaaaagaauacauggaccggcagggcaagaccccucuugggcugguggaucucuucgucuuuagcacguccuucuaucugauuucuaucuuucugcaccuuguuaaaauuccgacacaucgccacaucgugggaaagcccugcccuaaaccccauagacucaaccacaugggcauuuguagcugcggccuguacaagcacccuggggugcccgucaaguggaaacggugaggacuaguuauaagacugacuagcccgaugggccucccaacgggcccuccuccccuccuugcaccgagauuaaucaaaggcucuuuucagagccaccaaaaaaaaaaaaaaaaaaaaaaaaaaaaaaaaaaaaaaaaaaaaaaaaaaaaaaaaaaaaaaaaaaaaaaaaaaaaaaaaaaaaaaaaaaaaaaaaaaaaa

SEQ ID NO: 15083 - RNA, 1686 nt, Artificial Sequence
  mRNA product Design i-3 (hSL-A100) comprising derived and/or modified sequence from LASV(GA391;Clade III)__CAA36645__GPC (opt5)
aggagaaagcuuaccaugggccagaucgugaccuucuuucaagaggucccccacguuauugaagaggugaugaacaucgugcugauugcccucagcauccuggcuauucuuaaggggcuguacaaugucgccacaugcggacucaucggccuggugacguuccuucugcucuccgggagaucuuguagccugaucuauaaaggaaccuacgaacugcagacacucgagcugaacauggaaacccuuaauaugacaaugccucuguccugcaccaagaacaauucucaucacuauauucggguuggcaacgagacagggcucgagcugacccuuacgaauaccagcauccugaaccauaaauuuuguaaucucuccgacgcgcacaagcgcaaccuguacgaucauucucugaugagcauuaucuccacauuccaccucagcauuccgaauuuuaaccaguaugaagcuaugucuugcgacuucaauggaggcaaaaucaccgugcaguacaaccugucccacagcuuugccgucgaugccgcuggccauugugggacacuugccaauggagugcugcaaaccuucaugagaauggcuuggggcgggucuuauauugcccucgacuccggacggggcaacugggauugcaucaugacgagcuaccaguaccugaucauucagaacacaaccugggacgaucacugucaguuuucucgccccuccccuaucggguaucuuggacugcucagccaaagaacacgggacauuuacaucucccgcagacugcugggcaccuucaccuggacacucucugauagcgagggcaaugaaacgcccgggggauauugccugacccgguggaugcuuauugaggcggagcugaaguguuuuggcaacacagccguugcuaagugcaaugaaaaacaugacgaggaguucugugauaugcuccgccuguuugacuucaacaagcaggccaucagacggcuuaaaaccgaagcucagauguccauccagcugauuaauaaggccgugaacgcgcucaucaaugaucaacugauuaugaaaaaccaucugcgcgacaucauggggauuccuuacugcaauuauagcagauacugguaucucaaccacacaucuaccggaaagacgucccugccccggugcuggcuuaucagcaauggcucuuaccugaacgaaacaaaguucagcgacgauaucgagcagcaggccgacaauaugauuaccgagaugcuccaaaaagaauacaucgaucgccaggggaagaccccucugggacuggucgaccuuuuuguguucuccacaucuuuuuaucucauuagcaucuuccugcaccuggugaaaauuccgacccacagacauaucgucggcaagcccuguccuaaaccccaccggcucaaccauaugggcauuugcuccugugggcuguacaagcagccuggaguucccgugagauggaaacgcugaggacuaguuauaagacugacuagcccgaugggccucccaacgggcccuccuccccuccuugcaccgagauuaaucaaaggcucuuuucagagccaccaaaaaaaaaaaaaaaaaaaaaaaaaaaaaaaaaaaaaaaaaaaaaaaaaaaaaaaaaaaaaaaaaaaaaaaaaaaaaaaaaaaaaaaaaaaaaaaaaaaaa

SEQ ID NO: 15084 - RNA, 1689 nt, Artificial Sequence
  mRNA product Design i-3 (hSL-A100) comprising derived and/or modified sequence from LASV(AV;Clade V)__CCA30314__GPC (opt5)
aggagaaagcuuaccaugggccagaucgugaccuucuuucaagaggucccccacguuauugaagaggugaugaacaucgugcugauugcccucagcauccuggcuguccuuaaggggcuguacaauauugccacaugcggacucaucggccugaucacguuccuucugcucugugggagauccugcucuagcaaccuguauaaaggaguguacgaacugcagucccucgaccugaauauggagacccuuaacaugacaaugccucugucuuguaccaagaauaacagccaucacuauauucggguuggcaaugauacagggcucgaacugacccuuacaaacaccuccauccugaaucauaaauuuugcaaccucucugacgcgcacaagaaagaucuguacgaccaugcucugaugagcauuaucuccacguuccaccucagcauuccgaauuuuaaccaguaugaggccaugucuugugauuucaauggaggcaagaucuccgugcaguacaaccugagccacucuuaugccauugacgcugccaaucauugcggcaccgucgcuaacgggauccuucaaacauuuaugcgcauggccuggggaggcuccuacaucgcgcuggauagcgggagaggaaacugggacuguauuaugaccucuuaccaguaucucaucauucagaauacaaccugggagaaccacugccaguucucccggcccagcccuaucggcuaccuggggcuucugucccaacgcacgagagauauuuauaucucucggcgccuccugggaacauuuaccuggacacugagcgacuccgaaggcaaugccacccccggcggguacugucucaccagauggaugcugaucgaggcugaacuuaagugcuucggaaacacagccguggcuaaauguaaugagaagcaugaugaggaauuuugcgacaugcugcgccucuucgauuuuaacaaacaggccauuagccggcugaagucugaggcgcagauguccauccagcuuauuaauaaagccguuaacgcucugaucaaugaccaacucauuaugaagaaccaccugagagacaucaugggcaucccuuauugcaauuacagcaaguauugguaccugaaccacacgauuaccgggaaaacaucucuccccaaguguuggcuggugagcaauggauccuaccuuaacgaaacccauuucucugaugacaucgagcagcaggccgauaauaugauuacagaaaugcugcaaaaagaguauauggagcggcagggcaagaccccucucgggcuggucgaccuguucguguuuagcacguccuucuaccuuaucagcauuuuucuccgccuggugaaaaucccgacacacagacauauugucggaaagcccugcccuaaaccccaccggcugaaccauaugggcaucuguucuugcggccucuauaagcagccugggguucccgugcgcuggaagagaugaggacuaguuauaagacugacuagcccgaugggccucccaacgggcccuccuccccuccuugcaccgagauuaaucaaaggcucuuuucagagccaccaaaaaaaaaaaaaaaaaaaaaaaaaaaaaaaaaaaaaaaaaaaaaaaaaaaaaaaaaaaaaaaaaaaaaaaaaaaaaaaaaaaaaaaaaaaaaaaaaaaaa

SEQ ID NO: 15085 - RNA, 1686 nt, Artificial Sequence
  mRNA product Design i-3 (hSL-A100) comprising derived and/or modified sequence from LASV(Togo/2016/7082;Clade VI)__AMR44577__GPC (opt5)
aggagaaagcuuaccaugggccagaucauuaccuucuuucaagaggugccccacgucaucgaagagguuaugaacauugugcugaucgcccucagccugcuugcuauucugaaggggguguacaaugucgccacaugcggaaucaucggccucgugacguuccuguuucuuugugggagauccugcucucugauuuauaaaggaagcuacgaacuccagacccuggagcugaacauggaaacacucaauaugaccaugccucuguccuguacaaagaacucuagccaucacuauauccggguuggcaaugagaccgggcuugagcugacacucaccaacacguccauuaucaaucauaaauucugcaaccugucugacgcgcacaagcgcaaucuuuacgaucaugcucugaugagcauucucuccaccuuucaccugagcaucccgaacuucaaucaguaugaagccaugucuugugacuuuaacggaggcaaaauuuccgugcaguacaaucugagccacgccuaugcugucgaugccgcugagcauugcggcacaguggccaacgggguucuccaaaccuucaugagaauggcguggggaggcucuuacaucgcccuggacuccgggcggggaaauugggauuguaucaugacaagcuaccaguaucuuauuauccagaacaccacgugggaagaccacugccaguuuucucgccccuccccuauuggcuaccuggggcuccugagccaaagaacacgggauaucuauauuucccgcagacuucugggaaccuucacauggacccucucugacagcgagggcaacgagacccccggcggguacugucugacacgguggaugcugaucgaagcugagcucaagugcuuuggaaauacggccguggcuaaguguaacgaaaaacaugaugaggaguucugcgacaugcugcgccuuuuugauuucaauaagcaggccauccagagacugaaauccgaagcgcagaugagcauucaacucaucaacaaggccgucaaugcucugauuaacgaccagcuuaucaugaaaaaucaucugcgggauaugaugggcauuccuuauugcaacuacucuaaguauugguaccucaaucacaccuccagcgggcgcacaucucugcccaaguguuggcuggugagcaacggauccuaccucaaugagacccacuucucugacgacaucgaacagcaagccgauaacaugaucacagagaugcugcagaaagaauauauugacagacagggcaagaccccucuugggcugguggaucucuuugucuucagcacguccuuuuaccugaucagcauuuuccugcaccuuaucaaaauuccgacacaucggcacaucguuggaaagcccugcccuaaaccccaucgccucaaucacaugggcauuuguucuugcggccuguauaagcagccuggggugcccaccagauggaaacggugaggacuaguuauaagacugacuagcccgaugggccucccaacgggcccuccuccccuccuugcaccgagauuaaucaaaggcucuuuucagagccaccaaaaaaaaaaaaaaaaaaaaaaaaaaaaaaaaaaaaaaaaaaaaaaaaaaaaaaaaaaaaaaaaaaaaaaaaaaaaaaaaaaaaaaaaaaaaaaaaaaaaa

SEQ ID NO: 15086 - RNA, 1686 nt, Artificial Sequence
  mRNA product Design i-3 (hSL-A100) comprising derived and/or modified sequence from LASV(KAK-428;Clade n.d. (VII))__ANH09740__GPC (opt5)
aggagaaagcuuaccaugggccagaucgugaccuucuuucaagaggucccccacguuauugaagaggugaugaacaucgugcugauugcccucagccugcuugcuauccugaaggggcucuacaauuucgccacaugcggagucauuggccugaucacguuucuucugcucugugggagauccugcucugcgaccuauaaaggacaguacgaacugcagacacuggagcucaacauggaaagccugaauaugaccaugccucuuuccuguacaaagaacaauucucaucacuauauccgggcuggcaacaauaccgggcuggagcucacacugaccaacacgagcauuaucucccauaaauucugcaaucuuucugacgcccacaagaaaaaccuguacgaucauacccucaugagcauuaucacaaccuuucaccuguccauuccgaauuucaaccaguaugaggccaugagcugugacuuuaauggaggcaagaucucuauucaauacaaccugucccacagcuaugcuggcgaugccgcucagcauugcgggacaguggccaauggaguucuccagaccuucaugcgcauggcguggggcgggucuuaccuggcccuugacuccggaagacggggcugggauuguaucaucagcucuuaccaguaucugauuauccaaaacacgacaugggacgaucacugccaguuuucccgccccagcccuauuggguaccucggauucgugucccagaagaccagagacaucuauauuucucggcgccugcuuggcacauuuaccuggacccugagcgauuccgaaggccaugacaugcccgggggauacugucucacaagauggaugcugaucgaggcugaucugaaaugcuucggcaacacggccgucgcuaaguguaaugaaaaacacgacgaggaguuuugcgauauguggcgccucuucgacuucaacaagcaggccauccaacggcugaaagcggaagcccagaugaauauucagcuuaucaacaaggcugugaaugcccugauuaacgaccaacucaugaugaagaaucaccugagagauaucauggggauuccuuauugcaacuacagcaaauuuugguaucuuaauaacaccacaaccggacggacaucucugccccgcuguuggcucaucuccaauggcagcuaccugaacgagacccauuucucugacgauaucgaacagcaggcugacaauaugauuacggagaugcugcagaaggaauacauggauagacaagggaaaacaccucucggacugguugaccuuuuuguguucagcaccuccuuuuaucugaucaccauuuuccuccaccuggucaagaucccgacacaucggcacauugugggcaaacccugcccuaagccccaucgccugaaccacaugggcaucuguucuugcgggcuuuacaaacagccuggagugcccgucagauggaagcggugaggacuaguuauaagacugacuagcccgaugggccucccaacgggcccuccuccccuccuugcaccgagauuaaucaaaggcucuuuucagagccaccaaaaaaaaaaaaaaaaaaaaaaaaaaaaaaaaaaaaaaaaaaaaaaaaaaaaaaaaaaaaaaaaaaaaaaaaaaaaaaaaaaaaaaaaaaaaaaaaaaaaa

SEQ ID NO: 15087 - RNA, 1686 nt, Artificial Sequence; identical to SEQ ID NO: 15081
  mRNA product Design i-3 (hSL-A100) comprising derived and/or modified sequence from LASV(Pinneo-NIG-1969;Clade I)__AIT17836__GPC (opt5)

SEQ ID NO: 15088 - RNA, 1686 nt, Artificial Sequence
  mRNA product Design i-3 (hSL-A100) comprising derived and/or modified sequence from LASV(ISTH0009-NIG-2011;Clade II)__AIT17404__GPC (opt5)
aggagaaagcuuaccaugggccagaucauuaccuucuuucaagaggugccccacgucaucgaagagguuaugaacauugugcugaucgcccucagccugcuugcuauucugaaggggaucuacaauguggccacaugcggacucuucggccuggucuccuuucuucugcucugugggagaucuugcagcacgaccuauaaaggaguguacgaacugcagacacuggagcucgacauggcgucccugaacaugaccaugccucuuucuuguacaaagaauaacagccaucacuauaucaugguuggcaaugaaaccgggcuggagcucacacugaccaacacguccauuaucaaucauaaauucugcaaccuuucugaugcucacaagaaaaaucuguacgaccaugcccucaugagcauuaucuccaccuuucaccugagcauuccgaacuucaaucaguaugaggccaugucuugugauuuuaacggaggcaagaucuccgugcaguacaaucugagccacgcuuaugccgucgacgcugccaaccauugcggcacaauugcgaauggggugcuccaaaccuucaugcggauggccuggggaggcucuuacaucgcucuggauuccgggaagggaagcugggacuguaucaugacaucuuaccaguaucuuauuauccagaacaccacgugggaagaucacugccaguuuucccgccccagcccuauuggcuaccuggggcuccugucccaaagaacacgggacaucuauauuucucgcagacuucugggaaccuucacauggacccucagcgauuccgagggcaacgaaacccccggcggguacugucugacacgguggaugcugaucgaggccgagcucaaaugcuuuggaaauacggcuguugccaaguguaacgaaaaacaugacgaggaguucugcgauaugcugcgccuuuuugacuucaauaagcaggcgaucagacggcugaaaaccgaagcccagaugagcauucagcucaucaacaaggcugugaaugcccugauuaacgaucaacuuaucaugaagaaucaucugcgcgacauuaugggcaucccuuauugcaacuacucuaaauauugguaccucaaucacacagucaccgggaagacaucccugcccagauguuggcuggugagcaacggaucuuaccucaaugaaacccacuucagcgacgauaucgagcagcaggcugacaacaugauuacggagcugcuucaaaaagaauauauggaucggcagggcaagacaccucuggggcucguggaccuguuugucuucuccaccucuuuuuaccugaucagcauuuuccuucaccucaucaaaauuccgacccaucgccacaucacaggaaagcccugcccuaaaccccauagacugaaucacaugggcauuuguuccugcggccuguauaagcacccugggguucccgugaaguggaaacggugaggacuaguuauaagacugacuagcccgaugggccucccaacgggcccuccuccccuccuugcaccgagauuaaucaaaggcucuuuucagagccaccaaaaaaaaaaaaaaaaaaaaaaaaaaaaaaaaaaaaaaaaaaaaaaaaaaaaaaaaaaaaaaaaaaaaaaaaaaaaaaaaaaaaaaaaaaaaaaaaaaaaa

SEQ ID NO: 15089 - RNA, 1686 nt, Artificial Sequence
  mRNA product Design i-3 (hSL-A100) comprising derived and/or modified sequence from LASV(ISTH2010-NIG-2012;Clade II)__AIT17482__GPC (opt5)
aggagaaagcuuaccaugggccagaucauuaccuucuuucaagaggugccccacgucaucgaagagguuaugaacauugugcugaucgcccucagccugcuugcuauucugaaggggaucuacaauguggccacaugcggacucuucggccuggucuccuuucuucugcucugugggagaucuugcagcacgaccuauaaaggaguguacgaacugcagacacuggagcucgacauggcgucccugaacaugaccaugccucuuucuuguacaaagaauaacagccaucacuauaucaugguuggcaaugaaaccgggcuggagcucacacugaccaacacguccauuaucaaucauaaauucugcaaccuuucugaugcucacaagaaaaaucuguacgaccaugcccucaugagcauuaucuccaccuuucaccugagcauuccgaacuucaaucaguaugaggccaugucuugugauuuuaacggaggcaagaucuccgugcaguacaaucugagccacgcuuaugccgucgacgcugccaaccauugcggcacaauugcgaauggggugcuccaaaccuucaugcggauggccuggggaggcucuuacaucgcucuggauuccgggaagggaagcugggacuguaucaugacaucuuaccaguaucuuauuauccagaacauuaccugggaagaucacugccaguuuucccgccccagcccuaucggcuaccuggggcuccugucccaaagaacgcgggacauuuauaucucucgcagacuucugggaacauucaccuggacacucagcgauuccgagggcaacgaaacccccggcggguacugucugacccgguggaugcugaucgaggccgagcucaaaugcuuuggaaauacagcuguugccaaguguaacgaaaaacaugacgaggaguucugcgauaugcugcgccuuuuugacuucaauaagcaggcgauuagacggcugaaaacggaagcccagaugagcauccagcucauuaacaaggcugugaaugcccugaucaacgaucaacuuauuaugaagaaucaucugcgcgacaucaugggcaucccuuauugcaacuacucuaaauauugguaccucaaucacaccgucacagggaagaccucccugcccagauguuggcuggugagcaacggaucuuaccucaaugaaacacacuucagcgacgauauugagcagcaggcugacaacaugaucaccgagcugcuucaaaaagaauauauugaucggcagggcaagacgccucuggggcucguggaccuguuugucuucuccacaucuuuuuaccugaucagcauuuuccuucaccucguuaaaaucccgacccaucgccacguggugggaaagcccugcccuaaaccccauagacugaaucacaugggcauuuguuccugcggccuguauaagcacccugggguccccgugaaguggaaacggugaggacuaguuauaagacugacuagcccgaugggccucccaacgggcccuccuccccuccuugcaccgagauuaaucaaaggcucuuuucagagccaccaaaaaaaaaaaaaaaaaaaaaaaaaaaaaaaaaaaaaaaaaaaaaaaaaaaaaaaaaaaaaaaaaaaaaaaaaaaaaaaaaaaaaaaaaaaaaaaaaaaaa

SEQ ID NO: 15090 - RNA, 1686 nt, Artificial Sequence
  mRNA product Design i-3 (hSL-A100) comprising derived and/or modified sequence from LASV(Lassa virus/H.sapiens-wt/NGA/2015/ISTH_0543;Clade II)__AVO03639__GPC (opt5)
aggagaaagcuuaccaugggccagaucauuaccuucuuucaagaggugccccacgucaucgaagagguuaugaacauugugcugaucgcccucagccugcuugcuauucugaaggggaucuacaauguggccacaugcggacucuucggccuggucuccuuucuucugcucugugggagaucuugcagcacgaccuauaaaggaguguacgaacugcagacacuggagcucgacauggcgaaccugaauaugaccaugccucuuuccuguacaaagaacaauucucaucacuauaucaugguuggcaacgaaaccgggcuggagcucacacugaccaauacgagcauuaucaaccauaaauucugcaaucuuuccgaugcucacaagaaaaaccuguacgaccaugcccucaugucuauuaucagcaccuuucaccuguccauuccgaauuucaaccaguaugaggccaugagcugugauuuuaauggaggcaagaucucugugcaguacaaccugucccacacauaugcugucgacgccgcuaaucauugcggcaccauugccaacggggugcuccaaacauucaugcggauggcguggggaggcagcuacaucgcccuggauucugggaagggauccugggacuguaucaugaccagcuaccaguaucuuguuauucagaacacgacaugggaagaucacugccaguuuucucgccccuccccuaucggcuaccuggggcuccugagccaaagaacccgggacauuuauaucucccgcagacuucugggaacauucaccuggacccucucugauagcgagggcaaugaaacacccggcggguacugucugacgcgguggaugcugauugaggcugagcucaaaugcuuuggaaacaccgccguggcuaaguguaaugaaaaacaugacgaggaguucugcgauaugcugcgccuuuuugacuucaacaagcaggccaucagacggcugaaaacagaagcgcagauguccauccagcucauuaauaaggccgucaacgcucugaucaaugaucaacuuauuaugaagaaccaucugcgcgacaucaugggcauuccuuauugcaauuacagcaaauauugguaccucaaccacaccgugacagggaagaccucucugcccagauguuggcugguguccaauggaagcuaccucaacgaaacgcacuucucugacgauaucgagcagcaggccgacaauaugaucacagagcugcuucaaaaagaauauauugaucggcagggcaagaccccucuggggcucgucgaccuguuuguuuucagcaccuccuuuuaccugaucucuauuuuccuucaccucgugaaaaucccgacacaucgccacauuaccggaaagcccugcccuaaaccccauagacugaaccacaugggcaucuguagcugcggccuguauaagcacccuggggugcccgucaaguggaaacggugaggacuaguuauaagacugacuagcccgaugggccucccaacgggcccuccuccccuccuugcaccgagauuaaucaaaggcucuuuucagagccaccaaaaaaaaaaaaaaaaaaaaaaaaaaaaaaaaaaaaaaaaaaaaaaaaaaaaaaaaaaaaaaaaaaaaaaaaaaaaaaaaaaaaaaaaaaaaaaaaaaaaa

SEQ ID NO: 15091 - RNA, 1686 nt, Artificial Sequence
  mRNA product Design i-3 (hSL-A100) comprising derived and/or modified sequence from LASV(Lassa virus/H.sapiens-wt/NGA/2016/ISTH_0009;Clade II)__AVO03571__GPC (opt5)
aggagaaagcuuaccaugggccagaucauuaccuucuuucaagaggugccccacgucaucgaagagguuaugaacauugugcugaucgcccucagccugcuugcuauucugaaggggaucuacaauguggccacaugcggacuccugggccuugucuccuuccugcuccugugugggagaucuugcagcacgaccuauaaaggaguguacgaacugcagacacucgagcuggacauggcgucccuuaacaugaccaugccucugucuuguacaaagaauaacagccaucacuauaucaugguuggcaaugaaaccgggcucgagcugacacuuaccaacacguccauuaucaaucauaaauuuugcaaccugucugaugcucacaagaaaaaucucuacgaccaugcccugaugagcauuaucuccaccuuccaccugagcauuccgaacuuuaaucaguaugaggccaugucuugugauuucaacggaggccggaucuccgugcaguacaaucucagccacucuuaugcugucgacgccgcuaaccauugcggcacaauugccaauggggugcugcaaaccuuuaugcgcauggcguggggaggcuccuacaucgcccuugauagcgggaagggaucuugggacuguaucaugacauccuaccaguaucugauuauccagaacaccacgugggaagaucacugccaguucagcagacccuccccuauuggcuaccucgggcugcuuucucaacggacacgcgacaucuauauuagcagacggcugcucggaaccuuuacauggacccuguccgauagcgagggcaacgaaacccccggcggguacugucugacacgcuggaugcucaucgaggcugagcugaagugcuucggaaauacggccguugcuaaauguaacgaaaagcaugacgaggaauuuugcgauaugcuuagacuguucgacuuuaauaaacaggccauccggcgccucaagaccgaggcgcagaugucuauucagcugaucaacaaagccgugaaugcucuuauuaacgaucaacugaucaugaagaaucaccucagagacauuaugggcaucccuuauugcaacuacuccaaguauugguaccugaaucacacagucaccgggaaaacaagccugccccgguguuggcucgugucuaacggaagcuaccugaaugaaacccauuucuccgacgauaucgagcagcaggccgacaacaugauuacggagcuucugcaaaaggaauauaucgaucgccagggcaaaacaccucucgggcugguggaccuguucgucuuuucuaccagcuucuaccuuauuuccaucuuucuccaccugguuaagauuccgacccauagacacaucacaggaaaacccugcccuaagccccaucggcugaaucacaugggcauuuguagcugcggccucuauaaccacccuggggugcccgugaaauggaagcgcugaggacuaguuauaagacugacuagcccgaugggccucccaacgggcccuccuccccuccuugcaccgagauuaaucaaaggcucuuuucagagccaccaaaaaaaaaaaaaaaaaaaaaaaaaaaaaaaaaaaaaaaaaaaaaaaaaaaaaaaaaaaaaaaaaaaaaaaaaaaaaaaaaaaaaaaaaaaaaaaaaaaaa

SEQ ID NO: 15092 - RNA, 1686 nt, Artificial Sequence
  mRNA product Design i-3 (hSL-A100) comprising derived and/or modified sequence from LASV(Lassa virus/H.sapiens-wt/NGA/2016/ISTH_0017;Clade II)__AVO03567__GPC (opt5)
aggagaaagcuuaccaugggccagaucauuaccuucuuucaagaggugccccacgucaucgaagagguuaugaacauugugcugaucgcccucagccugcuugcuauucugaaggggaucuacaauguggccacaugcggacucuucggccuggucuccuuucuucugcucugugggagaucuugcagcacgaccuauaaaggaguguacgaacugcagacacuggagcucgacauggcgucccugaacaugaccaugccucuuucuuguacaaagaauaacagccaucacuauaucaugguuggcaaugaaaccgggcuggagcucacacugaccaacacguccauuaucaaucauaaauucugcaaccuuucugaugcucacaagaaaaaucuguacgaccaugcccucaugagcauuaucuccaccuuucaccugagcauuccgaacuucaaucaguaugaggccaugucuugugauuuuaacggaggcaagaucuccgugcaguacaaucugagccacacauaugcuauugacgccgcuaaccauugcggcaccaucgccaaugggguccuccaaacauucaugcggauggcguggggaggcucuuacaucgcccuggauuccgggaagggaagcugggacuguauuaugaccucuuaccaguaucuuaucauucagaacacgacaugggaagaucacugccaguuuucccgccccagcccuaucggcuaccuggggcuccugucccaaagaacccgggacauuuauaucucucgcagacuucugggaacauucaccuggacccucagcgauuccgagggcaacgaaacacccggcggguacugucugacgcgguggaugcugaucgaggcugagcucaaaugcuuuggaaauaccgccguggcuaaguguaacgaaaaacaugacgaggaguucugcgauaugcugcgccuuuuugacuucaauaagcaggccauuagacggcugaaaacagaagcgcagaugagcauccagcucauuaacaaggccguuaaugcucugaucaacgaucaacuuauuaugaagaaucaucugcgcgacaucaugggcaucccuuauugcaacuacucuaaauauugguaccucaaucacaccgugacagggaagaccucccugcccagauguuggcuggucagcaacggaucuuaccucaaugaaacgcacuucagcgacgauauugagcagcaggccgacaacaugaucacagagcugcuucaaaaagaauauauggaucggcagggcaagaccccucuggggcucguggaccuguuuguguucuccaccucuuuuuaccugauuagcaucuuccuucaccucguccgcauuccgacacauagacacguuaucggaaaacccugcccuaagccccaucggcugaaucacaugggcauuuguuccugcggccuguauaaacacccuggggugcccgugaaguggaagcgcugaggacuaguuauaagacugacuagcccgaugggccucccaacgggcccuccuccccuccuugcaccgagauuaaucaaaggcucuuuucagagccaccaaaaaaaaaaaaaaaaaaaaaaaaaaaaaaaaaaaaaaaaaaaaaaaaaaaaaaaaaaaaaaaaaaaaaaaaaaaaaaaaaaaaaaaaaaaaaaaaaaaaa

SEQ ID NO: 15093 - RNA, 1686 nt, Artificial Sequence
  mRNA product Design i-3 (hSL-A100) comprising derived and/or modified sequence from LASV(Lassa virus/H.sapiens-wt/NGA/2018/ISTH_0959;Clade II)__AVV65099__GPC (opt5)
aggagaaagcuuaccaugggccagaucauuaccuucuuucaagaggugccccacgucaucgaagagguuaugaacauugugcugaucgcccucagccugcuugcuauucugaaggggaucuacaauguggucacaugcggacucuucggccugguguccuuucuucugcucugugggagaucuugcagcacgaccuauaaaggaguuuacgaacugcagacacuggagcucgacauggccucccugaacaugaccaugccucuuucuuguacaaagaauaacagccaucacuauaucauggugggcaaugaaaccgggcuggagcucacacugaccaacacguccauuaucaaucauaaauucugcaaccuuucugaugcgcacaagaaaaaucuguacgaccaugcucucaugagcauuaucuccaccuuucaccugagcauuccgaacuucaaucaguaugaggccaugucuugugauuuuaacggaggcaagaucuccguccaguacaaucugagccacgccuaugcuauugacgccgcuaaccauugcggcacaaucgccaauggggugcuccaaaccuucaugcggauggcguggggaggcucuuacaucgcccuggauuccgggaagggaagcugggacuguauuaugacaucuuaccaguaucuuaucauucagaacaccacgugggaagaucacugccaguuuucccgccccagcccuaucggcuaccuggggcuccugucccaaagaacacgggacauuuauaucucucgcagacuucugggaaccuucacauggacccucagcgauuccgagggcaacgaaacccccggcggguacugucugacacgguggaugcugaucgaggcugagcucaaaugcuuuggaaauacggccguugcuaaguguaacgaaaaacaugacgaggaguucugcgauaugcugcgccuuuuugacuucaauaagcaggccauuagacggcugaaaaccgaagcgcagaugagcauccagcucauuaacaaggccgugaaugcucugaucaacgaucaacuuauuaugaagaaucaucugcgcgacaucaugggcaucccuuauugcaacuacucuaaauauugguaccucaaucacacagucaccgggaagacaucccugcccagauguuggcuggugagcaacggaucuuaccucaaugaaacccacuucagcgacgauauugagcagcaggccgacaacaugaucacggagcugcuucaaaaagaauauauugaucggcagggcaagacaccucuggggcucguggaccuguuugucuucuccaccucuuuuuaccugaucagcauuuuccuucaccucguuaaaaucccgacccaucgccacgugauuggaaagcccugcccuaaaccccauagacugaaucacaugggcaucuguuccugcggccuguauaagcacccuggggugcccgucaaguggaaacggugaggacuaguuauaagacugacuagcccgaugggccucccaacgggcccuccuccccuccuugcaccgagauuaaucaaaggcucuuuucagagccaccaaaaaaaaaaaaaaaaaaaaaaaaaaaaaaaaaaaaaaaaaaaaaaaaaaaaaaaaaaaaaaaaaaaaaaaaaaaaaaaaaaaaaaaaaaaaaaaaaaaaa

SEQ ID NO: 15094 - RNA, 1686 nt, Artificial Sequence
  mRNA product Design i-3 (hSL-A100) comprising derived and/or modified sequence from LASV(LASV003-NIG-2008;Clade II)__AIT17580__GPC (opt5)
aggagaaagcuuaccaugggccagaucauuaccuucuuucaagaggugccccacgucaucgaagagguuaugaacauugugcugaucgcccucagccugcuugcuauucugaaggggaucuacaauguggccacaugcggacucuucggccuggucuccuuucuucugcucugugggagaucuugcagcacgaccuauaaaggaguguacgaacugcagacacuggagcucgacauggcgucccugaacaugaccaugccucuuucuuguacaaagaauaacagccaucacuauaucaugguuggcaaugaaaccgggcuggagcucacacugaccaacacguccauuaucaaucauaaauucugcaaccuuucugaugcucacaagaaaaaucuguacgaccaugcccucaugagcauuaucuccaccuuucaccugagcauuccgaacuucaaucaguaugaggccaugucuugugauuuuaacggaggcaagaucuccgugcaguacaaucugagccacacauaugcugucgacgccgcuaaccauugcggcaccauugccaauggggugcuccaaacauucaugcggauggcguggggaggcucuuacaucgcccuggauuccgggaagggaagcugggacuguaucaugaccucuuaccaguaucuuauuauccagaacacgacaugggaagaucacugccaguuuucccgccccagcccuauuggcuaccuggggcuccugucccaaagaacccgggacaucuauauuucucgcagacuucugggaacauucaccuggacccucagcgauuccgagagcaacgaaacacccggcggcuacugucugacgcgguggaugcugaucgaggcugagcucaaaugcuuugggaauaccgccguugcuaaguguaacgaaaaacaugacgaggaguucugcgauaugcugcgccuuuuugacuucaauaagcaggccaucagacggcugaaagcggaagcccagaugucuauucagcucaucaacaaggcugugaaugcccugauuaacgaucaacuuaucaugaagaaucaucugcgcgacauuaugggaaucccuuauugcaacuacuccaaauauugguaccucaaucacacagucaccggcagaacaagccugccccgguguuggcuggugucuaacgggagcuaccucaaugaaacccacuucuccgacgauaucgagcagcaggcugacaacaugauuacggagcugcuucaaaaggaauauauggaucgccagggaaaaacaccucugggccucguggaccuguuugucuucucuaccagcuuuuaccugaucuccauuuuccuucaccucguuaagaucccgacccauagacacgugauugggaaacccugcccuaagccccaucggcugaaucacaugggaaucuguagcugcggccuguauaaacacccuggcgugcccgucaaguggaagcgcugaggacuaguuauaagacugacuagcccgaugggccucccaacgggcccuccuccccuccuugcaccgagauuaaucaaaggcucuuuucagagccaccaaaaaaaaaaaaaaaaaaaaaaaaaaaaaaaaaaaaaaaaaaaaaaaaaaaaaaaaaaaaaaaaaaaaaaaaaaaaaaaaaaaaaaaaaaaaaaaaaaaaa

SEQ ID NO: 15095 - RNA, 1686 nt, Artificial Sequence
  mRNA product Design i-3 (hSL-A100) comprising derived and/or modified sequence from LASV(LASV035-NIG-2009;Clade II)__AIT17588__GPC (opt5)
aggagaaagcuuaccaugggccagaucauuaccuucuuucaagaggugccccacgucaucgaagagguuaugaacauugugcugaucgcccucagccugcuugcuauucugaaggggaucuacaauguggccacaugcggacucuucggccuggucuccuuucuucugcucugugggagaucuugcagcacgaccuauaaaggaguguacgaacugcagacacuggagcucgacauggcgucccugaacaugaccaugccucuuucuuguacaaagaauaacagccaucacuauaucaugguuggcaaugaaaccgggcuggagcucacacugaccaacacguccauuaucaaucauaaauucugcaaccuuucugaugcucacaagaaaaaucuguacgaccaugcccucaugagcauuaucuccaccuuucaccugagcauuccgaacuucaaucaguaugaggccaugucuugugauuuuaacggaggcaagaucuccgugcaguacaaucugagccacgcuuaugccgucgacgcugccaaccauugcggcacaauugcgaauggggugcuccaaaccuucaugcggauggccuggggaggcucuuacaucgcucuggauuccgggaagggaagcugggacuguaucaugacaucuuaccaguaucuuauuauccagaacaccacgugggaagaucacugccaguuuucccgccccagcccuauuggcuaccuggggcuccugucccaaagaacacgggacaucuauauuucucgcagacuucugggaaccuucacauggacccucagcgauuccgagggcaacgaaacccccggcggguacugucugacacgguggaugcugaucgaggccgagcucaaaugcuuuggaaauacggcuguugccaaguguaacgaaaaacaugacgaggaguucugcgauaugcugcgccuuuuugacuucaauaagcaggcgaucagacggcugaaagccgaagcucagaugagcauucagcucaucaacaaggccgugaaugcucugauuaacgaucaacuuaucaugaagaaucaucugcgcgacauuaugggcaucccuuauugcaacuacucuaaauauugguaccucaaucacaccgucacagggaagaccucccugcccagauguuggcuggugagcaacggaucuuaccucaaugaaacacacuucagcgacgauaucgagcagcaggccgacaacaugauuaccgagcugcuucaaaaagaauauaucgaucggcagggcaagacgccucuggggcucguggaccuguuugucuucuccacaucuuuuuaccugauuagcaucuuccuucaccucguuaaaauuccgacccaucgccacgugaucggaaagcccugcccuaaaccccauagacugaaucacaugggcauuuguuccugcggccuguauaagcacccuggggugcccgucaaguggaaacggugaggacuaguuauaagacugacuagcccgaugggccucccaacgggcccuccuccccuccuugcaccgagauuaaucaaaggcucuuuucagagccaccaaaaaaaaaaaaaaaaaaaaaaaaaaaaaaaaaaaaaaaaaaaaaaaaaaaaaaaaaaaaaaaaaaaaaaaaaaaaaaaaaaaaaaaaaaaaaaaaaaaaa

SEQ ID NO: 15096 - RNA, 1686 nt, Artificial Sequence
  mRNA product Design i-3 (hSL-A100) comprising derived and/or modified sequence from LASV(LASV1000-NIG-2009;Clade II)__AIT17782__GPC (opt5)
aggagaaagcuuaccaugggccagaucauuaccuucuuucaagaggugccccacgucaucgaagagguuaugaacauugugcugaucgcccucagccugcuugcuauucugaaggggaucuacaauguggccacaugcggacucuucggccuggucuccuuucuucugcucugugggagaucuugcagcacgaccuauaaaggaguguacgaacugcagacacuggagcucgacauggcgucccugaacaugaccaugccucuuucuuguacaaagaauaacagccaucacuauaucaugguuggcaaugaaaccgggcuggagcucacacugaccaacacguccauuaucaaucauaaauucugcaaccuuucugaugcucacaagaaaaaucuguacgaccaugcccucaugagcauuaucuccaccuuucaccugagcauuccgaacuucaaucaguaugaggccaugucuugugauuuuaacggaggcaagaucuccgugcaguacaaucugagccacacauaugcugucgacgccgcuaaccauugcggcaccauugccaauggggugcuccaaacauucaugcggauggcguggggaggcucuuacaucgcccuggauuccgggaagggaagcugggacuguaucaugaccucuuaccaguaucuuauuauccagaacacgacaugggaagaucacugccaguuuucccgccccagcccuauuggcuaccuggggcuccugucccaaagaacccgggacaucuauauuucucgcagacuucugggaacauucaccuggacccucagcgauuccgagggcaacgaaacacccggcggguacugucugacgcgguggaugcugaucgaggcugagcucaaaugcuuuggaaauaccgccguugcuaaguguaacgaaaaacaugacgaggaguucugcgauaugcugcgccuuuuugacuucaauaagcaggccaucaaaagacugaagacagaagcgcagaugagcauucagcucaucaacaaggccgugaaugcucugauuaacgaucaacuuaucaugaaaaaucaucugcgggacauuaugggcaucccuuauugcaacuacucuaaguauugguaccucaaucacaccgucacagggaaaaccucccugccccgcuguuggcuggugagcaacggaucuuaccucaaugaaacgcacuucagcgacgauaucgagcagcaggccgacaacaugauuacagagcugcuucaaaaggaauauaucgauagacagggcaaaaccccucuggggcucguggaccuguuugucuucuccaccucuuuuuaccugauuagcaucuuccuucaccucguuaagauuccgacacaucggcacguggugggaaaacccugcccuaagccccaucgccugaaucacaugggcaucuguuccugcggccuguauaagcacccugggguccccgugaaauggaagagaugaggacuaguuauaagacugacuagcccgaugggccucccaacgggcccuccuccccuccuugcaccgagauuaaucaaaggcucuuuucagagccaccaaaaaaaaaaaaaaaaaaaaaaaaaaaaaaaaaaaaaaaaaaaaaaaaaaaaaaaaaaaaaaaaaaaaaaaaaaaaaaaaaaaaaaaaaaaaaaaaaaaaa

SEQ ID NO: 15097 - RNA, 1686 nt, Artificial Sequence
  mRNA product Design i-3 (hSL-A100) comprising derived and/or modified sequence from LASV(LASV221-NIG-2010;Clade II)__AIT17624__GPC (opt5)
aggagaaagcuuaccaugggccagaucauuaccuucuuucaagaggugccccacgucaucgaagagguuaugaacauugugcugaucgcccucagccugcuugcuauucugaaggggaucuacaauguggccacaugcggacucuucggccuggucuccuuucuucugcucugugggagaucuugcagcacgaccuauaaaggaguguacgaacugcagacacuggagcucgacauggcgucccugaacaugaccaugccucuuucuuguacaaagaauaacagccaucacuauaucaugguuggcaaugaaaccgggcuggagcucacacugaccaacacguccauuaucaaucauaaauucugcaaccuuucugaugcucacaagaaaaaucuguacgaccaugcccucaugagcauuaucuccaccuuucaccugagcauuccgaacuucaaucaguaugaggccaugucuugugauuuuaacggaggcaagaucuccgugcaguacaaucugagccacacauaugcuauugacgccgcuaaccauugcggcaccaucgccaaugggguccuccaaacauucaugcggauggcguggggaggcucuuacaucgcccuggauuccgggaagggaagcugggacuguauuaugaccucuuaccaguaucuuaucauucagaacacgacaugggaagaucacugccaguuuucccgccccagcccuaucggcuaccuggggcuccugucccaaagaacccgggacauuuauaucucucgcagacuucugggaacauucaccuggacccucagcgauuccgagggcaacgaaacacccggcggguacugucugacgcgguggaugcugaucgaggcugagcucaaaugcuuuggaaauaccgccguggcuaaguguaacgaaaaacaugacgaggaguucugcgauaugcugcgccuuuuugacuucaauaagcaggccauuagacggcugaaaacagaagcgcagaugagcauccagcucauuaacaaggccguuaaugcucugaucaacgaucaacuuauuaugaagaaucaucugcgcgacaucaugggcaucccuuauugcaacuacucuaaauauugguaccucaaucacaccgugacagggaagaccucccugcccagauguuggcuggucagcaacggaucuuaccucaaugaaacgcacuucagcgacgauauugagcagcaggccgacaacaugaucacagagaugcugcaaaaagaauauauggaucggcagggcaagaccccucuugggcugguggaccucuuuguguucuccaccucuuuuuaccugauuagcaucuuccugcaccuugucaaaauuccgacacaucgccacguuaucggaaagcccugcccuaaaccccauagacucaaucacaugggcauuuguuccugcggccuguauaagcacccuggggugcccgugaaguggaaacggugaggacuaguuauaagacugacuagcccgaugggccucccaacgggcccuccuccccuccuugcaccgagauuaaucaaaggcucuuuucagagccaccaaaaaaaaaaaaaaaaaaaaaaaaaaaaaaaaaaaaaaaaaaaaaaaaaaaaaaaaaaaaaaaaaaaaaaaaaaaaaaaaaaaaaaaaaaaaaaaaaaaaa

SEQ ID NO: 15098 - RNA, 1686 nt, Artificial Sequence
  mRNA product Design i-3 (hSL-A100) comprising derived and/or modified sequence from LASV(LASV237-NIG-2010;Clade II)__AIT17638__GPC (opt5)
aggagaaagcuuaccaugggccagaucauuaccuucuuucaagaggugccccacgucaucgaagagguuaugaacauugugcugaucgcccucagccugcuugcuauucugaaggggaucuacaauguggccacaugcggacucuucggccuggucuccuuucuucugcucugugggagaucuugcagcacgaccuauaaaggaguguacgaacugcagacacuggagcucgacauggcgucccugaacaugaccaugccucuuucuuguacaaagaauaacagccaucacuauaucaugguuggcaaugaaaccgggcuggagcucacacugaccaacacguccauuaucaaucauaaauucugcaaccuuucugaugcucacaagaaagaccuguacgaucaugcccucaugagcauuaucuccaccuuucaccugagcauuccgaauuucaaccaguaugaggccaugucuugugacuuuaauggaggcaagaucuccgugcaguacaaccugagccacacauaugcugucgaugccgcuaaucauugcggcaccauugccaacggggugcuccaaacauucaugcggauggcguggggaggcucuuacaucgcccuggacuccgggaagggaagcugggauuguaucaugaccucuuaccaguaucuuauuauccagaauacgacaugggaagaccacugccaguuuucccgccccagcccuauuggcuaccuggggcuccugucccaaagaacccgggauaucuauauuucucgcagacuucugggaacauucaccuggacccucagcgacuccgagggcaacgaaacacccggcggguacugucugacgcgguggaugcugaucgaggcugagcucaaaugcuuuggaaacaccgccguugcuaaguguaaugaaaaacaugaugaggaguucugcgacaugcugcgccuuuuugauuucaacaagcaggccaucagacggcugaaaacagaagcgcagaugagcauucagcucaucaauaaggccgugaacgcucugauuaaugaccaacuuaucaugaagaaccaucugcgcgacauuaugggcaucccuuauugcaauuacucuaaauauugguaccucaaccacaccgucacagggaagaccucccugcccagauguuggcuggugagcaauggaucuuaccucaacgaaacgcacuucagcgaugacaucgagcagcaggccgauaauaugauuacagagcugcuucaaaaagaauauauggaccggcagggcaagaccccucuggggcucguggaucuguuugucuucuccaccucuuuuuaccugaucagcauuuuccuucaccucaucaaaauuccgacacaucgccacaucaccggaaagcccugcccuaaaccccauagacugaaccacaugggcauuuguuccugcggccuguauaagcacccugggguucccgugaaguggaaacggugaggacuaguuauaagacugacuagcccgaugggccucccaacgggcccuccuccccuccuugcaccgagauuaaucaaaggcucuuuucagagccaccaaaaaaaaaaaaaaaaaaaaaaaaaaaaaaaaaaaaaaaaaaaaaaaaaaaaaaaaaaaaaaaaaaaaaaaaaaaaaaaaaaaaaaaaaaaaaaaaaaaaa

SEQ ID NO: 15099 - RNA, 1686 nt, Artificial Sequence
  mRNA product Design i-3 (hSL-A100) comprising derived and/or modified sequence from LASV(LASV253-NIG-2011;Clade II)__AIT17670__GPC (opt5)
aggagaaagcuuaccaugggccagaucauuaccuucuuucaagaggugccccacgucaucgaagagguuaugaacauugugcugaucgcccucagccugcuugcuauucugaaggggaucuacaauguggccacaugcggacucuucggccuggucuccuuucuucugcucugugggagaucuugcagcacgaccuauaaaggaguguacgaacugcagacacuggagcucgacauggcgucccugaacaugaccaugccucuuucuuguacaaagaauaacagccaucacuauaucaugguuggcaaugaaaccgggcuggagcucacacugaccaacacguccauuaucaaucauaaauucugcaaccuuucugaugcucacaagaaaaaucuguacgaccaugcccucaugagcauuaucuccaccuuucaccugagcauuccgaacuucaaucaguaugaggccaugucuugugauuuuaacggaggcaagaucuccgugcaguacaaucugagccacacauaugcugucgacgccgcuaaccauugcggcaccauugccaauggggugcuccaaacauucaugcggauggcguggggaggcucuuacaucgcccuggauuccgggaagggaagcugggacuguaucaugaccucuuaccaguaucuuauuauccagaacacgacaugggaagaucacugccaguuuucccgccccagcccuauuggcuaccuggggcuccugucccaaagaacccgggacaucuauauuucucgcagacuucugggaacauucaccuggacccucagcgauuccgagggcaacgaaacacccggcggguacugucugacgcgguggaugcugaucgaggcugagcucaaaugcuuuggaaauaccgccguugcuaaguguaacgaaaaacaugacgaggaguucugcgauaugcugcgccuuuuugacuucaauaagcaggccaucagacggcugaaagcggaagcccagaugagcauucagcucaucaacaaggcugugaaugcccugauuaacgaucaacuuaucaugaagaaucaucugcgcgacauuaugggcaucccuuauugcaacuacucuaaauauugguaccucaaucacacagucaccgggagaacaucccugccccgguguuggcuggugagcaacggaucuuaccucaaugaaacccacuucagcgacgauaucgagcagcaggcugacaacaugauuacggagcugcuucaaaaggaauauaucgaucgccagggcaaaacaccucuggggcucguggaccuguuugucuucuccaccucuuuuuaccugauuagcaucuuccuucaccucguuaagauuccgacccauagacacaucauuggaaaacccugcccuaagccccaucggcugaaucacaugggcaucuguuccugcggccuguauaaacacccuggggugcccgugaaguggaagcgcugaggacuaguuauaagacugacuagcccgaugggccucccaacgggcccuccuccccuccuugcaccgagauuaaucaaaggcucuuuucagagccaccaaaaaaaaaaaaaaaaaaaaaaaaaaaaaaaaaaaaaaaaaaaaaaaaaaaaaaaaaaaaaaaaaaaaaaaaaaaaaaaaaaaaaaaaaaaaaaaaaaaaa

SEQ ID NO: 15100 - RNA, 1686 nt, Artificial Sequence
  mRNA product Design i-3 (hSL-A100) comprising derived and/or modified sequence from LASV(LASV254-NIG-2011;Clade II)__AIT17674__GPC (opt5)
aggagaaagcuuaccaugggccagaucauuaccuucuuucaagaggugccccacgucaucgaagagguuaugaacauugugcugaucgcccucagccugcuugcuauucugaaggggaucuacaauguggccacaugcggacucuucggccuggucuccuuucuucugcucugugggagaucuugcagcacgaccuauaaaggaguguacgaacugcagacacuggagcucgacaugaccaaccugaauaugacaaugccucuuuccuguaccaagaacaauucucaucacuauaucaugguuggcaacgaaacagggcuggagcucacccugacgaauaccagcauuaucaaccauaaauucugcaaucuuuccgaugcgcacaagaaaaaccuguacaaucaugcucucaugucuauuaucagcacauuucaccuguccauuccgaacuucaaucaguaugaggccaugagcugugacuuuaacggaggcaagaucucugugcaguacaaucugucccacagcuaugccgucgaugcugccaaccauugcggcaccauugcuaacggggugcuccaaacauucaugcggauggccuggggaggcucuuacaucgcgcuggacuccgggaagggaaauugggauuguaucaugaccagcuaccaguaucuuauuauccagaacacgacaugggaagaccacugccaguuuucucgccccuccccuauuggcuaccuggggcuccugagccaaagaacccgggauaucuauauuucccgcagacuucugggaacauucaccuggacccucucugacagcgagggcaaugaaacacccggcggguacugucugacgcgguggaugcugaucgaggccgagcucaaaugcuuuggaaacaccgcuguugccaaguguaaugaaaaacaugaugaggaguucugcgacaugcugcgccuuuuugauuucaacaagcaggcuaucagacggcugaaaacagaagcccaggcgaauauucagcucaucaacaaggccgugaaugcucugauuaacgaccaacuuaucaugaagaaucaucugcgcgauauuaugggcaucccuuauugcaacuacuccaaauauugguaccucaaucacaccgucacagggaagaccagccugcccagauguuggcuggugucuaacggauccuaccucaaugaaacgcacuucagcgacgacaucgagcagcaggccgauaacaugauuacagagcugcuucaaaaagaauauauggaccggcagggcaagaccccucuggggcucguggaucuguuugucuucucuaccagcuuuuaccugaucuccauuuuccuucaccucguuaaaaucccgacacaucgccacgugauuggaaagcccugcccuaaaccccauagacugaaccacaugggcaucuguucuugcggccuguauaagcacccuggggugcccgucaaguggaaacggugaggacuaguuauaagacugacuagcccgaugggccucccaacgggcccuccuccccuccuugcaccgagauuaaucaaaggcucuuuucagagccaccaaaaaaaaaaaaaaaaaaaaaaaaaaaaaaaaaaaaaaaaaaaaaaaaaaaaaaaaaaaaaaaaaaaaaaaaaaaaaaaaaaaaaaaaaaaaaaaaaaaaa

SEQ ID NO: 15101 - RNA, 1686 nt, Artificial Sequence
  mRNA product Design i-3 (hSL-A100) comprising derived and/or modified sequence from LASV(Nig08-A19;Clade III)__ADU56618__GPC (opt5)
aggagaaagcuuaccaugggccagaucgugaccuucuuucaagaggucccccacguuauugaagaggugaugaacaucgugcugauugcccucagcauccuggcuauucuuaaggggcuguacaauaucgccacaugcggacucaucggccuggucacguuccuucugcucuccgggagaucuuguagcaugaccuauaaaggaguguacgaacugcagacacuggagcucaacaugaauacccugaacaugacaaugccucuuuccugcaccaagaauaacucucaucacuauauuaugguuggcaaugaaacagggcuggagcucacccugacgaacaccagccuucugcaucacaaauuuuguaaucucuccgacgcgcauaagaaaaaccuguacgaucacacacugaugucuaucauuagcaccuuccaccucuccaucccgaauuuuaaccaguaugaggcuaugagcugcgacuucaauggaggcaagauuacagugcaguacaaccugucucauuccuaugccaucgaugccgcuaaucacuguggcaccgucgccaacggggugcuucaaacguuuaugcggauggcuuggggaggcagcuacauugcccuggacucugggcgcggaaagugggauugcaucaugacauccuaccaguaucucaucauucagaacaccacaugggaagaccauugucaguucagcagacccucuccuaucggcuaccuggggcuucugucccaacggacccgcgauauuuauaucagcagacggcuccugggaaccuuuacauggacgcuguccgacucugagggcaaugaaacccccggcggguacugccucacacgcuggaugcugauugaggcggagcuuaaauguuucggaaacaccgccguugcuaagugcaaugaaaaacacgaugaggaauuuugugacaugcugagacucuucgauuuuaacaagcaggccauccggcgccugaaagcugaggcccagaugagcauccagcuuauuaauaaggcggugaacgcccugaucaaugaccaacucauuaugaagaaccaccugagagauaucaugggcauuccuuauugcaauuacuccaaauauugguaccugaaccauacaagcaccgggcggacgucucucccccgcugcuggcuggucuccaauggaagcuaccuuaacgaaacacacuucucugacgacaucgagcagcaggcugauaauaugaucaccgagaugcugcaaaaggaauaucucgacagacagggcaaaaccccucuggggcugguggaucuuuucguguuuagcacauccuucuaccucauuucuaucuuucugcaucuggucaagauuccgacccaccggcauaucguuggaaaacccuguccuaagccccaccgccucaaccacaugggcauuugcagcuguggccuguauaaacagccuggggugcccgugagauggaagcggugaggacuaguuauaagacugacuagcccgaugggccucccaacgggcccuccuccccuccuugcaccgagauuaaucaaaggcucuuuucagagccaccaaaaaaaaaaaaaaaaaaaaaaaaaaaaaaaaaaaaaaaaaaaaaaaaaaaaaaaaaaaaaaaaaaaaaaaaaaaaaaaaaaaaaaaaaaaaaaaaaaaaa

SEQ ID NO: 15102 - RNA, 1689 nt, Artificial Sequence
  mRNA product Design i-3 (hSL-A100) comprising derived and/or modified sequence from LASV(G1180-SLE-2010;Clade IV)__AIT17168__GPC (opt5)
aggagaaagcuuaccaugggccagaucgugaccuucuuucaagaggucccccacguuauugaagaggugaugaacaucgugcugauugcccucagcauccuggcuguccuuaaggggcuguacaauuucgccacaugcggacucgugggccugcuuacguuucugcuccugugugggagauccugcaccgcgucucgguauaaaggaguuuacgaacugcagacacucgagcugaacauggaaacccuuaauaugacaaugccucugagcuguaccaagaacaauucccaucacuauauuauggugggcaacgagacagggcucgagcugacccuuacgaauaccucuaucaucaaccauaaauucugcaaucugagcgacgcucacaagaaaaaccucuacgaucaugcccugauguccauuaucucuacauuucaccugagcauuccgaauuucaaccaguaugaagccauguccugugacuuuaauggaggcaagaucagcguccaguacaaccucucucacuccuaugcuggcgaugccgcuaaucauugcgggaccguggccaacggaguucugcaaacauucaugcgcauggcguggggcgggagcuacauugcccuugacucuggacacggcuccugggauuguaucaugaccagcuaccaguaucugauuauccagaacacgacaugggaggaccauugccaguuuucuagacccuccccuaucggguaccucggacugcuuagccaacggacccgcgauauuuauaucuccagacggcugcucggcacauucaccuggacccugucugacagcgaaggcaaggauacacccgggggauacugucugacgcgcuggaugcucauugaggcugagcugaaaugcuuuggcaauaccgccguggcuaaguguaacgaaaaacacgacgaggaguucugcgauaugcuuagacuguuugacuucaauaagcaggccauccagcggcucaaagcggaagcccagauguccauucaacugaucaacaaggcugucaaugcccuuaucaacgaucagcugauuaugaagaaucaccuccgcgacaucauggggauuccuuauugcaacuacagcaaauauugguaccugaaucauacaaccacaggaaagaccucucugcccaaauguuggcucguguccaacggcagcuaccugaaugaaacgcacuucucugacgauaucgagcagcaagcugacaacaugauuacagagaugcuucagaaggaauauauggagagacaggggaaaaccccucugggacucguggaucuguuugucuucagcaccuccuuuuaccugaucucuaucuuccuucaucucguuaagauuccgacacaccggcauaucgugggcaaaagcugccccaagccucaccgccugaaucacaugggcauuuguuccugcgggcuguauaagcagcccggagugccugucaaauggaagagaugaggacuaguuauaagacugacuagcccgaugggccucccaacgggcccuccuccccuccuugcaccgagauuaaucaaaggcucuuuucagagccaccaaaaaaaaaaaaaaaaaaaaaaaaaaaaaaaaaaaaaaaaaaaaaaaaaaaaaaaaaaaaaaaaaaaaaaaaaaaaaaaaaaaaaaaaaaaaaaaaaaaaa

SEQ ID NO: 15103 - RNA, 1689 nt, Artificial Sequence
  mRNA product Design i-3 (hSL-A100) comprising derived and/or modified sequence from LASV(G1442-SLE-2011;Clade IV)__AIT17180__GPC (opt5)
aggagaaagcuuaccaugggccagaucgugaccuucuuucaagaggucccccacguuauugaagaggugaugaacaucgugcugauugcccucagcauccuggcuguccuuaaggggcuguacaauguggccacaugcggacucauuggccugguuacguuccuucugcucugugggagauccugcaccacaacccuguauaaaggaguguacgaacugcagacacucgagcugaacauggaaacccuuaauaugacaaugccucugucuuguaccaagaacaauagccaucacuauauccgggucggcaacgagacggggcucgagcugacccuuacaaauaccuccaucauuaaccauaaauuuugcaaucugucugacgcgcacaagaaaaaccucuacgaucaugcucugaugagcaucauuuccacauuccaccugucuaucccgaauuuuaaccaguaugaagccaugagcugugacuucaauggaggcaagauuuccgugcaguacaaccucagccacucuuaugccggcgaugcugccaaucauugcgggaccguugcuaacggagugcugcaaacguuuaugcgcauggccuggggcggguccuacaucgcgcuugacagcggaagaggcaacugggauuguauuaugacaucuuaccaguaucugaucauccagaauaccacaugggacgaucacugccaguucucccggcccagcccuauuggguaccucggacugcuuucucaacgcaccagagacgucuauaucucccggcgccugcucggcaccuuuacauggacgcugagcgauuccgagggcaaggacacccccgggggauacugucugacaagauggaugcucauugaagccgagcugaaaugcuucggcaacaccgcuguggccaaguguaaugagaaacaugaugaagaguuuugcgacaugcuucggcuguucgauuuuaacaagcaggcuauccagcgccucaaagccgaagcgcagaugucuauucaacugaucaauaaggccgugaacgcucuuaucaaugaccagcugauuaugaagaaccaccucagagacaucauggggauuccuuauugcaauuacagcaaauauugguaccugaacaauacagccaccggaaagacgucccugcccaaauguuggcucaucagcaacggcucuuaccugaaugagacacacuucuccgaugacauugaacaggaggcugauaacaugaucaccgagaugcuucaaaaggaauauauggagcggcaggggaaaaccccucugggacucgucgaccuguucguuuuuagcacaucuuucuaccugaucagcauuuuucuucaucucgugaagaucccgacccaccgccauauugugggcaaauccugccccaagccucacagacugaaucauaugggcaucuguucuugcgggcuguauaagcagcccggagucccugugcgguggaaacgcugaggacuaguuauaagacugacuagcccgaugggccucccaacgggcccuccuccccuccuugcaccgagauuaaucaaaggcucuuuucagagccaccaaaaaaaaaaaaaaaaaaaaaaaaaaaaaaaaaaaaaaaaaaaaaaaaaaaaaaaaaaaaaaaaaaaaaaaaaaaaaaaaaaaaaaaaaaaaaaaaaaaaa

SEQ ID NO: 15104 - RNA, 1689 nt, Artificial Sequence
  mRNA product Design i-3 (hSL-A100) comprising derived and/or modified sequence from LASV(G3010-SLE-2013;Clade IV)__AIT17344__GPC (opt5)
aggagaaagcuuaccaugggccagaucgugaccuucuuucaagaggucccccacguuauugaagaggugaugaacaucgugcugauugcccucagcauccuggcuguccuuaaggggcuguacaauuucgccacaugcggacucgugggccugguuacguuucuucugcucugugggagauccugcaccacaucucuguauaaaggaguguacgaacugcagacccucgagcugaacauggaaacacuuaauaugaccaugccucugagcuguacaaagaacaauucccaucacuauauuauggucggcaacgagaccgggcucgagcugacgcuuaccaauacaucuaucaucaaccauaaauucugcaaucugagcgacgcgcacaagaaaaaccucuacaaucaugcucugauguccauuaucucuaccuuucaccugagcauuccgaacuucaaucaguaugaagccauguccugugauuuuaacggaggcaagaucagcgugcaguacaaucucucucacuccuaugccggcgacgcugccagccauugcgggacaguugcuaacggagugcugcaaaccuucaugcggauggccuggggcgggucuuacauugcgcuugauuccggauacggcaagugggacuguaucaugacgagcuaucaguaccugauuauccagaacacaaccugggaggaucacugccaguuuucucgccccuccccuaucggguaucucggacugcuuagccaaagaacacgggacauuuacaucucccgcagacugcucggcaccuucaccuggacacugucugauagcgaaggcaaagacacgcccgggggauauugucugacccgguggaugcucauugaggccgagcugaagugcuuuggcaauacagcugucgccaaauguaacgaaaagcaugaugaggaguucugcgacaugcuucgccuguuugauuucaauaaacaggcuauccagagacucaagaccgaagcccagauguccauucaacugaucaacaaggcggugaaugcccuuaucaacgaccagcugauuaugaaaaaucaccuccgggauaucauggggauuccuuacugcaacuauagcaaguacugguaccugaaucacacaaccacgggaaaaacaucucugcccaaguguuggcucguguccaacggcagcuaucugaaugaaacccauuucucugacgacaucgagcagcaagcugauaacaugauuaccgagaugcuucagaaagaauacauggagcgccaggggaagacaccucugggacucgucgaccuguuuguuuucagcaccuccuuuuaucugaucucuaucuuccuucaccucgugaaaauuccgacacauagacacaucgugggcaagagcugccccaagccucaucggcugaaucacaugggcauuuguuccugcgggcuguacaaacagcccggagucccugugcgcuggaagagaugaggacuaguuauaagacugacuagcccgaugggccucccaacgggcccuccuccccuccuugcaccgagauuaaucaaaggcucuuuucagagccaccaaaaaaaaaaaaaaaaaaaaaaaaaaaaaaaaaaaaaaaaaaaaaaaaaaaaaaaaaaaaaaaaaaaaaaaaaaaaaaaaaaaaaaaaaaaaaaaaaaaaa

SEQ ID NO: 15105 - RNA, 1689 nt, Artificial Sequence
  mRNA product Design i-3 (hSL-A100) comprising derived and/or modified sequence from LASV(G502-SLE-2009;Clade IV)__AIT17126__GPC (opt5)
aggagaaagcuuaccaugggccagaucgugaccuucuuucaagaggucccccacguuauugaagaggugaugaacaucgugcugauugcccucagcauccuggcuguccuuaaggggcuguacaauuucgccacaugcggacucgugggccugcuuacguuucugcuccugugugggagauccugcaccacaggacuguauaaaggcguuuacgaacuccagacccuggagcuuaacauggaaacacugaauaugaccaugccucucucuuguacaaagaacaauagccaucacuauauuaugguggggaacgagaccggacuggagcuuacgcugaccaauacauccaucaucaaccauaaauucugcaaucucucugacgcgcacaagaaaaaccuguacgaucaugcucugaugagcauuaucuccaccuuucaccucucuauuccgaauuucaaccaguaugaagccaugagcugugacuuuaauggcggcaagaucuccguccaguacaaccugagccacucuuaugccggggaugcugccgaccauugcggaacaguggcuaauggcguucuucaaaccuucaugcggauggccuggggaggguccuacauugcgcuggauagcggccgcgggagaugggacuguaucaugacgucuuaccaguaucucauuauccagaacacaaccugggaggaucacugccaguuuucccggcccagcccuaucggauaccugggccuucugucucaacgcacaagagacauuuauaucucccggcgccuccugggcaccuucaccuggacacugagcgauuccgaagggaaggacacgcccggaggcuacugucucaccagauggaugcugauugaggccgagcuuaaaugcuuugggaacacagcuguggccaaguguaaugaaaaacaugaugaggaguucugcgacaugcugcggcucuuugauuucaacaagcaggcuauccagcgccugaaagccgaagcgcagaugucuauucaacuuaucaauaaggccgucaacgcucugaucaaugaccagcucgugaugaagaaccaccugagagacauuaugggaaucccuuauugcaauuacagccgguauugguaccugaaccacaccacaaccggccgcacgucccuccccaaauguuggcuggugagcaaugggucuuaccuuaacgaaacacauuucuccgaugacauugagcagcaagccgauaauaugaucaccgagaugcugcagaaggaauauauggagagacagggaaaaaccccucucggccuggucgaccuguuuguuuucagcacaucuuuuuaccuuauuagcaucuuccuccaccuggugaagaucccgacccaucggcacauugugggcaaauccugccccaagccucaucgccugaaccacauggggaucuguucuugcggacucuauaaacagcccggcgucccugugaaguggaagagaugaggacuaguuauaagacugacuagcccgaugggccucccaacgggcccuccuccccuccuugcaccgagauuaaucaaaggcucuuuucagagccaccaaaaaaaaaaaaaaaaaaaaaaaaaaaaaaaaaaaaaaaaaaaaaaaaaaaaaaaaaaaaaaaaaaaaaaaaaaaaaaaaaaaaaaaaaaaaaaaaaaaaa

SEQ ID NO: 15106 - RNA, 1689 nt, Artificial Sequence
  mRNA product Design i-3 (hSL-A100) comprising derived and/or modified sequence from LASV(G733-SLE-2010;Clade IV)__AIT17154__GPC (opt5)
aggagaaagcuuaccaugggccagaucgugaccuucuuucaagaggucccccacguuauugaagaggugaugaacaucgugcugauugcccucagcauccuggcuguccuuaaggggcuguacaauuucgccacaugcggaauugugggccucguuuccuuucugcuucugugugggagaucuugcacgaccagccucuauaaaggaguguacgaacugcagacacuggagcucaacauggaaacccugaauaugacaaugccucuuuccuguaccaagaacaauucucaucacuauaucauggucggcaacgagacagggcuggagcucacccugacgaauaccagcaucauuaaccauaaauucugcaaucuuuccgacgcgcacaagaaaaaccuguacgaucaugcucucaugucuaucauuagcacauuucaccuguccaucccgaauuucaaccaguaugaagccaugagcugugacuuuaauggaggcaagauuucugugcaguacaaccugucccacagcuaugccggcgaugcugccaaucauugcgggaccaucgcuaacggaguucuccaaacauucaugcggauggccuggggcgggucuuacauugcgcuggacuccggacgcgauagaugggacuguaucaugaccagcuaccaguaucuuaucauucagaacacgacaugggaggaucacugccaguuuucucggcccuccccuaucggcuaccuggggcuccugagccaacgcaccagagacauuuauaucucccggcgccuucugggaacauucaccuggacccucucugauagcgaaggcaaggacacacccggcggguacugucugacgagauggaugcugauugaggccgagcucaaaugcuuuggaaauaccgcuguggccaaguguaacgaaaaacaugaugaggaguucugcgacaugcugcggcuuuuugauuucaauaagcaggcuauccagcgccugaaagccgaagcgcagauguccauccaacucauuaacaaggccgucaaugcucugaucaacgaccagcuuauuaugaagaaucaccugagagacaucaugggcauuccuuauugcaacuacagcaaauauugguaccucaaucacacaaccacagggaagaccucucugcccaaauguuggcugguguccaacggaagcuaccucaaugaaacgcauuucucugaugacaucgagcagcaagccgauaacaugaucacagagaugcugcagaaggaauauauggagcggcagggcaaaaccccucuugggcugguggaccucuuugucuucagcaccuccuuuuaccugauuucuaucuuccugcaccuuguuaagauuccgacacaucgccacguggugggaaaaagcugccccaagccucauagacucaaucacaugggcaucuguuccugcggccuguaugggcagcccggagucccugugaaguggaaacggugaggacuaguuauaagacugacuagcccgaugggccucccaacgggcccuccuccccuccuugcaccgagauuaaucaaaggcucuuuucagagccaccaaaaaaaaaaaaaaaaaaaaaaaaaaaaaaaaaaaaaaaaaaaaaaaaaaaaaaaaaaaaaaaaaaaaaaaaaaaaaaaaaaaaaaaaaaaaaaaaaaaaa

SEQ ID NO: 15107 - RNA, 1689 nt, Artificial Sequence
  mRNA product Design i-3 (hSL-A100) comprising derived and/or modified sequence from MOPV/LASV reassortant(IGS-1;Clade IV)__AFY05576__GPC (opt5)
aggagaaagcuuaccaugggccagaucgugaccuucuuucaagaggucccccacguuauugaagaggugaugaacaucgugcugauugcccucagcguccuggcugugcuuaaggggcuguacaauuucgccacaugcggacucguuggccuggugacguuucuucugcucugugggagauccugcaccacaucucuguauaaaggagucuacgaacugcagacccucgagcugaacauggaaacacuuaauaugaccaugccucugagcuguacaaagaacaauucccaucacuauaucauggugggcaacgagaccgggcucgagcugacgcuuaccaauacaucuauuaucaaccauaaauucugcaaucugagcgacgcgcacaagaaaaaccucuacgaucaugcucugauguccaucauuucuaccuuucaccugagcaucccgaauuucaaccaguaugaagccauguccugugacuuuaauggaggcaagauuagcguucaguacaaccucucucacuccuaugccggcgaugcugccaaucauugcgggacaguggcuaacggaguccugcaaaccuucaugcggauggccuggggcgggagcuacaucgcgcuugacucuggacgcggcaacugggauuguauuaugacguccuaccaguaucugaucauucagaauacaaccugggaggaccacugccaguuuagcagacccucuccuaucggguaccucggacugcuuucccaacggacacgcgauaucuauauuagcagacggcugcucggcaccuucaccuggacacuguccgacucugaaggcgaggauacgcccgggggauacugucugacccgcuggaugcucaucgaggccgaacugaagugcuuuggcaacacagcuguggccaaauguaaugagaagcaugacgaagaguucugcgauaugcuuagacuguuugacuucaacaaacaggcuauucagcggcucaaggccgaagcgcagaugagcauccaacugauuaauaaagccgugaacgcucuuaucaaugaucagcugaucaugaagaaccaccuccgcgacauuauggggaucccuuauugcaauuacuccaaguauugguaccugaaccacaccacaaccggaagaacgagccugcccaaauguuggcucgucucuaauggcuccuaccugaacgagacacauuucagcgacgauauugagcagcaagccgacaauaugaucaccgaaaugcuucagaaggaguauauggaacggcaggggaaaaccccucugggacucguugaucuguuuguguucucuaccagcuuuuaccugauuuccaucuuccuucaccucgugaagaucccgacacaucgccacauugucggcaaaucuugccccaagccucauagacugaaccacaugggcaucuguagcugcgggcuguauaaacagcccggagugccuguuaaguggaagcggugaggacuaguuauaagacugacuagcccgaugggccucccaacgggcccuccuccccuccuugcaccgagauuaaucaaaggcucuuuucagagccaccaaaaaaaaaaaaaaaaaaaaaaaaaaaaaaaaaaaaaaaaaaaaaaaaaaaaaaaaaaaaaaaaaaaaaaaaaaaaaaaaaaaaaaaaaaaaaaaaaaaaa

SEQ ID NO: 15108 - RNA, 1689 nt, Artificial Sequence
  mRNA product Design i-3 (hSL-A100) comprising derived and/or modified sequence from LASV(LM765-SLE-2012;Clade IV)__AIT17814__GPC (opt5)
aggagaaagcuuaccaugggccagaucgugaccuucuuucaagaggucccccacguuauugaagaggugaugaacaucgugcugauugcccucagcauccuggcuguccuuaaggggcuguacaauuucgccacaugcggacucgugggccugguuacguuucuucugcucugugggagauccugcaccacaucucuguauaaaggaguguacgaacugcagacccucgagcugaacauggaaacacuuaauaugaccaugccucugagcuguacaaagaacaauucccaucacuauauuauggucggcaacgagaccgggcucgagcugacgcuuaccaauacaucuaucaucgaccauaaauucugcaaccugagcgaugcgcaccggaagaaucucuacgaccaugcucugauguccauuaucucuaccuuucaccugagcauuccgaacuucaaucaguaugaagccauguccugugauuuuaacggaggcaaaaucagcgugcaguacaaucucucucacuccuaugccaaggacgcugccgaucauugcggcacaguugcuaacggggugcugcaaaccuucaugcgcauggccuggggaggcagcuacauugcgcuugacucugggagaggacggugggauuguaucaugacguccuaccaguaucugauuauccagaauacaaccugggaggaccacugccaguuuagccgccccucuccuaucggcuaccucgggcugcuuucccaaagaacacgggauauuuauaucagccgcagacugcucggaaccuucaccuggacacuguccgacucugaaggcaaggauacgcccggcggguacugucugacccgguggaugcucauugaggccgagcugaaaugcuuuggaaacacagcugucgccaaguguaacgaaaaacaugacgaggaguucugcgauaugcuucgccuguuugacuucaauaagcaggcuauccagagacucaaagccgaagcgcagaugagcauucaacugaucaacaaggccgugaaugcucuuaucaacgaccagcugauuaugaagaaucaccuccgggauaucaugggcauuccuuauugcaacuacuccaaauauugguaccugaaucacaccacaaccgggaagacgagccugcccaaauguuggcucgugucuaacggauccuaccugaaugaaacacauuucagcgacgauaucgagcagcaagccgacaacaugauuaccgagaugcuucagaaggaauauauggagcgccagggcaaaaccccucuggggcucgucgaucuguuuguuuucucuaccagcuuuuaccugaucuccaucuuccuucaccucgugaagauuccgacacauagacacaucgugggaaaacccugcccuaagccccaucggcugaaucacaugggcauuuguucuugcggccuguauaagcagccugggguccccgugaaauggaagcgcugaggacuaguuauaagacugacuagcccgaugggccucccaacgggcccuccuccccuccuugcaccgagauuaaucaaaggcucuuuucagagccaccaaaaaaaaaaaaaaaaaaaaaaaaaaaaaaaaaaaaaaaaaaaaaaaaaaaaaaaaaaaaaaaaaaaaaaaaaaaaaaaaaaaaaaaaaaaaaaaaaaaaa

SEQ ID NO: 15109 - RNA, 1689 nt, Artificial Sequence
  mRNA product Design i-3 (hSL-A100) comprising derived and/or modified sequence from LASV(LM776-SLE-2012;Clade IV)__AIT17824__GPC (opt5)
aggagaaagcuuaccaugggccagaucgugaccuucuuucaagaggucccccacguuauugaagaggugaugaacaucgugcugauugcccucagcauccuggcuguccuuaaggggcuguacaauuucgccacaugcggacucgugggccugguuacguuucuucugcucugugggagauccugcaccacaucuguguauaaaggagucuacgaacugcagacccuggagcucaacauggaaacacugaauaugaccaugccucuuagcuguacaaagaacaauucccaucacuauauuauggugggcaacgagaccgggcuggagcucacgcugaccaauacaucuaucaucaaccauaaauucugcaaucuuagcgacgcgcacaagaaaaaccuguacgaucaugcucucauguccauuaucucuaccuuucaccugagcauuccgaauuucaaccaguaugaagccauguccugugacuuuaauggaggcaagaucagcguucaguacaaccugucucacuccuaugccggcgaugcugccaaucauugcgggacaguggcuaacggaguccuccaaaccuucaugcggauggccuggggcgggagcuacauugcgcuggacucuggacacggcaagugggauuguaucaugacguccuaccaguaucuuauuauccagaacacaaccugggaggaccauugccaguuuagccgccccucuccuaucggguaccugggacuccugucccaaagaacacgggauauuuauaucagccgcagacuucugggcaccuucaccuggacacucuccgacucugaaggcaaagauacgcccgggggauacugucugacccgguggaugcugauugaggccgagcucaagugcuuuggcaauacagcuguggccaaauguaacgaaaagcacgacgaggaguucugcgauaugcugcgccuuuuugacuucaauaaacaggcuauccagagacugaaggccgaagcgcagaugagcauucaacucaucaacaaggccgugaaugcucugaucaacgaucagcuuauuaugaaaaaucaucugcgggacaucauggggauuccuuauugcaacuacuccaaguauugguaccucaaucacaccacaaccggaaaaacgagccugcccaaguguuggcuggucucuaacggcuccuaccucaaugaaacacacuucagcgacgauaucgagcagcaagccgacaacaugauuaccgagaugcugcagaaagaauauauggagcgccaggggaagaccccucuuggacugguugaucucuuuguguucucuaccagcuuuuaccugaucuccaucuuccugcaucuugugaaaauuccgacacacagacauaucgucggcaagucuugccccaagccucaccggcucaaucacaugggcauuuguagcugcgggcuguauaaacagcccggagugccuguucgcuggaagagaugaggacuaguuauaagacugacuagcccgaugggccucccaacgggcccuccuccccuccuugcaccgagauuaaucaaaggcucuuuucagagccaccaaaaaaaaaaaaaaaaaaaaaaaaaaaaaaaaaaaaaaaaaaaaaaaaaaaaaaaaaaaaaaaaaaaaaaaaaaaaaaaaaaaaaaaaaaaaaaaaaaaaa

SEQ ID NO: 15110 - RNA, 1689 nt, Artificial Sequence
  mRNA product Design i-3 (hSL-A100) comprising derived and/or modified sequence from LASV(Mad39;Clade IV)__ANH09722__GPC (opt5)
aggagaaagcuuaccaugggccagaucgugaccuucuuucaagaggucccccacguuauugaagaggugaugaacaucgugcugauugcccucagcauccuggcuguccuuaaggggcuguacaauguggccacaugcggacucauuggccugguuacguuccuucugcucugugggagauccugcaccacaacccuguauaaaggaguguacgaacugcaggcgcucgagcugaacauggaaacacuuaauaugaccaugccucugucuuguacaaagaacaauagccaucacuauauccgggucggcaacgagaccgggcucgagcugacgcuuaccaauacaucccugaucaaccauaaauuuugcaaucucucugacgcucacaagaaaaaccuguacgaucaugcccugaugagcauuaucuccaccuuccaccucucuauuccgaauuuuaaccaguaugaagccaugagcugugacuucaaugauggaaagaucuccgugcaguacaaccugagccacacauaugcuggcgacaccgccaaucauugcggcacgguugcuaacggggugcuucaaacauuuaugcgcauggccuggggaggcucuuacauugcgcuggauuccgggagaggaggcugggacuguaucaugaccagcuaccaguaucucauuauccagaacacaaccugggaggaucacugccaguucucucggcccuccccuaucggguaccugggacuucugagccaacgcaccagagacauuuauaucucucggcgccuccugggcacauuuacguggacccuguccgauagcgaaggcaaggacacacccgggggauacugucucaccagauggaugcugauugaggccgagcuuaaaugcuucggcaauacagcugucgccaaguguaacgaaaaacaugaugaggaauuuugcgacaugcugcgccucuucgauuuuaauaagcaggcuauccagcggcugaaagccgaggcgcagauguccauucaacuuaucaacaaggccgugaaugcucugaucaacgaccagcucauuaugaagaaucaccugagagacaucauggggauuccuuauugcaacuacucuaaauauugguaccugaaucacaccgugacgggaaagacaagccuccccaaauguuggcuggucuccaacggcagcuaccuuaaugaaacccauuucucugaugacaucgagcagcaagccgauaacaugauuaccgagaugcugcagaaggaauauauggagcggcaggggaaaacaccucucggacugguugaccuguucguguuuuccaccagcuucuaccuuaucucuaucuuucuccaccuggugaagauuccgacacaucgccacgucgugggcaaacccugcccuaagccccauagacugaaucacaugggcaucuguagcugcggguucuauaagcagccuggaguucccgugcgguggaaacgcugaggacuaguuauaagacugacuagcccgaugggccucccaacgggcccuccuccccuccuugcaccgagauuaaucaaaggcucuuuucagagccaccaaaaaaaaaaaaaaaaaaaaaaaaaaaaaaaaaaaaaaaaaaaaaaaaaaaaaaaaaaaaaaaaaaaaaaaaaaaaaaaaaaaaaaaaaaaaaaaaaaaaa

SEQ ID NO: 15111 - RNA, 1689 nt, Artificial Sequence
  mRNA product Design i-3 (hSL-A100) comprising derived and/or modified sequence from LASV(Z0947-SLE-2011;Clade IV)__AIT17840__GPC (opt5)
aggagaaagcuuaccaugggccagaucgugaccuucuuucaagaggucccccacguuauugaagaggugaugaacaucgugcugauugcccucagcauccuggcuguccuuaaggggcuguacaauuucgccacaugcggacucgugggccugguuacguuucuucugcucugugggagauccugcaccauuucucuguauaaaggaguguacgaacugcagacacucgagcugaacauggaaacccuuaauaugacaaugccucugagcuguaccaagaacaauucccaucacuauaucauggucggcaacgagacagggcucgagcugacccuuacgaauaccucuaucauuaaccauaaauucugcaaucugagcgacgcgcacaagaaaaaccucuacgaucaugcucugauguccaucauuucuacauuucaccugagcaucccgaauuucaaccaguaugaagccauguccugugacuuuaauggaggcaagauuagcgugcaguacaaccucucucacuccuaugccggcgaugcugccaaucauugcgggaccguugcuaacggagugcugcaaacauucaugcggauggccuggggcgggagcuacaucgcgcuugacucuggacgcgauagaugggacuguauuaugaccuccuaccaguaucugaucauccagaacacgacaugggaggaucacugccaguuuagccggcccucuccuauuggcuaccucgggcugcuuucccaacgcaccagagacaucuauauuagccggcgccugcucggaacauucaccuggacccuguccgauucugaaggcaaggacacacccggcggguacugucugacgagauggaugcucaucgaggccgagcugaaaugcuuuggaaauaccgcugucgccaaguguaacgaaaaacaugaugaggaguucugcgacaugcuucggcuguuugauuucaauaagcaggcuauucagcgccucaaagccgaagcgcagaugagcauccaacugaucaacaaggccgugaaugcucuuauuaacgaccagcugaucaugaagaaucaccucagagacauuaugggcaucccuuauugcaacuacuccaaauauugguaccugaaucacacaaccacagggaagaccagccugcccaaauguuggcucgugucuaacggauccuaccugaaugaaacgcauuucagcgaugacauugagcagcaagccgauaacaugaucacagagaugcuucagaaggaauauauggagcggcagggcaaaaccccucuggggcucgucgaccuguuuguuuucucuaccagcuuuuaccugaucuccauuuuccuucaccucgugaagaucccgacacaucgccacauugugggaaaacccugcccuaagccccauagacugaaucacaugggcaucuguucuugcggccuguauaagcagccugggguccccgugaaauggaagcggugaggacuaguuauaagacugacuagcccgaugggccucccaacgggcccuccuccccuccuugcaccgagauuaaucaaaggcucuuuucagagccaccaaaaaaaaaaaaaaaaaaaaaaaaaaaaaaaaaaaaaaaaaaaaaaaaaaaaaaaaaaaaaaaaaaaaaaaaaaaaaaaaaaaaaaaaaaaaaaaaaaaaa

SEQ ID NO: 15112 - RNA, 1665 nt, Artificial Sequence
  mRNA product Design i-3 (A100) comprising derived and/or modified sequence from LASV(Josiah;Clade IV)__NP_694870__GPC (opt1)
aggagaaagcuuaccaugggccagaucgugaccuucuuccaggaggucccccacgugaucgaggaggugaugaacaucguccugaucgcccucagcgugcuggccgugcugaaggggcucuacaacuucgcgaccugcggccuggucgggcuggugacguuccuccugcugugcggccgcuccugcaccaccagccucuacaaggggguguacgagcugcagacccuggagcucaacauggagacgcugaacaugaccaugccgcuguccugcaccaagaacaacagccaccacuacaucauggucggcaacgagaccggccucgagcugacgcugaccaacaccuccaucaucaaccacaaguucugcaaccucagcgacgcccacaagaagaaccuguacgaccacgcccugauguccaucaucagcaccuuccaccucuccauccccaacuucaaccaguacgaggccaugagcugcgacuucaacgggggcaagaucuccgugcaguacaaccugagccacuccuacgccggggacgcggccaaccacugcggcacgguggccaacgggguccugcagaccuucaugcggauggccuggggcggcagcuacaucgcgcucgacuccgggcgcggcaacugggacugcaucaugaccagcuaccaguaccugaucauccagaacaccacgugggaggaccacugccaguucucccggcccagccccaucggguaccugggccuccugucccagcgcacccgggacaucuacaucagccgccggcugcucggcaccuucaccuggacgcugagcgacuccgaggggaaggacaccccgggcggguacugccugacccgcuggaugcucaucgaggccgagcugaagugcuucggcaacaccgccguggccaagugcaacgagaagcacgacgaggaguucugcgacaugcugcggcuguucgacuucaacaagcaggccauccagcgccugaaggcggaggcccagaugagcauccagcugaucaacaaggccgugaacgcccucaucaacgaccagcugaucaugaagaaccaccuccgggacaucauggggauccccuacugcaacuacuccaaguacugguaccucaaccacacgaccaccggccgcaccagccugcccaagugcuggcuggucuccaacggcagcuaccucaacgagacgcacuucuccgacgacaucgagcagcaggccgacaacaugaucaccgagaugcugcagaaggaguacauggagcggcaggggaagacgccccugggccucguggaccuguucguguucagcaccuccuucuaccugaucagcaucuuccugcaccucgucaagaucccgacccaccgccacaucguggggaaguccugccccaagccccaccggcugaaccacaugggcaucugcagcugcgggcuguacaagcagcccggcgugccggucaaguggaagcgcugaggacuaguuauaagacugacuagcccgaugggccucccaacgggcccuccuccccuccuugcaccgagauuaauaaaaaaaaaaaaaaaaaaaaaaaaaaaaaaaaaaaaaaaaaaaaaaaaaaaaaaaaaaaaaaaaaaaaaaaaaaaaaaaaaaaaaaaaaaaaaaaaaaaa

SEQ ID NO: 15113 - RNA, 1662 nt, Artificial Sequence
  mRNA product Design i-3 (A100) comprising derived and/or modified sequence from LASV(LP;Clade I)__AAF86701__GPC (opt1)
aggagaaagcuuaccaugggccagaucaucaccuucuuccaggaggugccccacgucaucgaggaggugaugaacaucgugcugaucgcccucagccugcuggccauccucaaggggcuguacaacaucgcgaccugcggcaucaucgggcuggucgccuuccucuuccugugcggcaaguccugcagccugacgcucaagggcggguacgagcugcagacccuggagcucaacauggagacccugaacaugaccaugccgcuguccugcacgaagaacagcucccaccacuacauccgcgugggcaacgagaccgggcucgagcugacccugaccaacacgagcaucaucaaccacaaguucugcaaccucuccgacgcccacaagaagaaccuguacgaccacgcccugaugagcaucaucuccaccuuccaccucagcauccccaacuucaaccaguacgaggccauguccugcgacuucaacggcgggaagaucagcgugcaguacaaccugucccacagcuacgcgggcgacgccgccgagcacugcgggaccgucgccaacggcgugcugcagaccuucaugcggauggcguggggcgggcgcuacaucgcccucgacuccggcaaggggaacugggacugcaucaugacgagcuaccaguaccugaucauccagaacaccaccugggaggaccacugccaguucucccggcccagccccaucggcuaccugggccuccugucccagcgcacccgggacaucuacaucagccgccggcugcucgggacguucaccuggacccugagcgacuccgagggcaacgagacccccgggggcuacugccugacgcgcuggaugcucaucgaggccgagcugaagugcuucgggaacaccgccguggccaagugcaacgagaagcacgacgaggaguucugcgacaugcugcggcuguucgacuucaacaagcaggcgauccgccggcugaaggccgaggcccagaugagcauccagcugaucaacaaggccgucaacgcccucaucaacgaccagcugaucaugaagaaccaccuccgcgacaucaugggcauccccuacugcaacuacuccaaguacugguaccucaaccacaccagcuccggccggaccagccugcccaagugcuggcugaucuccaacgggagcuaccucaacgagacgcaguucuccgacgacaucgagcagcaggcggacaacaugaucaccgagaugcugcagaaggaguacaucgagcgccagggcaagaccccgcuggggcucguggacaucuucaucuucagcaccuccuucuaccugaucagcaucuuccugcaccugaucaagaucccgacgcaccggcacaucgugggcaagcccugccccaagccccaccgccucaaccacaugggggucugcuccugcggccuguacaagcacccgggcgugcccaccaaguggaagcggugaggacuaguuauaagacugacuagcccgaugggccucccaacgggcccuccuccccuccuugcaccgagauuaauaaaaaaaaaaaaaaaaaaaaaaaaaaaaaaaaaaaaaaaaaaaaaaaaaaaaaaaaaaaaaaaaaaaaaaaaaaaaaaaaaaaaaaaaaaaaaaaaaaaa

SEQ ID NO: 15114 - RNA, 1662 nt, Artificial Sequence
  mRNA product Design i-3 (A100) comprising derived and/or modified sequence from LASV(803213;Clade II)__AAF86703__GPC (opt1)
aggagaaagcuuaccaugggccagaucaucaccuucuuccaggaggugccccacgucaucgaggaggugaugaacaucgugcugaucgcccucagccugcuggccauccucaaggggaucuacaacgucgcgaccugcggccuguucgggcugaucuccuuccuccugcugugcggccgcagcugcuccgugacguacaaggggguguacgagcuccagacccuggagcugaacauggccaaccucaacaugaccaugccgcugagcugcaccaagaacaacucccaccacuacaucauggucggcaacgagacgggccuggagcucacccugaccaacaccagcaucaucaaccacaaguucugcaaccuguccgacgcccacaagaagaaccucuacgaccacgcccugaugagcaucaucuccacguuccaccugagcauccccaacuucaaccaguacgaggccauguccugcgacuucaacgggggcaagaucagcgugcaguacaaccucucccacagcuucgcgguggacgccgccaaccacugcgggaccaucgccaacggcguccugcagaccuucaugcggauggcguggggcggguccuacaucgcccuggacagcggcaaggggaacugggacugcaucaugaccuccuaccaguaccucaucauccagaacacgaccugggaggaccacugccaguucagccgccccucccccaucggcuaccuggggcugcucagccagcggacccgcgacaucuacaucagccggcgccugcugggcaccuucacguggacccucuccgacagcgagggcaacgaggcccccgggggcuacugccugacccgguggaugcugaucgaggccgagcucaagugcuucgggaacaccgccguggcgaagugcaacgagaagcacgacgaggaguucugcgacaugcugcgccuguucgacuucaacaagcaggccaucaagcggcucaagacggaggcccagauguccauccagcugaucaacaaggccgugaacgcccugaucaacgaccagcucaucaugaagaaccaccuccgcgacaucaugggcauccccuacugcaacuacagccgguacugguaccugaaccacaccgucaccgggaagaccucccugccccgcugcuggcuggugagcaacggcuccuaccugaacgagacgcacuucagcgacgacaucgagcagcaggcggacaacaugaucaccgagaugcuccagaaggaguacauggaccggcagggcaagaccccgcuggggcugguggaccucuucgucuucuccaccagcuucuaccugaucuccaucuuccugcaccuggugaagaucccgacgcaccgccacaucgugggcaagcccugccccaagccccaccggcucaaccacauggggaucugcagcugcggccuguacaagcacccggggguccccgugaaguggaagcgcugaggacuaguuauaagacugacuagcccgaugggccucccaacgggcccuccuccccuccuugcaccgagauuaauaaaaaaaaaaaaaaaaaaaaaaaaaaaaaaaaaaaaaaaaaaaaaaaaaaaaaaaaaaaaaaaaaaaaaaaaaaaaaaaaaaaaaaaaaaaaaaaaaaaa

SEQ ID NO: 15115 - RNA, 1662 nt, Artificial Sequence
  mRNA product Design i-3 (A100) comprising derived and/or modified sequence from LASV(GA391;Clade III)__CAA36645__GPC (opt1)
aggagaaagcuuaccaugggccagaucgugaccuucuuccaggaggucccccacgugaucgaggaggugaugaacaucguccugaucgcccucagcauccuggccauccugaaggggcucuacaacguggcgaccugcggccugaucgggcuggugacguuccuccugcuguccggccgcagcugcucccucaucuacaaggggaccuacgagcugcagacccuggagcucaacauggagacccugaacaugacgaugccgcugagcugcaccaagaacaacucccaccacuacauccgggucggcaacgagaccggccucgagcugacccugacgaacaccagcauccucaaccacaaguucugcaaccuguccgacgcccacaagcgcaaccuguacgaccacagccucauguccaucaucagcaccuuccaccuguccauccccaacuucaaccaguacgaggccaugagcugcgacuucaacgggggcaagaucaccgugcaguacaaccugucccacagcuucgccguggacgccgcggggcacugcggcacgcucgccaacgggguccugcagaccuucaugcggauggccuggggcggcuccuacaucgcccuggacagcgggcgcggcaacugggacugcaucaugaccuccuaccaguaccucaucauccagaacaccacgugggacgaccacugccaguucagccggcccucccccaucggguaccugggccugcucagccagcgcacccgggacaucuacaucagccgccggcugcugggcaccuucaccuggacgcucuccgacagcgaggggaacgagaccccgggcggguacugccugacccgcuggaugcugaucgaggcggagcucaagugcuucggcaacaccgccguggccaagugcaacgagaagcacgacgaggaguucugcgacaugcugcggcuguucgacuucaacaagcaggccauccgccggcucaagacggaggcccagauguccauccagcugaucaacaaggcggugaacgcccugaucaacgaccagcucaucaugaagaaccaccuccgcgacaucauggggauccccuacugcaacuacagccgguacugguaccugaaccacaccuccaccggcaagaccagccugccccgcugcuggcugaucuccaacggcagcuaccugaacgagacgaaguucuccgacgacaucgagcagcaggccgacaacaugaucaccgagaugcuccagaaggaguacaucgaccggcaggggaagacgccccugggccuggucgaccuguucguguucagcaccuccuucuaccucaucagcaucuuccugcaccuggugaagaucccgacccaccgccacaucgucgggaagcccugccccaagccccaccggcucaaccacaugggcaucugcuccugcgggcuguacaagcagccgggcgugcccgugcgcuggaagcggugaggacuaguuauaagacugacuagcccgaugggccucccaacgggcccuccuccccuccuugcaccgagauuaauaaaaaaaaaaaaaaaaaaaaaaaaaaaaaaaaaaaaaaaaaaaaaaaaaaaaaaaaaaaaaaaaaaaaaaaaaaaaaaaaaaaaaaaaaaaaaaaaaaaa

SEQ ID NO: 15116 - RNA, 1665 nt, Artificial Sequence
  mRNA product Design i-3 (A100) comprising derived and/or modified sequence from LASV(AV;Clade V)__CCA30314__GPC (opt1)
aggagaaagcuuaccaugggccagaucgugaccuucuuccaggaggucccccacgugaucgaggaggugaugaacaucguccugaucgcccucagcauccuggccgugcugaaggggcucuacaacaucgcgaccugcggccugaucgggcugaucacguuccuccugcugugcggccgcuccugcagcuccaaccucuacaaggggguguacgagcugcagagccuggaccucaacauggagacccugaacaugaccaugccgcuguccugcaccaagaacaacagccaccacuacauccgggucggcaacgacacgggccucgagcugacccugaccaacaccuccauccucaaccacaaguucugcaaccugagcgacgcccacaagaaggaccuguacgaccacgcccucauguccaucaucagcacguuccaccuguccauccccaacuucaaccaguacgaggccaugagcugcgacuucaacgggggcaagaucuccgugcaguacaaccugagccacuccuacgccaucgacgcggccaaccacugcgggaccguggccaacggcauccuccagaccuucaugcgcauggccuggggcgggagcuacaucgcgcuggacuccggccgggggaacugggacugcaucaugaccagcuaccaguaccugaucauccagaacacgaccugggagaaccacugccaguucucccgccccagccccaucggcuaccucgggcugcugagccagcggacccgcgacaucuacaucucccggcgccuccugggcaccuucacguggacccugagcgacuccgagggcaacgccacccccgggggcuacugccucacccgguggaugcugaucgaggccgagcugaagugcuucgggaacacggccgucgccaagugcaacgagaagcacgacgaggaguucugcgacaugcuccgccuguucgacuucaacaagcaggcgaucagccggcugaaguccgaggcccagaugagcauccagcucaucaacaaggccgugaacgcccugaucaacgaccagcugaucaugaagaaccaccuccgcgacaucaugggcauccccuacugcaacuacuccaaguacugguaccugaaccacaccaucaccgggaagaccagccugcccaagugcuggcucguguccaacggcagcuaccugaacgagacgcacuucuccgacgacaucgagcagcaggccgacaacaugaucaccgagaugcugcagaaggaguacauggagcggcagggcaagaccccgcucgggcuggucgaccuguucguguucagcaccuccuucuaccugaucagcaucuuccuccgccuggugaagaucccgacgcaccggcacaucgucggcaagcccugccccaagccccaccgccugaaccacauggggaucugcuccugcggccucuacaagcagccgggggugcccgugcgguggaagcgcugaggacuaguuauaagacugacuagcccgaugggccucccaacgggcccuccuccccuccuugcaccgagauuaauaaaaaaaaaaaaaaaaaaaaaaaaaaaaaaaaaaaaaaaaaaaaaaaaaaaaaaaaaaaaaaaaaaaaaaaaaaaaaaaaaaaaaaaaaaaaaaaaaaaa

SEQ ID NO: 15117 - RNA, 1662 nt, Artificial Sequence
  mRNA product Design i-3 (A100) comprising derived and/or modified sequence from LASV(Togo/2016/7082;Clade VI)__AMR44577__GPC (opt1)
aggagaaagcuuaccaugggccagaucaucaccuucuuccaggaggugccccacgucaucgaggaggugaugaacaucgugcugaucgcccucagccugcuggccauccucaagggggucuacaacguggcgaccugcggcaucaucgggcuggugacguuccuguuccucugcggccgcuccugcagccugaucuacaagggguccuacgagcugcagacccucgagcugaacauggagacccugaacaugaccaugccgcucagcugcacgaagaacuccagccaccacuacauccgggucggcaacgagaccggccuggagcugacccucaccaacacguccaucaucaaccacaaguucugcaaccugagcgacgcccacaagcgcaaccuguacgaccacgcccucauguccauccugagcaccuuccaccuguccauccccaacuucaaccaguacgaggccaugagcugcgacuucaacgggggcaagaucuccgugcaguacaaccucagccacgccuacgcgguggacgccgccgagcacugcgggaccgucgccaacggcgugcugcagaccuucaugcggauggcguggggcggguccuacaucgcccuggacagcggccgcgggaacugggacugcaucaugacguccuaccaguaccucaucauccagaacaccaccugggaggaccacugccaguucagccggcccucccccaucggcuaccuggggcugcucagccagcgcacccgggacaucuacaucagccgccggcugcugggcacguucaccuggacccucuccgacagcgagggcaacgagacccccgggggcuacugccugacgcgcuggaugcugaucgaggccgagcucaagugcuucgggaacaccgccguggccaagugcaacgagaagcacgacgaggaguucugcgacaugcugcggcuguucgacuucaacaagcaggcgauccagcgccucaaguccgaggcccagaugagcauccagcugaucaacaaggccgucaacgcccugaucaacgaccagcucaucaugaagaaccaccuccgggacaugaugggcauccccuacugcaacuacuccaaguacugguaccugaaccacaccagcuccgggcgcaccagccugcccaagugcuggcugguguccaacggcagcuaccugaacgagacgcacuucuccgacgacaucgagcagcaggccgacaacaugaucaccgagaugcuccagaaggaguacaucgaccggcagggcaagaccccgcuggggcugguggaccucuucgucuucagcaccuccuucuaccugaucagcaucuuccugcaccugaucaagaucccgacgcaccgccacaucgugggcaagcccugccccaagccccaccggcucaaccacauggggaucugcuccugcggccuguacaagcagccgggggugcccacccgcuggaagcggugaggacuaguuauaagacugacuagcccgaugggccucccaacgggcccuccuccccuccuugcaccgagauuaauaaaaaaaaaaaaaaaaaaaaaaaaaaaaaaaaaaaaaaaaaaaaaaaaaaaaaaaaaaaaaaaaaaaaaaaaaaaaaaaaaaaaaaaaaaaaaaaaaaaa

SEQ ID NO: 15118 - RNA, 1662 nt, Artificial Sequence
  mRNA product Design i-3 (A100) comprising derived and/or modified sequence from LASV(KAK-428;Clade n.d. (VII))__ANH09740__GPC (opt1)
aggagaaagcuuaccaugggccagaucgugaccuucuuccaggaggucccccacgugaucgaggaggugaugaacaucguccugaucgcccucagccugcuggccauccucaaggggcuguacaacuucgcgaccugcggcgugaucgggcugaucacguuccuccugcugugcggccgcuccugcagcgccaccuacaaggggcaguacgagcuccagacccuggagcugaacauggagucccucaacaugaccaugccgcugagcugcacgaagaacaacucccaccacuacauccgggccggcaacaacaccggccuggagcucacccugaccaacacgagcaucaucucccacaaguucugcaaccugagcgacgcccacaagaagaaccucuacgaccacacccugauguccaucaucaccaccuuccaccugagcauccccaacuucaaccaguacgaggccauguccugcgacuucaacgggggcaagaucagcauccaguacaaccucucccacagcuacgcgggggacgccgcccagcacugcggcacgguggccaacgggguccugcagaccuucaugcgcauggcguggggcggcuccuaccuggcccucgacagcgggcggcgcggcugggacugcaucaucuccagcuaccaguaccugaucauccagaacaccaccugggacgaccacugccaguucucccggcccagccccaucggguaccugggcuucgugagccagaagacgcgcgacaucuacaucucccggcgccuccugggcaccuucaccuggacccugagcgacuccgaggggcacgacaugccgggcggguacugccucacgcgguggaugcugaucgaggccgaccugaagugcuucggcaacaccgccguggccaagugcaacgagaagcacgacgaggaguucugcgacauguggcgccucuucgacuucaacaagcaggcgauccagcggcugaaggccgaggcccagaugaacauccagcugaucaacaaggccgucaacgcccucaucaacgaccagcugaugaugaagaaccaccuccgcgacaucauggggauccccuacugcaacuacagcaaguucugguaccugaacaacaccaccacgggccggaccucccugccccgcugcuggcugaucagcaacggcuccuaccucaacgagacccacuucagcgacgacaucgagcagcaggcggacaacaugaucaccgagaugcugcagaaggaguacauggaccggcaggggaagacgccccugggccucguggaccuguucguguucuccaccagcuucuaccugaucaccaucuuccuccaccuggucaagaucccgacccaccgccacaucguggggaagcccugccccaagccccaccggcugaaccacaugggcaucugcuccugcgggcuguacaagcagccgggcgugcccguccgcuggaagcggugaggacuaguuauaagacugacuagcccgaugggccucccaacgggcccuccuccccuccuugcaccgagauuaauaaaaaaaaaaaaaaaaaaaaaaaaaaaaaaaaaaaaaaaaaaaaaaaaaaaaaaaaaaaaaaaaaaaaaaaaaaaaaaaaaaaaaaaaaaaaaaaaaaaa

SEQ ID NO: 15119 - RNA, 1662 nt, Artificial Sequence; identical to SEQ ID NO: 15113
  mRNA product Design i-3 (A100) comprising derived and/or modified sequence from LASV(Pinneo-NIG-1969;Clade I)__AIT17836__GPC (opt1)

SEQ ID NO: 15120 - RNA, 1662 nt, Artificial Sequence
  mRNA product Design i-3 (A100) comprising derived and/or modified sequence from LASV(ISTH0009-NIG-2011;Clade II)__AIT17404__GPC (opt1)
aggagaaagcuuaccaugggccagaucaucaccuucuuccaggaggugccccacgucaucgaggaggugaugaacaucgugcugaucgcccucagccugcuggccauccucaaggggaucuacaacgucgcgaccugcggccuguucgggcugguguccuuccuccugcugugcggccgcagcugcuccacgaccuacaaggggguguacgagcuccagacccuggagcuggacauggccagccucaacaugaccaugccgcuguccugcacgaagaacaacagccaccacuacaucauggucggcaacgagaccggccuggagcucacccugaccaacacguccaucaucaaccacaaguucugcaaccugagcgacgcccacaagaagaaccucuacgaccacgcccugauguccaucaucagcaccuuccaccuguccauccccaacuucaaccaguacgaggccaugagcugcgacuucaacgggggcaagaucuccgugcaguacaaccucagccacgcguacgccguggacgccgccaaccacugcgggaccaucgcgaacggcguccugcagaccuucaugcggauggccuggggcggguccuacaucgcccuggacagcggcaagggguccugggacugcaucaugacgagcuaccaguaccucaucauccagaacaccaccugggaggaccacugccaguucucccgccccagccccaucggcuaccuggggcugcucagccagcggacccgcgacaucuacaucucccggcgccugcugggcacguucaccuggacccucagcgacuccgagggcaacgagacccccgggggcuacugccugacgcgguggaugcugaucgaggccgagcucaagugcuucgggaacaccgccguggcgaagugcaacgagaagcacgacgaggaguucugcgacaugcugcgccuguucgacuucaacaagcaggccauccggcgccucaagaccgaggcccagaugagcauccagcugaucaacaaggccgugaacgcccugaucaacgaccagcucaucaugaagaaccaccuccgggacaucaugggcaucccguacugcaacuacuccaaguacugguaccugaaccacaccgucacggggaagaccagccugccccgcugcuggcugguguccaacggcagcuaccugaacgagacccacuucuccgacgacaucgagcagcaggcggacaacaugaucaccgagcuccugcagaaggaguacauggaccggcagggcaagacgccccuggggcucguggaccuguucgucuucagcaccuccuucuaccugaucagcaucuuccugcaccucaucaagaucccgacccaccgccacaucaccggcaagcccugccccaagccccaccggcugaaccacauggggaucugcuccugcggccuguacaagcacccgggggugcccgugaaguggaagcgcugaggacuaguuauaagacugacuagcccgaugggccucccaacgggcccuccuccccuccuugcaccgagauuaauaaaaaaaaaaaaaaaaaaaaaaaaaaaaaaaaaaaaaaaaaaaaaaaaaaaaaaaaaaaaaaaaaaaaaaaaaaaaaaaaaaaaaaaaaaaaaaaaaaaa

SEQ ID NO: 15121 - RNA, 1662 nt, Artificial Sequence
  mRNA product Design i-3 (A100) comprising derived and/or modified sequence from LASV(ISTH2010-NIG-2012;Clade II)__AIT17482__GPC (opt1)
aggagaaagcuuaccaugggccagaucaucaccuucuuccaggaggugccccacgucaucgaggaggugaugaacaucgugcugaucgcccucagccugcuggccauccucaaggggaucuacaacgucgcgaccugcggccuguucgggcugguguccuuccuccugcugugcggccgcagcugcuccacgaccuacaaggggguguacgagcuccagacccuggagcuggacauggccagccucaacaugaccaugccgcuguccugcacgaagaacaacagccaccacuacaucauggucggcaacgagaccggccuggagcucacccugaccaacacguccaucaucaaccacaaguucugcaaccugagcgacgcccacaagaagaaccucuacgaccacgcccugauguccaucaucagcaccuuccaccuguccauccccaacuucaaccaguacgaggccaugagcugcgacuucaacgggggcaagaucuccgugcaguacaaccucagccacgcguacgccguggacgccgccaaccacugcgggaccaucgcgaacggcguccugcagaccuucaugcggauggccuggggcggguccuacaucgcccuggacagcggcaagggguccugggacugcaucaugacgagcuaccaguaccucaucauccagaacaucaccugggaggaccacugccaguucucccgccccagccccaucggcuaccuggggcugcucagccagcggacccgcgacaucuacaucucccggcgccugcugggcaccuucacguggacccucagcgacuccgagggcaacgagacccccgggggcuacugccugacccgguggaugcugaucgaggccgagcucaagugcuucgggaacacggccguggcgaagugcaacgagaagcacgacgaggaguucugcgacaugcugcgccuguucgacuucaacaagcaggccauccggcgccucaagaccgaggcccagaugagcauccagcugaucaacaaggccgugaacgcccugaucaacgaccagcucaucaugaagaaccaccuccgggacaucaugggcauccccuacugcaacuacuccaaguacugguaccugaaccacaccgucaccgggaagacgagccugccccgcugcuggcugguguccaacggcagcuaccugaacgagacccacuucuccgacgacaucgagcagcaggcggacaacaugaucaccgagcuccugcagaaggaguacaucgaccggcagggcaagaccccgcuggggcucguggaccuguucgucuucagcacguccuucuaccugaucagcaucuuccugcaccucgugaagaucccgacccaccgccacguggucggcaagcccugccccaagccccaccggcugaaccacauggggaucugcuccugcggccuguacaagcacccgggggugcccgugaaguggaagcgcugaggacuaguuauaagacugacuagcccgaugggccucccaacgggcccuccuccccuccuugcaccgagauuaauaaaaaaaaaaaaaaaaaaaaaaaaaaaaaaaaaaaaaaaaaaaaaaaaaaaaaaaaaaaaaaaaaaaaaaaaaaaaaaaaaaaaaaaaaaaaaaaaaaaa

SEQ ID NO: 15122 - RNA, 1662 nt, Artificial Sequence
  mRNA product Design i-3 (A100) comprising derived and/or modified sequence from LASV(Lassa virus/H.sapiens-wt/NGA/2015/ISTH_0543;Clade II)__AVO03639__GPC (opt1)
aggagaaagcuuaccaugggccagaucaucaccuucuuccaggaggugccccacgucaucgaggaggugaugaacaucgugcugaucgcccucagccugcuggccauccucaaggggaucuacaacgucgcgaccugcggccuguucgggcugguguccuuccuccugcugugcggccgcagcugcuccacgaccuacaaggggguguacgagcuccagacccuggagcuggacauggccaaccucaacaugaccaugccgcugagcugcacgaagaacaacucccaccacuacaucauggucggcaacgagaccggccuggagcucacccugaccaacacgagcaucaucaaccacaaguucugcaaccuguccgacgcccacaagaagaaccucuacgaccacgcccugaugagcaucaucuccaccuuccaccugagcauccccaacuucaaccaguacgaggccauguccugcgacuucaacgggggcaagaucagcgugcaguacaaccucucccacaccuacgcgguggacgccgccaaccacugcgggaccaucgccaacggcguccugcagacguucaugcggauggcguggggcgggagcuacaucgcccuggacuccggcaaggggagcugggacugcaucaugaccuccuaccaguaccucgugauccagaacaccaccugggaggaccacugccaguucagccgccccucccccaucggcuaccuggggcugcucagccagcggacgcgcgacaucuacaucagccggcgccugcugggcaccuucaccuggacccucuccgacagcgagggcaacgagacgcccgggggcuacugccugacccgguggaugcugaucgaggccgagcucaagugcuucgggaacaccgccguggccaagugcaacgagaagcacgacgaggaguucugcgacaugcugcgccuguucgacuucaacaagcaggcgauccggcgccucaagaccgaggcccagauguccauccagcugaucaacaaggccgucaacgcccugaucaacgaccagcucaucaugaagaaccaccuccgggacaucaugggcauccccuacugcaacuacagcaaguacugguaccugaaccacacggugaccgggaagaccucccugccccgcugcuggcuggugagcaacggcuccuaccugaacgagacccacuucagcgacgacaucgagcagcaggccgacaacaugaucacggagcuccugcagaaggaguacaucgaccggcagggcaagaccccgcuggggcucgucgaccuguucguguucuccaccagcuucuaccugaucuccaucuuccugcaccucgugaagaucccgacccaccgccacaucacgggcaagcccugccccaagccccaccggcugaaccacauggggaucugcagcugcggccuguacaagcacccggggguccccgugaaguggaagcgcugaggacuaguuauaagacugacuagcccgaugggccucccaacgggcccuccuccccuccuugcaccgagauuaauaaaaaaaaaaaaaaaaaaaaaaaaaaaaaaaaaaaaaaaaaaaaaaaaaaaaaaaaaaaaaaaaaaaaaaaaaaaaaaaaaaaaaaaaaaaaaaaaaaaa

SEQ ID NO: 15123 - RNA, 1662 nt, Artificial Sequence
  mRNA product Design i-3 (A100) comprising derived and/or modified sequence from LASV(Lassa virus/H.sapiens-wt/NGA/2016/ISTH_0009;Clade II)__AVO03571__GPC (opt1)
aggagaaagcuuaccaugggccagaucaucaccuucuuccaggaggugccccacgucaucgaggaggugaugaacaucgugcugaucgcccucagccugcuggccauccucaaggggaucuacaacgucgcgaccugcggccugcuggggcucguguccuuccugcugcucugcggccgcagcugcuccacgaccuacaaggggguguacgagcugcagacccuggagcucgacauggccagccugaacaugaccaugccgcuguccugcacgaagaacaacagccaccacuacaucauggucggcaacgagaccggccucgagcugacccugaccaacacguccaucaucaaccacaaguucugcaaccucagcgacgcccacaagaagaaccuguacgaccacgcccugauguccaucaucagcaccuuccaccucuccauccccaacuucaaccaguacgaggccaugagcugcgacuucaacgggggccggaucuccgugcaguacaaccugagccacuccuacgcgguggacgccgccaaccacugcgggaccaucgccaacggcguccugcagaccuucaugcgcauggcguggggcgggagcuacaucgcccucgacuccggcaaggggagcugggacugcaucaugacguccuaccaguaccugaucauccagaacaccaccugggaggaccacugccaguucagccggcccagccccaucggcuaccuggggcuccugucccagcgcacccgggacaucuacaucagccgccggcugcucggcacguucaccuggacccuguccgacagcgagggcaacgagacccccgggggcuacugccugacgcgcuggaugcucaucgaggccgagcugaagugcuucgggaacaccgccguggccaagugcaacgagaagcacgacgaggaguucugcgacaugcugcggcuguucgacuucaacaagcaggcgauccgccggcugaagaccgaggcccagauguccauccagcugaucaacaaggccgugaacgcccucaucaacgaccagcugaucaugaagaaccaccuccgcgacaucaugggcaucccguacugcaacuacagcaaguacugguaccucaaccacaccgucacggggaagaccucccugccccggugcuggcuggugagcaacggcuccuaccucaacgagacccacuucagcgacgacaucgagcagcaggccgacaacaugaucaccgagcugcugcagaaggaguacaucgaccgccagggcaagacgccccucgggcugguggaccuguucgucuucuccaccagcuucuaccugaucuccaucuuccuccaccuggugaagaucccgacccaccggcacaucaccggcaagcccugccccaagccccaccgccugaaccacauggggaucugcagcugcggccucuacaaccacccgggggugcccgucaaguggaagcggugaggacuaguuauaagacugacuagcccgaugggccucccaacgggcccuccuccccuccuugcaccgagauuaauaaaaaaaaaaaaaaaaaaaaaaaaaaaaaaaaaaaaaaaaaaaaaaaaaaaaaaaaaaaaaaaaaaaaaaaaaaaaaaaaaaaaaaaaaaaaaaaaaaaa

SEQ ID NO: 15124 - RNA, 1662 nt, Artificial Sequence
  mRNA product Design i-3 (A100) comprising derived and/or modified sequence from LASV(Lassa virus/H.sapiens-wt/NGA/2016/ISTH_0017;Clade II)__AVO03567__GPC (opt1)
aggagaaagcuuaccaugggccagaucaucaccuucuuccaggaggugccccacgucaucgaggaggugaugaacaucgugcugaucgcccucagccugcuggccauccucaaggggaucuacaacgucgcgaccugcggccuguucgggcugguguccuuccuccugcugugcggccgcagcugcuccacgaccuacaaggggguguacgagcuccagacccuggagcuggacauggccagccucaacaugaccaugccgcuguccugcacgaagaacaacagccaccacuacaucauggucggcaacgagaccggccuggagcucacccugaccaacacguccaucaucaaccacaaguucugcaaccugagcgacgcccacaagaagaaccucuacgaccacgcccugauguccaucaucagcaccuuccaccuguccauccccaacuucaaccaguacgaggccaugagcugcgacuucaacgggggcaagaucuccgugcaguacaaccucagccacaccuacgcgaucgacgccgccaaccacugcgggaccaucgccaacggcgugcugcagacguucaugcggauggcguggggcggguccuacaucgcccuggacagcggcaagggguccugggacugcaucaugaccagcuaccaguaccucaucauccagaacaccaccugggaggaccacugccaguucucccgccccagccccaucggcuaccuggggcugcucagccagcggacgcgcgacaucuacaucucccggcgccugcugggcaccuucaccuggacccucagcgacuccgagggcaacgagacgcccgggggcuacugccugacccgguggaugcugaucgaggccgagcucaagugcuucgggaacaccgccgucgccaagugcaacgagaagcacgacgaggaguucugcgacaugcugcgccuguucgacuucaacaagcaggcgauccggcgccucaagaccgaggcccagaugagcauccagcugaucaacaaggccgugaacgcccugaucaacgaccagcucaucaugaagaaccaccuccgggacaucaugggcauccccuacugcaacuacuccaaguacugguaccugaaccacacggugaccgggaagaccagccugccccgcugcuggcuggucuccaacggcagcuaccugaacgagacccacuucuccgacgacaucgagcagcaggccgacaacaugaucacggagcuccugcagaaggaguacauggaccggcagggcaagaccccgcuggggcucguggaccuguucguguucagcaccuccuucuaccugaucagcaucuuccugcaccucguccgcaucccgacccaccggcacgugaucggcaagcccugccccaagccccaccgccugaaccacauggggaucugcuccugcggccuguacaagcacccgggggugcccgucaaguggaagcggugaggacuaguuauaagacugacuagcccgaugggccucccaacgggcccuccuccccuccuugcaccgagauuaauaaaaaaaaaaaaaaaaaaaaaaaaaaaaaaaaaaaaaaaaaaaaaaaaaaaaaaaaaaaaaaaaaaaaaaaaaaaaaaaaaaaaaaaaaaaaaaaaaaaa

SEQ ID NO: 15125 - RNA, 1662 nt, Artificial Sequence
  mRNA product Design i-3 (A100) comprising derived and/or modified sequence from LASV(Lassa virus/H.sapiens-wt/NGA/2018/ISTH_0959;Clade II)__AVV65099__GPC (opt1)
aggagaaagcuuaccaugggccagaucaucaccuucuuccaggaggugccccacgucaucgaggaggugaugaacaucgugcugaucgcccucagccugcuggccauccucaaggggaucuacaacgucgugaccugcggccuguucgggcugguguccuuccuccugcugugcggccgcagcugcuccacgaccuacaagggggucuacgagcuccagacccuggagcuggacauggcgagccucaacaugaccaugccgcuguccugcacgaagaacaacagccaccacuacaucauggugggcaacgagaccggccuggagcucacccugaccaacacguccaucaucaaccacaaguucugcaaccugagcgacgcccacaagaagaaccucuacgaccacgcccugauguccaucaucagcaccuuccaccuguccauccccaacuucaaccaguacgaggccaugagcugcgacuucaacgggggcaagaucuccgugcaguacaaccucagccacgccuacgcgaucgacgccgccaaccacugcgggaccaucgccaacggcguccugcagaccuucaugcggauggcguggggcggguccuacaucgcccuggacagcggcaagggguccugggacugcaucaugacgagcuaccaguaccucaucauccagaacaccaccugggaggaccacugccaguucucccgccccagccccaucggcuaccuggggcugcucagccagcggacccgcgacaucuacaucucccggcgccugcugggcacguucaccuggacccucagcgacuccgagggcaacgagacccccgggggcuacugccugacgcgguggaugcugaucgaggccgagcucaagugcuucgggaacaccgccguggccaagugcaacgagaagcacgacgaggaguucugcgacaugcugcgccuguucgacuucaacaagcaggcgauccggcgccucaagaccgaggcccagaugagcauccagcugaucaacaaggccgugaacgcccugaucaacgaccagcucaucaugaagaaccaccuccgggacaucaugggcaucccguacugcaacuacuccaaguacugguaccugaaccacaccgucacggggaagaccagccugccccgcugcuggcugguguccaacggcagcuaccugaacgagacccacuucuccgacgacaucgagcagcaggccgacaacaugaucaccgagcuccugcagaaggaguacaucgaccggcagggcaagacgccccuggggcucguggaccuguucgucuucagcaccuccuucuaccugaucagcaucuuccugcaccucgugaagaucccgacccaccgccacgugaucggcaagcccugccccaagccccaccggcugaaccacauggggaucugcuccugcggccuguacaagcacccggggguccccgugaaguggaagcgcugaggacuaguuauaagacugacuagcccgaugggccucccaacgggcccuccuccccuccuugcaccgagauuaauaaaaaaaaaaaaaaaaaaaaaaaaaaaaaaaaaaaaaaaaaaaaaaaaaaaaaaaaaaaaaaaaaaaaaaaaaaaaaaaaaaaaaaaaaaaaaaaaaaaa

SEQ ID NO: 15126 - RNA, 1662 nt, Artificial Sequence
  mRNA product Design i-3 (A100) comprising derived and/or modified sequence from LASV(LASV003-NIG-2008;Clade II)__AIT17580__GPC (opt1)
aggagaaagcuuaccaugggccagaucaucaccuucuuccaggaggugccccacgucaucgaggaggugaugaacaucgugcugaucgcccucagccugcuggccauccucaaggggaucuacaacgucgcgaccugcggccuguucgggcugguguccuuccuccugcugugcggccgcagcugcuccacgaccuacaaggggguguacgagcuccagacccuggagcuggacauggccagccucaacaugaccaugccgcuguccugcacgaagaacaacagccaccacuacaucauggucggcaacgagaccggccuggagcucacccugaccaacacguccaucaucaaccacaaguucugcaaccugagcgacgcccacaagaagaaccucuacgaccacgcccugauguccaucaucagcaccuuccaccuguccauccccaacuucaaccaguacgaggccaugagcugcgacuucaacgggggcaagaucuccgugcaguacaaccucagccacaccuacgcgguggacgccgccaaccacugcgggaccaucgccaacggcguccugcagacguucaugcggauggcguggggcggguccuacaucgcccuggacagcggcaagggguccugggacugcaucaugaccagcuaccaguaccucaucauccagaacaccaccugggaggaccacugccaguucucccgccccagccccaucggcuaccuggggcugcucagccagcggacgcgcgacaucuacaucucccggcgccugcugggcaccuucaccuggacccucagcgacuccgagagcaacgagacgccgggcggguacugccugacccgguggaugcugaucgaggccgagcucaagugcuucggcaacaccgccguggccaagugcaacgagaagcacgacgaggaguucugcgacaugcugcgccuguucgacuucaacaagcaggcgauccggcgccucaaggccgaggcccagauguccauccagcugaucaacaaggccgugaacgcccugaucaacgaccagcucaucaugaagaaccaccuccgggacaucauggggauccccuacugcaacuacagcaaguacugguaccugaaccacaccgucacgggccgcaccucccugccccggugcuggcuggugagcaacggguccuaccugaacgagacccacuucagcgacgacaucgagcagcaggcggacaacaugaucaccgagcuccugcagaaggaguacauggaccgccagggcaagacgccccugggccucguggaccuguucgucuucuccaccagcuucuaccugaucuccaucuuccugcaccucgugaagaucccgacccaccggcacgugaucgggaagcccugccccaagccccaccgccugaaccacaugggcaucugcagcugcgggcuguacaagcacccgggcguccccgugaaguggaagcggugaggacuaguuauaagacugacuagcccgaugggccucccaacgggcccuccuccccuccuugcaccgagauuaauaaaaaaaaaaaaaaaaaaaaaaaaaaaaaaaaaaaaaaaaaaaaaaaaaaaaaaaaaaaaaaaaaaaaaaaaaaaaaaaaaaaaaaaaaaaaaaaaaaaa

SEQ ID NO: 15127 - RNA, 1662 nt, Artificial Sequence
  mRNA product Design i-3 (A100) comprising derived and/or modified sequence from LASV(LASV035-NIG-2009;Clade II)__AIT17588__GPC (opt1)
aggagaaagcuuaccaugggccagaucaucaccuucuuccaggaggugccccacgucaucgaggaggugaugaacaucgugcugaucgcccucagccugcuggccauccucaaggggaucuacaacgucgcgaccugcggccuguucgggcugguguccuuccuccugcugugcggccgcagcugcuccacgaccuacaaggggguguacgagcuccagacccuggagcuggacauggccagccucaacaugaccaugccgcuguccugcacgaagaacaacagccaccacuacaucauggucggcaacgagaccggccuggagcucacccugaccaacacguccaucaucaaccacaaguucugcaaccugagcgacgcccacaagaagaaccucuacgaccacgcccugauguccaucaucagcaccuuccaccuguccauccccaacuucaaccaguacgaggccaugagcugcgacuucaacgggggcaagaucuccgugcaguacaaccucagccacgcguacgccguggacgccgccaaccacugcgggaccaucgcgaacggcguccugcagaccuucaugcggauggccuggggcggguccuacaucgcccuggacagcggcaagggguccugggacugcaucaugacgagcuaccaguaccucaucauccagaacaccaccugggaggaccacugccaguucucccgccccagccccaucggcuaccuggggcugcucagccagcggacccgcgacaucuacaucucccggcgccugcugggcacguucaccuggacccucagcgacuccgagggcaacgagacccccgggggcuacugccugacgcgguggaugcugaucgaggccgagcucaagugcuucgggaacaccgccguggcgaagugcaacgagaagcacgacgaggaguucugcgacaugcugcgccuguucgacuucaacaagcaggccauccggcgccucaaggccgaggcccagaugagcauccagcugaucaacaaggccgugaacgcgcugaucaacgaccagcucaucaugaagaaccaccuccgggacaucaugggcauccccuacugcaacuacuccaaguacugguaccugaaccacaccgucaccgggaagacgagccugccccgcugcuggcugguguccaacggcagcuaccugaacgagacccacuucuccgacgacaucgagcagcaggccgacaacaugaucaccgagcuccugcagaaggaguacaucgaccggcagggcaagaccccgcuggggcucguggaccuguucgucuucagcacguccuucuaccugaucagcaucuuccugcaccucgugaagaucccgacccaccgccacgugaucggcaagcccugccccaagccccaccggcugaaccacauggggaucugcuccugcggccuguacaagcacccggggguccccgugaaguggaagcgcugaggacuaguuauaagacugacuagcccgaugggccucccaacgggcccuccuccccuccuugcaccgagauuaauaaaaaaaaaaaaaaaaaaaaaaaaaaaaaaaaaaaaaaaaaaaaaaaaaaaaaaaaaaaaaaaaaaaaaaaaaaaaaaaaaaaaaaaaaaaaaaaaaaaa

SEQ ID NO: 15128 - RNA, 1662 nt, Artificial Sequence
  mRNA product Design i-3 (A100) comprising derived and/or modified sequence from LASV(LASV1000-NIG-2009;Clade II)__AIT17782__GPC (opt1)
aggagaaagcuuaccaugggccagaucaucaccuucuuccaggaggugccccacgucaucgaggaggugaugaacaucgugcugaucgcccucagccugcuggccauccucaaggggaucuacaacgucgcgaccugcggccuguucgggcugguguccuuccuccugcugugcggccgcagcugcuccacgaccuacaaggggguguacgagcuccagacccuggagcuggacauggccagccucaacaugaccaugccgcuguccugcacgaagaacaacagccaccacuacaucauggucggcaacgagaccggccuggagcucacccugaccaacacguccaucaucaaccacaaguucugcaaccugagcgacgcccacaagaagaaccucuacgaccacgcccugauguccaucaucagcaccuuccaccuguccauccccaacuucaaccaguacgaggccaugagcugcgacuucaacgggggcaagaucuccgugcaguacaaccucagccacaccuacgcgguggacgccgccaaccacugcgggaccaucgccaacggcguccugcagacguucaugcggauggcguggggcggguccuacaucgcccuggacagcggcaagggguccugggacugcaucaugaccagcuaccaguaccucaucauccagaacaccaccugggaggaccacugccaguucucccgccccagccccaucggcuaccuggggcugcucagccagcggacgcgcgacaucuacaucucccggcgccugcugggcaccuucaccuggacccucagcgacuccgagggcaacgagacgcccgggggcuacugccugacccgguggaugcugaucgaggccgagcucaagugcuucgggaacaccgccguggccaagugcaacgagaagcacgacgaggaguucugcgacaugcugcgccuguucgacuucaacaagcaggcgaucaagcggcucaagaccgaggcccagaugagcauccagcugaucaacaaggccgugaacgcccugaucaacgaccagcucaucaugaagaaccaccuccgcgacaucaugggcauccccuacugcaacuacuccaaguacugguaccugaaccacacggucaccgggaagaccagccugccccggugcuggcugguguccaacggcagcuaccugaacgagacccacuucuccgacgacaucgagcagcaggccgacaacaugaucacggagcuccugcagaaggaguacaucgaccgccagggcaagaccccgcuggggcucguggaccuguucgucuucagcaccuccuucuaccugaucagcaucuuccugcaccucgugaagaucccgacccaccggcacguggucggcaagcccugccccaagccccaccgccugaaccacauggggaucugcuccugcggccuguacaagcacccgggggugcccgugaaguggaagcggugaggacuaguuauaagacugacuagcccgaugggccucccaacgggcccuccuccccuccuugcaccgagauuaauaaaaaaaaaaaaaaaaaaaaaaaaaaaaaaaaaaaaaaaaaaaaaaaaaaaaaaaaaaaaaaaaaaaaaaaaaaaaaaaaaaaaaaaaaaaaaaaaaaaa

SEQ ID NO: 15129 - RNA, 1662 nt, Artificial Sequence
  mRNA product Design i-3 (A100) comprising derived and/or modified sequence from LASV(LASV221-NIG-2010;Clade II)__AIT17624__GPC (opt1)
aggagaaagcuuaccaugggccagaucaucaccuucuuccaggaggugccccacgucaucgaggaggugaugaacaucgugcugaucgcccucagccugcuggccauccucaaggggaucuacaacgucgcgaccugcggccuguucgggcugguguccuuccuccugcugugcggccgcagcugcuccacgaccuacaaggggguguacgagcuccagacccuggagcuggacauggccagccucaacaugaccaugccgcuguccugcacgaagaacaacagccaccacuacaucauggucggcaacgagaccggccuggagcucacccugaccaacacguccaucaucaaccacaaguucugcaaccugagcgacgcccacaagaagaaccucuacgaccacgcccugauguccaucaucagcaccuuccaccuguccauccccaacuucaaccaguacgaggccaugagcugcgacuucaacgggggcaagaucuccgugcaguacaaccucagccacaccuacgcgaucgacgccgccaaccacugcgggaccaucgccaacggcgugcugcagacguucaugcggauggcguggggcggguccuacaucgcccuggacagcggcaagggguccugggacugcaucaugaccagcuaccaguaccucaucauccagaacaccaccugggaggaccacugccaguucucccgccccagccccaucggcuaccuggggcugcucagccagcggacgcgcgacaucuacaucucccggcgccugcugggcaccuucaccuggacccucagcgacuccgagggcaacgagacgcccgggggcuacugccugacccgguggaugcugaucgaggccgagcucaagugcuucgggaacaccgccgucgccaagugcaacgagaagcacgacgaggaguucugcgacaugcugcgccuguucgacuucaacaagcaggcgauccggcgccucaagaccgaggcccagaugagcauccagcugaucaacaaggccgugaacgcccugaucaacgaccagcucaucaugaagaaccaccuccgggacaucaugggcauccccuacugcaacuacuccaaguacugguaccugaaccacacggugaccgggaagaccagccugccccgcugcuggcuggucuccaacggcagcuaccugaacgagacccacuucuccgacgacaucgagcagcaggccgacaacaugaucacggagaugcuccagaaggaguacauggaccggcagggcaagaccccgcuggggcugguggaccucuucguguucagcaccuccuucuaccugaucagcaucuuccugcaccuggucaagaucccgacccaccgccacgugaucggcaagcccugccccaagccccaccggcucaaccacauggggaucugcuccugcggccuguacaagcacccgggggugcccgucaaguggaagcgcugaggacuaguuauaagacugacuagcccgaugggccucccaacgggcccuccuccccuccuugcaccgagauuaauaaaaaaaaaaaaaaaaaaaaaaaaaaaaaaaaaaaaaaaaaaaaaaaaaaaaaaaaaaaaaaaaaaaaaaaaaaaaaaaaaaaaaaaaaaaaaaaaaaaa

SEQ ID NO: 15130 - RNA, 1662 nt, Artificial Sequence
  mRNA product Design i-3 (A100) comprising derived and/or modified sequence from LASV(LASV237-NIG-2010;Clade II)__AIT17638__GPC (opt1)
aggagaaagcuuaccaugggccagaucaucaccuucuuccaggaggugccccacgucaucgaggaggugaugaacaucgugcugaucgcccucagccugcuggccauccucaaggggaucuacaacgucgcgaccugcggccuguucgggcugguguccuuccuccugcugugcggccgcagcugcuccacgaccuacaaggggguguacgagcuccagacccuggagcuggacauggccagccucaacaugaccaugccgcuguccugcacgaagaacaacagccaccacuacaucauggucggcaacgagaccggccuggagcucacccugaccaacacguccaucaucaaccacaaguucugcaaccugagcgacgcccacaagaaggaccucuacgaccacgcccugauguccaucaucagcaccuuccaccuguccauccccaacuucaaccaguacgaggccaugagcugcgacuucaacgggggcaagaucuccgugcaguacaaccucagccacaccuacgcgguggacgccgccaaccacugcgggaccaucgccaacggcguccugcagacguucaugcggauggcguggggcggguccuacaucgcccuggacagcggcaagggguccugggacugcaucaugaccagcuaccaguaccucaucauccagaacaccaccugggaggaccacugccaguucucccgccccagccccaucggcuaccuggggcugcucagccagcggacgcgcgacaucuacaucucccggcgccugcugggcaccuucaccuggacccucagcgacuccgagggcaacgagacgcccgggggcuacugccugacccgguggaugcugaucgaggccgagcucaagugcuucgggaacaccgccguggccaagugcaacgagaagcacgacgaggaguucugcgacaugcugcgccuguucgacuucaacaagcaggcgauccggcgccucaagaccgaggcccagaugagcauccagcugaucaacaaggccgugaacgcccugaucaacgaccagcucaucaugaagaaccaccuccgggacaucaugggcauccccuacugcaacuacuccaaguacugguaccugaaccacacggucaccgggaagaccagccugccccgcugcuggcugguguccaacggcagcuaccugaacgagacccacuucuccgacgacaucgagcagcaggccgacaacaugaucacggagcuccugcagaaggaguacauggaccggcagggcaagaccccgcuggggcucguggaccuguucgucuucagcaccuccuucuaccugaucagcaucuuccugcaccucaucaagaucccgacccaccgccacaucacgggcaagcccugccccaagccccaccggcugaaccacauggggaucugcuccugcggccuguacaagcacccgggggugcccgugaaguggaagcgcugaggacuaguuauaagacugacuagcccgaugggccucccaacgggcccuccuccccuccuugcaccgagauuaauaaaaaaaaaaaaaaaaaaaaaaaaaaaaaaaaaaaaaaaaaaaaaaaaaaaaaaaaaaaaaaaaaaaaaaaaaaaaaaaaaaaaaaaaaaaaaaaaaaaa

SEQ ID NO: 15131 - RNA, 1662 nt, Artificial Sequence
  mRNA product Design i-3 (A100) comprising derived and/or modified sequence from LASV(LASV253-NIG-2011;Clade II)__AIT17670__GPC (opt1)
aggagaaagcuuaccaugggccagaucaucaccuucuuccaggaggugccccacgucaucgaggaggugaugaacaucgugcugaucgcccucagccugcuggccauccucaaggggaucuacaacgucgcgaccugcggccuguucgggcugguguccuuccuccugcugugcggccgcagcugcuccacgaccuacaaggggguguacgagcuccagacccuggagcuggacauggccagccucaacaugaccaugccgcuguccugcacgaagaacaacagccaccacuacaucauggucggcaacgagaccggccuggagcucacccugaccaacacguccaucaucaaccacaaguucugcaaccugagcgacgcccacaagaagaaccucuacgaccacgcccugauguccaucaucagcaccuuccaccuguccauccccaacuucaaccaguacgaggccaugagcugcgacuucaacgggggcaagaucuccgugcaguacaaccucagccacaccuacgcgguggacgccgccaaccacugcgggaccaucgccaacggcguccugcagacguucaugcggauggcguggggcggguccuacaucgcccuggacagcggcaagggguccugggacugcaucaugaccagcuaccaguaccucaucauccagaacaccaccugggaggaccacugccaguucucccgccccagccccaucggcuaccuggggcugcucagccagcggacgcgcgacaucuacaucucccggcgccugcugggcaccuucaccuggacccucagcgacuccgagggcaacgagacgcccgggggcuacugccugacccgguggaugcugaucgaggccgagcucaagugcuucgggaacaccgccguggccaagugcaacgagaagcacgacgaggaguucugcgacaugcugcgccuguucgacuucaacaagcaggcgauccggcgccucaaggccgaggcccagaugagcauccagcugaucaacaaggccgugaacgcccugaucaacgaccagcucaucaugaagaaccaccuccgggacaucaugggcaucccguacugcaacuacuccaaguacugguaccugaaccacaccgucacggggcgcaccagccugccccggugcuggcugguguccaacggcagcuaccugaacgagacccacuucuccgacgacaucgagcagcaggcggacaacaugaucaccgagcuccugcagaaggaguacaucgaccgccagggcaagacgccccuggggcucguggaccuguucgucuucagcaccuccuucuaccugaucagcaucuuccugcaccucgugaagaucccgacccaccggcacaucaucggcaagcccugccccaagccccaccgccugaaccacauggggaucugcuccugcggccuguacaagcacccgggggugcccgucaaguggaagcggugaggacuaguuauaagacugacuagcccgaugggccucccaacgggcccuccuccccuccuugcaccgagauuaauaaaaaaaaaaaaaaaaaaaaaaaaaaaaaaaaaaaaaaaaaaaaaaaaaaaaaaaaaaaaaaaaaaaaaaaaaaaaaaaaaaaaaaaaaaaaaaaaaaaa

SEQ ID NO: 15132 - RNA, 1662 nt, Artificial Sequence
  mRNA product Design i-3 (A100) comprising derived and/or modified sequence from LASV(LASV254-NIG-2011;Clade II)__AIT17674__GPC (opt1)
aggagaaagcuuaccaugggccagaucaucaccuucuuccaggaggugccccacgucaucgaggaggugaugaacaucgugcugaucgcccucagccugcuggccauccucaaggggaucuacaacgucgcgaccugcggccuguucgggcugguguccuuccuccugcugugcggccgcagcugcuccacgaccuacaaggggguguacgagcuccagacccuggagcuggacaugaccaaccucaacaugacgaugccgcugagcugcaccaagaacaacucccaccacuacaucauggucggcaacgagaccggccuggagcucacccugacgaacaccagcaucaucaaccacaaguucugcaaccuguccgacgcccacaagaagaaccucuacaaccacgcccugaugagcaucaucuccaccuuccaccugagcauccccaacuucaaccaguacgaggccauguccugcgacuucaacgggggcaagaucagcgugcaguacaaccucucccacagcuacgccguggacgcggccaaccacugcgggaccaucgccaacggcguccugcagacguucaugcggauggccuggggcggguccuacaucgcgcuggacagcggcaaggggaacugggacugcaucaugaccuccuaccaguaccucaucauccagaacaccaccugggaggaccacugccaguucagccgccccucccccaucggcuaccuggggcugcucagccagcggacgcgcgacaucuacaucagccggcgccugcugggcaccuucaccuggacccucuccgacagcgagggcaacgagacgcccgggggcuacugccugacccgguggaugcugaucgaggccgagcucaagugcuucgggaacaccgccguggccaagugcaacgagaagcacgacgaggaguucugcgacaugcugcgccuguucgacuucaacaagcaggccauccggcgccucaagaccgaggcgcaggccaacauccagcugaucaacaaggccgugaacgcccugaucaacgaccagcucaucaugaagaaccaccuccgggacaucaugggcauccccuacugcaacuacuccaaguacugguaccugaaccacacggucaccgggaagaccagccugccccgcugcuggcugguguccaacggcagcuaccugaacgagacccacuucuccgacgacaucgagcagcaggccgacaacaugaucacggagcuccugcagaaggaguacauggaccggcagggcaagaccccgcuggggcucguggaccuguucgucuucagcaccuccuucuaccugaucagcaucuuccugcaccucgugaagaucccgacccaccgccacgugaucggcaagcccugccccaagccccaccggcugaaccacauggggaucugcuccugcggccuguacaagcacccggggguccccgugaaguggaagcgcugaggacuaguuauaagacugacuagcccgaugggccucccaacgggcccuccuccccuccuugcaccgagauuaauaaaaaaaaaaaaaaaaaaaaaaaaaaaaaaaaaaaaaaaaaaaaaaaaaaaaaaaaaaaaaaaaaaaaaaaaaaaaaaaaaaaaaaaaaaaaaaaaaaaa

SEQ ID NO: 15133 - RNA, 1662 nt, Artificial Sequence
  mRNA product Design i-3 (A100) comprising derived and/or modified sequence from LASV(Nig08-A19;Clade III)__ADU56618__GPC (opt1)
aggagaaagcuuaccaugggccagaucgugaccuucuuccaggaggucccccacgugaucgaggaggugaugaacaucguccugaucgcccucagcauccuggccauccugaaggggcucuacaacaucgcgaccugcggccugaucgggcuggugacguuccuccugcuguccggccgcagcugcuccaugaccuacaaggggguguacgagcuccagacccuggagcugaacaugaacacccucaacaugacgaugccgcugagcugcaccaagaacaacucccaccacuacaucauggucggcaacgagaccggccuggagcucacccugacgaacaccagccugcuccaccacaaguucugcaaccuguccgacgcccacaagaagaaccuguacgaccacacccucaugagcaucaucuccaccuuccaccugagcauccccaacuucaaccaguacgaggccauguccugcgacuucaacgggggcaagaucacggugcaguacaaccugagccacuccuacgccaucgacgccgcgaaccacugcgggaccguggccaacggcguccuccagaccuucaugcggauggccuggggcgggagcuacaucgcccuggacuccggccgcgggaagugggacugcaucaugaccagcuaccaguaccugaucauccagaacacgaccugggaggaccacugccaguucucccggcccagccccaucggcuaccucgggcugcugucccagcgcacccgggacaucuacaucagccgccggcuccugggcaccuucacguggacccugagcgacuccgagggcaacgagacccccgggggcuacugccucacccgcuggaugcugaucgaggcggagcugaagugcuucgggaacacggccguggccaagugcaacgagaagcacgacgaggaguucugcgacaugcuccggcuguucgacuucaacaagcaggccauccgccggcugaaggccgaggcgcagaugagcauccagcucaucaacaaggccgugaacgcccugaucaacgaccagcugaucaugaagaaccaccuccgcgacaucaugggcauccccuacugcaacuacuccaaguacugguaccugaaccacaccagcaccgggcggaccucccugccccgcugcuggcucgucagcaacggcuccuaccugaacgagacgcacuucagcgacgacaucgagcagcaggccgacaacaugaucaccgagaugcugcagaaggaguaccucgaccggcagggcaagaccccgcuggggcugguggaccuguucguguucuccaccagcuucuaccucaucuccaucuuccugcaccuggucaagaucccgacgcaccgccacaucgugggcaagcccugccccaagccccaccggcucaaccacauggggaucugcagcugcggccuguacaagcagccgggggugcccguccgcuggaagcggugaggacuaguuauaagacugacuagcccgaugggccucccaacgggcccuccuccccuccuugcaccgagauuaauaaaaaaaaaaaaaaaaaaaaaaaaaaaaaaaaaaaaaaaaaaaaaaaaaaaaaaaaaaaaaaaaaaaaaaaaaaaaaaaaaaaaaaaaaaaaaaaaaaaa

SEQ ID NO: 15134 - RNA, 1665 nt, Artificial Sequence
  mRNA product Design i-3 (A100) comprising derived and/or modified sequence from LASV(G1180-SLE-2010;Clade IV)__AIT17168__GPC (opt1)
aggagaaagcuuaccaugggccagaucgugaccuucuuccaggaggucccccacgugaucgaggaggugaugaacaucguccugaucgcccucagcauccuggccgugcugaaggggcucuacaacuucgcgaccugcggccugguggggcugcucaccuuccugcugcucugcggccgcuccugcaccgccagccgguacaagggggucuacgagcugcagacccuggagcucaacauggagacccugaacaugacgaugccgcuguccugcaccaagaacaacagccaccacuacaucauggugggcaacgagaccggccucgagcugacccugacgaacaccuccaucaucaaccacaaguucugcaaccucagcgacgcccacaagaagaaccuguacgaccacgcccugauguccaucaucagcaccuuccaccucuccauccccaacuucaaccaguacgaggccaugagcugcgacuucaacgggggcaagaucuccgugcaguacaaccugagccacuccuacgcgggggacgccgccaaccacugcggcaccgucgccaacggggugcugcagacguucaugcgcauggcguggggcggcagcuacaucgcccucgacuccgggcacggcagcugggacugcaucaugaccuccuaccaguaccugaucauccagaacaccaccugggaggaccacugccaguucagccggcccucccccaucggguaccugggccuccugagccagcgcacgcgggacaucuacaucagccgccggcugcucggcaccuucaccuggacccuguccgacagcgaggggaaggacacgccgggcggguacugccugacccgcuggaugcucaucgaggccgagcugaagugcuucggcaacaccgccguggccaagugcaacgagaagcacgacgaggaguucugcgacaugcugcggcuguucgacuucaacaagcaggcgauccagcgccugaaggccgaggcccagauguccauccagcugaucaacaaggccgucaacgcccucaucaacgaccagcugaucaugaagaaccaccuccgggacaucauggggauccccuacugcaacuacagcaaguacugguaccucaaccacaccacgaccggcaagaccucccugcccaagugcuggcuggugagcaacggcuccuaccucaacgagacccacuucagcgacgacaucgagcagcaggcggacaacaugaucacggagaugcugcagaaggaguacauggagcgccaggggaagacgccccugggccucguggaccuguucgucuucuccaccagcuucuaccugaucuccaucuuccugcaccucgugaagaucccgacccaccggcacaucgugggcaagagcugccccaagccccaccgccugaaccacauggggaucugcuccugcgggcuguacaagcagcccggcgucccggugaaguggaagcggugaggacuaguuauaagacugacuagcccgaugggccucccaacgggcccuccuccccuccuugcaccgagauuaauaaaaaaaaaaaaaaaaaaaaaaaaaaaaaaaaaaaaaaaaaaaaaaaaaaaaaaaaaaaaaaaaaaaaaaaaaaaaaaaaaaaaaaaaaaaaaaaaaaaa

SEQ ID NO: 15135 - RNA, 1665 nt, Artificial Sequence
  mRNA product Design i-3 (A100) comprising derived and/or modified sequence from LASV(G1442-SLE-2011;Clade IV)__AIT17180__GPC (opt1)
aggagaaagcuuaccaugggccagaucgugaccuucuuccaggaggucccccacgugaucgaggaggugaugaacaucguccugaucgcccucagcauccuggccgugcugaaggggcucuacaacguggcgaccugcggccugaucgggcuggucacguuccuccugcugugcggccgcuccugcaccaccacccucuacaaggggguguacgagcugcagacgcuggagcucaacauggagacccugaacaugaccaugccgcugagcugcaccaagaacaacucccaccacuacauccgggugggcaacgagacgggccucgagcugacccugaccaacaccagcaucaucaaccacaaguucugcaaccucuccgacgcccacaagaagaaccuguacgaccacgcccugaugagcaucaucuccacguuccaccucagcauccccaacuucaaccaguacgaggccauguccugcgacuucaacgggggcaagaucagcguccaguacaaccugucccacagcuacgccggggacgcggccaaccacugcggcaccguggccaacggggugcugcagaccuucaugcgcauggccuggggcggcuccuacaucgcgcucgacagcgggcggggcaacugggacugcaucaugaccuccuaccaguaccugaucauccagaacacgaccugggacgaccacugccaguucagccgccccucccccaucggguaccugggccuccugagccagcggacccgcgacgucuacaucucccggcgccugcucggcaccuucacguggacccugagcgacagcgaggggaaggacaccccgggcggguacugccugacccgguggaugcucaucgaggccgagcugaagugcuucggcaacacggccguggccaagugcaacgagaagcacgacgaggaguucugcgacaugcugcgccucuucgacuucaacaagcaggccauccagcggcugaaggcggaggcccagauguccauccagcugaucaacaaggccgugaacgcccucaucaacgaccagcugaucaugaagaaccaccuccgcgacaucauggggauccccuacugcaacuacagcaaguacugguaccugaacaacaccgccaccggcaagaccucccugcccaagugcuggcugaucagcaacggcuccuaccucaacgagacgcacuucagcgacgacaucgagcaggaggcggacaacaugaucaccgagaugcugcagaaggaguacauggagcggcaggggaagacgccccugggccucgucgaccuguucguguucuccaccagcuucuaccugaucuccaucuuccugcaccucgugaagaucccgacccaccgccacaucgucggcaagagcugccccaagccccaccggcugaaccacauggggaucugcuccugcgggcuguacaagcagcccggcgugccggugcgcuggaagcggugaggacuaguuauaagacugacuagcccgaugggccucccaacgggcccuccuccccuccuugcaccgagauuaauaaaaaaaaaaaaaaaaaaaaaaaaaaaaaaaaaaaaaaaaaaaaaaaaaaaaaaaaaaaaaaaaaaaaaaaaaaaaaaaaaaaaaaaaaaaaaaaaaaaa

SEQ ID NO: 15136 - RNA, 1665 nt, Artificial Sequence
  mRNA product Design i-3 (A100) comprising derived and/or modified sequence from LASV(G3010-SLE-2013;Clade IV)__AIT17344__GPC (opt1)
aggagaaagcuuaccaugggccagaucgugaccuucuuccaggaggucccccacgugaucgaggaggugaugaacaucguccugaucgcccucagcauccuggccgugcugaaggggcucuacaacuucgcgaccugcggccugguggggcuggucacguuccuccugcugugcggccgcuccugcaccaccagccucuacaaggggguguacgagcugcagacccuggagcucaacauggagacgcugaacaugaccaugccgcuguccugcaccaagaacaacagccaccacuacaucauggugggcaacgagaccggccucgagcugacgcugaccaacaccuccaucaucaaccacaaguucugcaaccucagcgacgcccacaagaagaaccuguacaaccacgcccugauguccaucaucagcaccuuccaccucuccauccccaacuucaaccaguacgaggccaugagcugcgacuucaacgggggcaagaucuccguccaguacaaccugagccacuccuacgccggggacgcggccagccacugcggcacgguggccaacggggugcugcagaccuucaugcggauggccuggggcggcuccuacaucgcgcucgacagcggguacggcaagugggacugcaucaugaccuccuaccaguaccugaucauccagaacaccacgugggaggaccacugccaguucagccgccccucccccaucggguaccugggccuccugagccagcggacccgcgacaucuacaucagccggcgccugcucggcaccuucaccuggacgcuguccgacagcgaggggaaggacaccccgggcggguacugccugacccgguggaugcucaucgaggccgagcugaagugcuucggcaacaccgccgucgccaagugcaacgagaagcacgacgaggaguucugcgacaugcugcgccucuucgacuucaacaagcaggccauccagcggcugaagacggaggcgcagauguccauccagcugaucaacaaggccgugaacgcccucaucaacgaccagcugaucaugaagaaccaccuccgcgacaucauggggauccccuacugcaacuacagcaaguacugguaccugaaccacaccaccaccggcaagacgucccugcccaagugcuggcuggugagcaacggcuccuaccucaacgagacccacuucagcgacgacaucgagcagcaggccgacaacaugaucaccgagaugcugcagaaggaguacauggagcggcaggggaagacgccccugggccucgucgaccuguucguguucuccaccagcuucuaccugaucuccaucuuccugcaccucgugaagaucccgacccaccgccacaucgucggcaagagcugccccaagccccaccggcugaaccacauggggaucugcuccugcgggcuguacaagcagcccggcgugccggugcgcuggaagcggugaggacuaguuauaagacugacuagcccgaugggccucccaacgggcccuccuccccuccuugcaccgagauuaauaaaaaaaaaaaaaaaaaaaaaaaaaaaaaaaaaaaaaaaaaaaaaaaaaaaaaaaaaaaaaaaaaaaaaaaaaaaaaaaaaaaaaaaaaaaaaaaaaaaa

SEQ ID NO: 15137 - RNA, 1665 nt, Artificial Sequence
  mRNA product Design i-3 (A100) comprising derived and/or modified sequence from LASV(G502-SLE-2009;Clade IV)__AIT17126__GPC (opt1)
aggagaaagcuuaccaugggccagaucgugaccuucuuccaggaggucccccacgugaucgaggaggugaugaacaucguccugaucgcccucagcauccuggccgugcugaaggggcucuacaacuucgcgaccugcggccugguggggcugcucacguuccugcugcucugcggccgcuccugcaccaccgggcuguacaagggcgucuacgagcugcagacccucgagcugaacauggagacgcugaacaugaccaugccgcucagcugcaccaagaacaacucccaccacuacaucauggugggcaacgagaccgggcuggagcugacgcucaccaacaccagcaucaucaaccacaaguucugcaaccuguccgacgcccacaagaagaaccuguacgaccacgcccucaugagcaucaucuccaccuuccaccugagcauccccaacuucaaccaguacgaggccauguccugcgacuucaacggcgggaagaucagcgugcaguacaaccugucccacagcuacgccggcgacgcggccgaccacugcgggacggucgccaacggcgugcuccagaccuucaugcggauggccuggggcggguccuacaucgcgcuggacagcggccgcgggcggugggacugcaucaugaccuccuaccaguaccugaucauccagaacaccacgugggaggaccacugccaguucagccgccccucccccaucggcuaccucggccugcugagccagcggacccgcgacaucuacaucucccggcgccuccuggggaccuucaccuggacgcugagcgacagcgagggcaaggacacccccgggggcuacugccucacccgguggaugcugaucgaggccgagcugaagugcuucgggaacaccgccguggccaagugcaacgagaagcacgacgaggaguucugcgacaugcuccgccuguucgacuucaacaagcaggccauccagcggcugaaggcggaggcccagauguccauccagcucaucaacaaggccgucaacgcccugaucaacgaccagcuggugaugaagaaccaccuccgcgacaucaugggcauccccuacugcaacuacagccgguacugguaccugaaccacacgaccaccggccgcaccucccugcccaagugcuggcucgugagcaacggguccuaccugaacgagacgcacuucagcgacgacaucgagcagcaggccgacaacaugaucaccgagaugcugcagaaggaguacauggagcggcagggcaagaccccgcucgggcuggucgaccuguucguguucuccaccagcuucuaccugaucuccaucuuccuccaccuggugaagaucccgacgcaccgccacaucgucggcaagagcugccccaagccccaccggcugaaccacauggggaucugcuccugcggccucuacaagcagcccggcgugccggugaaguggaagcgcugaggacuaguuauaagacugacuagcccgaugggccucccaacgggcccuccuccccuccuugcaccgagauuaauaaaaaaaaaaaaaaaaaaaaaaaaaaaaaaaaaaaaaaaaaaaaaaaaaaaaaaaaaaaaaaaaaaaaaaaaaaaaaaaaaaaaaaaaaaaaaaaaaaaa

SEQ ID NO: 15138 - RNA, 1665 nt, Artificial Sequence
  mRNA product Design i-3 (A100) comprising derived and/or modified sequence from LASV(G733-SLE-2010;Clade IV)__AIT17154__GPC (opt1)
aggagaaagcuuaccaugggccagaucgugaccuucuuccaggaggucccccacgugaucgaggaggugaugaacaucguccugaucgcccucagcauccuggccgugcugaaggggcucuacaacuucgcgaccugcggcaucguggggcuggucuccuuccugcuccugugcggccgcagcugcacgaccucccuguacaaggggguguacgagcuccagacccuggagcugaacauggagacccucaacaugacgaugccgcugagcugcaccaagaacaacucccaccacuacaucauggugggcaacgagaccggccuggagcucacccugacgaacaccagcaucaucaaccacaaguucugcaaccuguccgacgcccacaagaagaaccucuacgaccacgcccugaugagcaucaucuccaccuuccaccugagcauccccaacuucaaccaguacgaggccauguccugcgacuucaacgggggcaagaucagcguccaguacaaccucucccacagcuacgccggggacgcggccaaccacugcggcaccaucgccaacggggugcugcagacguucaugcggauggccuggggcggcuccuacaucgcgcuggacagcgggcgcgaccggugggacugcaucaugaccuccuaccaguaccucaucauccagaacaccaccugggaggaccacugccaguucagccgccccucccccaucggcuaccuggggcugcucagccagcggacgcgcgacaucuacaucagccggcgccugcugggcaccuucaccuggacccucuccgacagcgagggcaaggacacgcccgggggcuacugccugacccgguggaugcugaucgaggccgagcucaagugcuucgggaacaccgccguggccaagugcaacgagaagcacgacgaggaguucugcgacaugcugcgccuguucgacuucaacaagcaggccauccagcggcucaaggcggaggcccagauguccauccagcugaucaacaaggccgucaacgcccugaucaacgaccagcucaucaugaagaaccaccuccgcgacaucaugggcauccccuacugcaacuacagcaaguacugguaccugaaccacaccacgaccgggaagaccucccugcccaagugcuggcuggugagcaacggcuccuaccugaacgagacccacuucagcgacgacaucgagcagcaggccgacaacaugaucacggagaugcuccagaaggaguacauggagcggcagggcaagaccccgcuggggcugguggaccucuucgucuucuccaccagcuucuaccugaucuccaucuuccugcaccuggugaagaucccgacccaccgccacguggucggcaagagcugccccaagccccaccggcucaaccacauggggaucugcuccugcggccuguacgggcagcccggcgugccggugaaguggaagcgcugaggacuaguuauaagacugacuagcccgaugggccucccaacgggcccuccuccccuccuugcaccgagauuaauaaaaaaaaaaaaaaaaaaaaaaaaaaaaaaaaaaaaaaaaaaaaaaaaaaaaaaaaaaaaaaaaaaaaaaaaaaaaaaaaaaaaaaaaaaaaaaaaaaaa

SEQ ID NO: 15139 - RNA, 1665 nt, Artificial Sequence
  mRNA product Design i-3 (A100) comprising derived and/or modified sequence from MOPV/LASV reassortant(IGS-1;Clade IV)__AFY05576__GPC (opt1)
aggagaaagcuuaccaugggccagaucgugaccuucuuccaggaggucccccacgugaucgaggaggugaugaacaucguccugaucgcccucagcgugcuggccgugcugaaggggcucuacaacuucgcgaccugcggccuggucgggcuggugacguuccuccugcugugcggccgcuccugcaccaccagccucuacaaggggguguacgagcugcagacccuggagcucaacauggagacgcugaacaugaccaugccgcuguccugcaccaagaacaacagccaccacuacaucauggucggcaacgagaccggccucgagcugacgcugaccaacaccuccaucaucaaccacaaguucugcaaccucagcgacgcccacaagaagaaccuguacgaccacgcccugauguccaucaucagcaccuuccaccucuccauccccaacuucaaccaguacgaggccaugagcugcgacuucaacgggggcaagaucuccgugcaguacaaccugagccacuccuacgccggggacgcggccaaccacugcggcacgguggccaacgggguccugcagaccuucaugcggauggccuggggcggcagcuacaucgcgcucgacuccgggcgcggcaacugggacugcaucaugaccagcuaccaguaccugaucauccagaacaccacgugggaggaccacugccaguucucccggcccagccccaucggguaccugggccuccugucccagcgcacccgggacaucuacaucagccgccggcugcucggcaccuucaccuggacgcugagcgacuccgagggggaggacaccccgggcggguacugccugacccgcuggaugcucaucgaggccgagcugaagugcuucggcaacaccgccguggccaagugcaacgagaagcacgacgaggaguucugcgacaugcugcggcuguucgacuucaacaagcaggccauccagcgccugaaggcggaggcccagaugagcauccagcugaucaacaaggccgugaacgcccucaucaacgaccagcugaucaugaagaaccaccuccgggacaucauggggauccccuacugcaacuacuccaaguacugguaccucaaccacacgaccaccggccgcaccagccugcccaagugcuggcuggucuccaacggcagcuaccucaacgagacgcacuucuccgacgacaucgagcagcaggccgacaacaugaucaccgagaugcugcagaaggaguacauggagcggcaggggaagacgccccugggccucguggaccuguucguguucagcaccuccuucuaccugaucagcaucuuccugcaccucgucaagaucccgacccaccgccacaucguggggaaguccugccccaagccccaccggcugaaccacaugggcaucugcagcugcgggcuguacaagcagcccggcgugccggucaaguggaagcgcugaggacuaguuauaagacugacuagcccgaugggccucccaacgggcccuccuccccuccuugcaccgagauuaauaaaaaaaaaaaaaaaaaaaaaaaaaaaaaaaaaaaaaaaaaaaaaaaaaaaaaaaaaaaaaaaaaaaaaaaaaaaaaaaaaaaaaaaaaaaaaaaaaaaa

SEQ ID NO: 15140 - RNA, 1665 nt, Artificial Sequence
  mRNA product Design i-3 (A100) comprising derived and/or modified sequence from LASV(LM765-SLE-2012;Clade IV)__AIT17814__GPC (opt1)
aggagaaagcuuaccaugggccagaucgugaccuucuuccaggaggucccccacgugaucgaggaggugaugaacaucguccugaucgcccucagcauccuggccgugcugaaggggcucuacaacuucgcgaccugcggccugguggggcuggucacguuccuccugcugugcggccgcuccugcaccaccagccucuacaaggggguguacgagcugcagacccuggagcucaacauggagacgcugaacaugaccaugccgcuguccugcaccaagaacaacagccaccacuacaucauggugggcaacgagaccggccucgagcugacgcugaccaacaccuccaucaucgaccacaaguucugcaaccucagcgacgcccaccggaagaaccuguacgaccacgcccugauguccaucaucagcaccuuccaccucuccauccccaacuucaaccaguacgaggccaugagcugcgacuucaacgggggcaagaucuccguccaguacaaccugagccacuccuacgccaaggacgcggccgaccacugcgggacgguggccaacggcgugcugcagaccuucaugcgcauggccuggggcgggagcuacaucgcgcucgacuccggccgggggcgcugggacugcaucaugaccagcuaccaguaccugaucauccagaacaccacgugggaggaccacugccaguucucccggcccagccccaucggcuaccuggggcuccugucccagcgcacccgggacaucuacaucagccgccggcugcucggcaccuucaccuggacgcugagcgacuccgagggcaaggacacccccgggggcuacugccugacccgcuggaugcucaucgaggccgagcugaagugcuucgggaacaccgccgucgccaagugcaacgagaagcacgacgaggaguucugcgacaugcugcggcuguucgacuucaacaagcaggccauccagcgccugaaggcggaggcccagaugagcauccagcugaucaacaaggccgugaacgcccucaucaacgaccagcugaucaugaagaaccaccuccgggacaucaugggcauccccuacugcaacuacuccaaguacugguaccucaaccacacgaccaccgggaagaccagccugcccaagugcuggcugguguccaacggcagcuaccucaacgagacgcacuucuccgacgacaucgagcagcaggccgacaacaugaucaccgagaugcugcagaaggaguacauggagcgccagggcaagaccccgcuggggcucgucgaccuguucguguucagcaccuccuucuaccugaucagcaucuuccugcaccucgugaagaucccgacgcaccggcacaucgucggcaagcccugccccaagccccaccgccugaaccacauggggaucugcuccugcggccuguacaagcagccgggggugcccgugaaguggaagcggugaggacuaguuauaagacugacuagcccgaugggccucccaacgggcccuccuccccuccuugcaccgagauuaauaaaaaaaaaaaaaaaaaaaaaaaaaaaaaaaaaaaaaaaaaaaaaaaaaaaaaaaaaaaaaaaaaaaaaaaaaaaaaaaaaaaaaaaaaaaaaaaaaaaa

SEQ ID NO: 15141 - RNA, 1665 nt, Artificial Sequence
  mRNA product Design i-3 (A100) comprising derived and/or modified sequence from LASV(LM776-SLE-2012;Clade IV)__AIT17824__GPC (opt1)
aggagaaagcuuaccaugggccagaucgugaccuucuuccaggaggucccccacgugaucgaggaggugaugaacaucguccugaucgcccucagcauccuggccgugcugaaggggcucuacaacuucgcgaccugcggccugguggggcuggucacguuccuccugcugugcggccgcuccugcaccaccagcguguacaaggggguguacgagcuccagacccuggagcugaacauggagacgcucaacaugaccaugccgcuguccugcaccaagaacaacagccaccacuacaucauggucggcaacgagaccggccuggagcucacgcugaccaacaccuccaucaucaaccacaaguucugcaaccugagcgacgcccacaagaagaaccucuacgaccacgcccugauguccaucaucagcaccuuccaccuguccauccccaacuucaaccaguacgaggccaugagcugcgacuucaacgggggcaagaucuccgugcaguacaaccucagccacuccuacgccggggacgcggccaaccacugcggcacgguggccaacgggguccugcagaccuucaugcggauggccuggggcggcagcuacaucgcgcuggacuccgggcacggcaagugggacugcaucaugaccagcuaccaguaccucaucauccagaacaccacgugggaggaccacugccaguucucccgccccagccccaucggguaccugggccugcucucccagcggacccgcgacaucuacaucagccggcgccugcugggcaccuucaccuggacgcucagcgacuccgaggggaaggacaccccgggcggguacugccugacccgguggaugcugaucgaggccgagcucaagugcuucggcaacaccgccguggccaagugcaacgagaagcacgacgaggaguucugcgacaugcugcgccuguucgacuucaacaagcaggccauccagcggcucaaggcggaggcccagaugagcauccagcugaucaacaaggccgugaacgcccugaucaacgaccagcucaucaugaagaaccaccuccgcgacaucauggggauccccuacugcaacuacuccaaguacugguaccugaaccacacgaccaccggcaagaccagccugcccaagugcuggcuggucuccaacggcagcuaccugaacgagacgcacuucuccgacgacaucgagcagcaggccgacaacaugaucaccgagaugcuccagaaggaguacauggagcggcaggggaagacgccccugggccugguggaccucuucguguucagcaccuccuucuaccugaucagcaucuuccugcaccuggucaagaucccgacccaccgccacaucguggggaaguccugccccaagccccaccggcucaaccacaugggcaucugcagcugcgggcuguacaagcagcccggcgugccgguccgcuggaagcggugaggacuaguuauaagacugacuagcccgaugggccucccaacgggcccuccuccccuccuugcaccgagauuaauaaaaaaaaaaaaaaaaaaaaaaaaaaaaaaaaaaaaaaaaaaaaaaaaaaaaaaaaaaaaaaaaaaaaaaaaaaaaaaaaaaaaaaaaaaaaaaaaaaaa

SEQ ID NO: 15142 - RNA, 1665 nt, Artificial Sequence
  mRNA product Design i-3 (A100) comprising derived and/or modified sequence from LASV(Mad39;Clade IV)__ANH09722__GPC (opt1)
aggagaaagcuuaccaugggccagaucgugaccuucuuccaggaggucccccacgugaucgaggaggugaugaacaucguccugaucgcccucagcauccuggccgugcugaaggggcucuacaacguggcgaccugcggccugaucgggcuggucacguuccuccugcugugcggccgcuccugcaccaccacccucuacaaggggguguacgagcugcaggcccuggagcucaacauggagacgcugaacaugaccaugccgcugagcugcaccaagaacaacucccaccacuacauccgggugggcaacgagaccggccucgagcugacgcugaccaacaccagccucaucaaccacaaguucugcaaccuguccgacgcccacaagaagaaccuguacgaccacgcccucaugagcaucaucuccaccuuccaccugagcauccccaacuucaaccaguacgaggccauguccugcgacuucaacgacgggaagaucagcguccaguacaaccugucccacacguacgcgggcgacaccgccaaccacugcgggaccguggccaacggcgugcuccagaccuucaugcgcauggccuggggcgggagcuacaucgcgcuggacuccggccgcgggggcugggacugcaucaugacgagcuaccaguaccugaucauccagaacaccaccugggaggaccacugccaguucucccggcccagccccaucggguaccucggccugcugucccagcggacccgcgacaucuacaucagccggcgccuccugggcacguucaccuggacccuguccgacagcgaggggaaggacaccccgggcggguacugccucacgcgguggaugcugaucgaggccgagcugaagugcuucggcaacaccgccgucgccaagugcaacgagaagcacgacgaggaguucugcgacaugcuccgccuguucgacuucaacaagcaggccauccagcggcugaaggcggaggcccagaugagcauccagcucaucaacaaggccgugaacgcccugaucaacgaccagcugaucaugaagaaccaccuccgcgacaucauggggauccccuacugcaacuacuccaaguacugguaccugaaccacaccgugaccggcaagacgagccugcccaagugcuggcucgucuccaacggcagcuaccugaacgagacccacuucuccgacgacaucgagcagcaggccgacaacaugaucaccgagaugcugcagaaggaguacauggagcggcaggggaagacgccccucggccugguggaccuguucguguucagcaccuccuucuaccugaucagcaucuuccuccaccuggucaagaucccgacccaccgccacgugguggggaagcccugccccaagccccaccggcugaaccacaugggcaucugcuccugcggguucuacaagcagccgggcguccccgugcgcuggaagcggugaggacuaguuauaagacugacuagcccgaugggccucccaacgggcccuccuccccuccuugcaccgagauuaauaaaaaaaaaaaaaaaaaaaaaaaaaaaaaaaaaaaaaaaaaaaaaaaaaaaaaaaaaaaaaaaaaaaaaaaaaaaaaaaaaaaaaaaaaaaaaaaaaaaa

SEQ ID NO: 15143 - RNA, 1665 nt, Artificial Sequence
  mRNA product Design i-3 (A100) comprising derived and/or modified sequence from LASV(Z0947-SLE-2011;Clade IV)__AIT17840__GPC (opt1)
aggagaaagcuuaccaugggccagaucgugaccuucuuccaggaggucccccacgugaucgaggaggugaugaacaucguccugaucgcccucagcauccuggccgugcugaaggggcucuacaacuucgcgaccugcggccugguggggcuggucacguuccuccugcugugcggccgcuccugcaccaucagccucuacaaggggguguacgagcugcagacccuggagcucaacauggagacccugaacaugacgaugccgcuguccugcaccaagaacaacagccaccacuacaucauggugggcaacgagaccggccucgagcugacccugacgaacaccuccaucaucaaccacaaguucugcaaccucagcgacgcccacaagaagaaccuguacgaccacgcccugauguccaucaucagcaccuuccaccucuccauccccaacuucaaccaguacgaggccaugagcugcgacuucaacgggggcaagaucuccguccaguacaaccugagccacuccuacgccggggacgcggccaaccacugcggcaccguggccaacggggugcugcagacguucaugcggauggccuggggcggcagcuacaucgcgcucgacuccgggcgcgaccggugggacugcaucaugaccagcuaccaguaccugaucauccagaacaccaccugggaggaccacugccaguucucccgccccagccccaucggcuaccuggggcuccugucccagcggacgcgcgacaucuacaucagccggcgccugcucggcaccuucaccuggacccugagcgacuccgagggcaaggacacgcccgggggcuacugccugacccgguggaugcucaucgaggccgagcugaagugcuucgggaacaccgccgucgccaagugcaacgagaagcacgacgaggaguucugcgacaugcugcgccucuucgacuucaacaagcaggccauccagcggcugaaggcggaggcccagaugagcauccagcugaucaacaaggccgugaacgcccucaucaacgaccagcugaucaugaagaaccaccuccgcgacaucaugggcauccccuacugcaacuacuccaaguacugguaccugaaccacaccacgaccgggaagaccagccugcccaagugcuggcugguguccaacggcagcuaccucaacgagacccacuucuccgacgacaucgagcagcaggccgacaacaugaucacggagaugcugcagaaggaguacauggagcggcagggcaagaccccgcuggggcucgucgaccuguucguguucagcaccuccuucuaccugaucagcaucuuccugcaccucgugaagaucccgacccaccgccacaucgucggcaagcccugccccaagccccaccggcugaaccacauggggaucugcuccugcggccuguacaagcagccgggggugcccgugaaguggaagcgcugaggacuaguuauaagacugacuagcccgaugggccucccaacgggcccuccuccccuccuugcaccgagauuaauaaaaaaaaaaaaaaaaaaaaaaaaaaaaaaaaaaaaaaaaaaaaaaaaaaaaaaaaaaaaaaaaaaaaaaaaaaaaaaaaaaaaaaaaaaaaaaaaaaaa

SEQ ID NO: 15144 - RNA, 1665 nt, Artificial Sequence
  mRNA product Design i-3 (A100) comprising derived and/or modified sequence from LASV(Josiah;Clade IV)__NP_694870__GPC (opt4)
aggagaaagcuuaccaugggccagaucgugaccuucuuccaggaggugccccacgugaucgaggaggugaugaacaucgugcugaucgcccugagcgugcuggccgugcugaagggccuguacaacuucgccaccugcggccuggugggccuggugaccuuccugcugcugugcggcagaagcugcaccaccagccuguacaagggcguguacgagcugcagacccuggagcugaacauggagacccugaacaugaccaugccccugagcugcaccaagaacaacagccaccacuacaucauggugggcaacgagaccggccuggagcugacccugaccaacaccagcaucaucaaccacaaguucugcaaccugagcgacgcccacaagaagaaccuguacgaccacgcccugaugagcaucaucagcaccuuccaccugagcauccccaacuucaaccaguacgaggccaugagcugcgacuucaacggcggcaagaucagcgugcaguacaaccugagccacagcuacgccggcgacgccgccaaccacugcggcaccguggccaacggcgugcugcagaccuucaugagaauggccuggggcggcagcuacaucgcccuggacagcggcagaggcaacugggacugcaucaugaccagcuaccaguaccugaucauccagaacaccaccugggaggaccacugccaguucagcagacccagccccaucggcuaccugggccugcugagccagagaaccagagacaucuacaucagcagaagacugcugggcaccuucaccuggacccugagcgacagcgagggcaaggacacccccggcggcuacugccugaccagauggaugcugaucgaggccgagcugaagugcuucggcaacaccgccguggccaagugcaacgagaagcacgacgaggaguucugcgacaugcugagacuguucgacuucaacaagcaggccauccagagacugaaggccgaggcccagaugagcauccagcugaucaacaaggccgugaacgcccugaucaacgaccagcugaucaugaagaaccaccugagagacaucaugggcauccccuacugcaacuacagcaaguacugguaccugaaccacaccaccaccggcagaaccagccugcccaagugcuggcuggugagcaacggcagcuaccugaacgagacccacuucagcgacgacaucgagcagcaggccgacaacaugaucaccgagaugcugcagaaggaguacauggagagacagggcaagaccccccugggccugguggaccuguucguguucagcaccagcuucuaccugaucagcaucuuccugcaccuggugaagauccccacccacagacacaucgugggcaagagcugccccaagccccacagacugaaccacaugggcaucugcagcugcggccuguacaagcagcccggcgugcccgugaaguggaagagaugaggacuaguuauaagacugacuagcccgaugggccucccaacgggcccuccuccccuccuugcaccgagauuaauaaaaaaaaaaaaaaaaaaaaaaaaaaaaaaaaaaaaaaaaaaaaaaaaaaaaaaaaaaaaaaaaaaaaaaaaaaaaaaaaaaaaaaaaaaaaaaaaaaaa

SEQ ID NO: 15145 - RNA, 1662 nt, Artificial Sequence
  mRNA product Design i-3 (A100) comprising derived and/or modified sequence from LASV(LP;Clade I)__AAF86701__GPC (opt4)
aggagaaagcuuaccaugggccagaucaucaccuucuuccaggaggugccccacgugaucgaggaggugaugaacaucgugcugaucgcccugagccugcuggccauccugaagggccuguacaacaucgccaccugcggcaucaucggccugguggccuuccuguuccugugcggcaagagcugcagccugacccugaagggcggcuacgagcugcagacccuggagcugaacauggagacccugaacaugaccaugccccugagcugcaccaagaacagcagccaccacuacaucagagugggcaacgagaccggccuggagcugacccugaccaacaccagcaucaucaaccacaaguucugcaaccugagcgacgcccacaagaagaaccuguacgaccacgcccugaugagcaucaucagcaccuuccaccugagcauccccaacuucaaccaguacgaggccaugagcugcgacuucaacggcggcaagaucagcgugcaguacaaccugagccacagcuacgccggcgacgccgccgagcacugcggcaccguggccaacggcgugcugcagaccuucaugagaauggccuggggcggcagauacaucgcccuggacagcggcaagggcaacugggacugcaucaugaccagcuaccaguaccugaucauccagaacaccaccugggaggaccacugccaguucagcagacccagccccaucggcuaccugggccugcugagccagagaaccagagacaucuacaucagcagaagacugcugggcaccuucaccuggacccugagcgacagcgagggcaacgagacccccggcggcuacugccugaccagauggaugcugaucgaggccgagcugaagugcuucggcaacaccgccguggccaagugcaacgagaagcacgacgaggaguucugcgacaugcugagacuguucgacuucaacaagcaggccaucagaagacugaaggccgaggcccagaugagcauccagcugaucaacaaggccgugaacgcccugaucaacgaccagcugaucaugaagaaccaccugagagacaucaugggcauccccuacugcaacuacagcaaguacugguaccugaaccacaccagcagcggcagaaccagccugcccaagugcuggcugaucagcaacggcagcuaccugaacgagacccaguucagcgacgacaucgagcagcaggccgacaacaugaucaccgagaugcugcagaaggaguacaucgagagacagggcaagaccccccugggccugguggacaucuucaucuucagcaccagcuucuaccugaucagcaucuuccugcaccugaucaagauccccacccacagacacaucgugggcaagcccugccccaagccccacagacugaaccacaugggcgugugcagcugcggccuguacaagcaccccggcgugcccaccaaguggaagagaugaggacuaguuauaagacugacuagcccgaugggccucccaacgggcccuccuccccuccuugcaccgagauuaauaaaaaaaaaaaaaaaaaaaaaaaaaaaaaaaaaaaaaaaaaaaaaaaaaaaaaaaaaaaaaaaaaaaaaaaaaaaaaaaaaaaaaaaaaaaaaaaaaaaa

SEQ ID NO: 15146 - RNA, 1662 nt, Artificial Sequence
  mRNA product Design i-3 (A100) comprising derived and/or modified sequence from LASV(803213;Clade II)__AAF86703__GPC (opt4)
aggagaaagcuuaccaugggccagaucaucaccuucuuccaggaggugccccacgugaucgaggaggugaugaacaucgugcugaucgcccugagccugcuggccauccugaagggcaucuacaacguggccaccugcggccuguucggccugaucagcuuccugcugcugugcggcagaagcugcagcgugaccuacaagggcguguacgagcugcagacccuggagcugaacauggccaaccugaacaugaccaugccccugagcugcaccaagaacaacagccaccacuacaucauggugggcaacgagaccggccuggagcugacccugaccaacaccagcaucaucaaccacaaguucugcaaccugagcgacgcccacaagaagaaccuguacgaccacgcccugaugagcaucaucagcaccuuccaccugagcauccccaacuucaaccaguacgaggccaugagcugcgacuucaacggcggcaagaucagcgugcaguacaaccugagccacagcuucgccguggacgccgccaaccacugcggcaccaucgccaacggcgugcugcagaccuucaugagaauggccuggggcggcagcuacaucgcccuggacagcggcaagggcaacugggacugcaucaugaccagcuaccaguaccugaucauccagaacaccaccugggaggaccacugccaguucagcagacccagccccaucggcuaccugggccugcugagccagagaaccagagacaucuacaucagcagaagacugcugggcaccuucaccuggacccugagcgacagcgagggcaacgaggcccccggcggcuacugccugaccagauggaugcugaucgaggccgagcugaagugcuucggcaacaccgccguggccaagugcaacgagaagcacgacgaggaguucugcgacaugcugagacuguucgacuucaacaagcaggccaucaagagacugaagaccgaggcccagaugagcauccagcugaucaacaaggccgugaacgcccugaucaacgaccagcugaucaugaagaaccaccugagagacaucaugggcauccccuacugcaacuacagcagauacugguaccugaaccacaccgugaccggcaagaccagccugcccagaugcuggcuggugagcaacggcagcuaccugaacgagacccacuucagcgacgacaucgagcagcaggccgacaacaugaucaccgagaugcugcagaaggaguacauggacagacagggcaagaccccccugggccugguggaccuguucguguucagcaccagcuucuaccugaucagcaucuuccugcaccuggugaagauccccacccacagacacaucgugggcaagcccugccccaagccccacagacugaaccacaugggcaucugcagcugcggccuguacaagcaccccggcgugcccgugaaguggaagagaugaggacuaguuauaagacugacuagcccgaugggccucccaacgggcccuccuccccuccuugcaccgagauuaauaaaaaaaaaaaaaaaaaaaaaaaaaaaaaaaaaaaaaaaaaaaaaaaaaaaaaaaaaaaaaaaaaaaaaaaaaaaaaaaaaaaaaaaaaaaaaaaaaaaa

SEQ ID NO: 15147 - RNA, 1662 nt, Artificial Sequence
  mRNA product Design i-3 (A100) comprising derived and/or modified sequence from LASV(GA391;Clade III)__CAA36645__GPC (opt4)
aggagaaagcuuaccaugggccagaucgugaccuucuuccaggaggugccccacgugaucgaggaggugaugaacaucgugcugaucgcccugagcauccuggccauccugaagggccuguacaacguggccaccugcggccugaucggccuggugaccuuccugcugcugagcggcagaagcugcagccugaucuacaagggcaccuacgagcugcagacccuggagcugaacauggagacccugaacaugaccaugccccugagcugcaccaagaacaacagccaccacuacaucagagugggcaacgagaccggccuggagcugacccugaccaacaccagcauccugaaccacaaguucugcaaccugagcgacgcccacaagagaaaccuguacgaccacagccugaugagcaucaucagcaccuuccaccugagcauccccaacuucaaccaguacgaggccaugagcugcgacuucaacggcggcaagaucaccgugcaguacaaccugagccacagcuucgccguggacgccgccggccacugcggcacccuggccaacggcgugcugcagaccuucaugagaauggccuggggcggcagcuacaucgcccuggacagcggcagaggcaacugggacugcaucaugaccagcuaccaguaccugaucauccagaacaccaccugggacgaccacugccaguucagcagacccagccccaucggcuaccugggccugcugagccagagaaccagagacaucuacaucagcagaagacugcugggcaccuucaccuggacccugagcgacagcgagggcaacgagacccccggcggcuacugccugaccagauggaugcugaucgaggccgagcugaagugcuucggcaacaccgccguggccaagugcaacgagaagcacgacgaggaguucugcgacaugcugagacuguucgacuucaacaagcaggccaucagaagacugaagaccgaggcccagaugagcauccagcugaucaacaaggccgugaacgcccugaucaacgaccagcugaucaugaagaaccaccugagagacaucaugggcauccccuacugcaacuacagcagauacugguaccugaaccacaccagcaccggcaagaccagccugcccagaugcuggcugaucagcaacggcagcuaccugaacgagaccaaguucagcgacgacaucgagcagcaggccgacaacaugaucaccgagaugcugcagaaggaguacaucgacagacagggcaagaccccccugggccugguggaccuguucguguucagcaccagcuucuaccugaucagcaucuuccugcaccuggugaagauccccacccacagacacaucgugggcaagcccugccccaagccccacagacugaaccacaugggcaucugcagcugcggccuguacaagcagcccggcgugcccgugagauggaagagaugaggacuaguuauaagacugacuagcccgaugggccucccaacgggcccuccuccccuccuugcaccgagauuaauaaaaaaaaaaaaaaaaaaaaaaaaaaaaaaaaaaaaaaaaaaaaaaaaaaaaaaaaaaaaaaaaaaaaaaaaaaaaaaaaaaaaaaaaaaaaaaaaaaaa

SEQ ID NO: 15148 - RNA, 1665 nt, Artificial Sequence
  mRNA product Design i-3 (A100) comprising derived and/or modified sequence from LASV(AV;Clade V)__CCA30314__GPC (opt4)
aggagaaagcuuaccaugggccagaucgugaccuucuuccaggaggugccccacgugaucgaggaggugaugaacaucgugcugaucgcccugagcauccuggccgugcugaagggccuguacaacaucgccaccugcggccugaucggccugaucaccuuccugcugcugugcggcagaagcugcagcagcaaccuguacaagggcguguacgagcugcagagccuggaccugaacauggagacccugaacaugaccaugccccugagcugcaccaagaacaacagccaccacuacaucagagugggcaacgacaccggccuggagcugacccugaccaacaccagcauccugaaccacaaguucugcaaccugagcgacgcccacaagaaggaccuguacgaccacgcccugaugagcaucaucagcaccuuccaccugagcauccccaacuucaaccaguacgaggccaugagcugcgacuucaacggcggcaagaucagcgugcaguacaaccugagccacagcuacgccaucgacgccgccaaccacugcggcaccguggccaacggcauccugcagaccuucaugagaauggccuggggcggcagcuacaucgcccuggacagcggcagaggcaacugggacugcaucaugaccagcuaccaguaccugaucauccagaacaccaccugggagaaccacugccaguucagcagacccagccccaucggcuaccugggccugcugagccagagaaccagagacaucuacaucagcagaagacugcugggcaccuucaccuggacccugagcgacagcgagggcaacgccacccccggcggcuacugccugaccagauggaugcugaucgaggccgagcugaagugcuucggcaacaccgccguggccaagugcaacgagaagcacgacgaggaguucugcgacaugcugagacuguucgacuucaacaagcaggccaucagcagacugaagagcgaggcccagaugagcauccagcugaucaacaaggccgugaacgcccugaucaacgaccagcugaucaugaagaaccaccugagagacaucaugggcauccccuacugcaacuacagcaaguacugguaccugaaccacaccaucaccggcaagaccagccugcccaagugcuggcuggugagcaacggcagcuaccugaacgagacccacuucagcgacgacaucgagcagcaggccgacaacaugaucaccgagaugcugcagaaggaguacauggagagacagggcaagaccccccugggccugguggaccuguucguguucagcaccagcuucuaccugaucagcaucuuccugagacuggugaagauccccacccacagacacaucgugggcaagcccugccccaagccccacagacugaaccacaugggcaucugcagcugcggccuguacaagcagcccggcgugcccgugagauggaagagaugaggacuaguuauaagacugacuagcccgaugggccucccaacgggcccuccuccccuccuugcaccgagauuaauaaaaaaaaaaaaaaaaaaaaaaaaaaaaaaaaaaaaaaaaaaaaaaaaaaaaaaaaaaaaaaaaaaaaaaaaaaaaaaaaaaaaaaaaaaaaaaaaaaaa

SEQ ID NO: 15149 - RNA, 1662 nt, Artificial Sequence
  mRNA product Design i-3 (A100) comprising derived and/or modified sequence from LASV(Togo/2016/7082;Clade VI)__AMR44577__GPC (opt4)
aggagaaagcuuaccaugggccagaucaucaccuucuuccaggaggugccccacgugaucgaggaggugaugaacaucgugcugaucgcccugagccugcuggccauccugaagggcguguacaacguggccaccugcggcaucaucggccuggugaccuuccuguuccugugcggcagaagcugcagccugaucuacaagggcagcuacgagcugcagacccuggagcugaacauggagacccugaacaugaccaugccccugagcugcaccaagaacagcagccaccacuacaucagagugggcaacgagaccggccuggagcugacccugaccaacaccagcaucaucaaccacaaguucugcaaccugagcgacgcccacaagagaaaccuguacgaccacgcccugaugagcauccugagcaccuuccaccugagcauccccaacuucaaccaguacgaggccaugagcugcgacuucaacggcggcaagaucagcgugcaguacaaccugagccacgccuacgccguggacgccgccgagcacugcggcaccguggccaacggcgugcugcagaccuucaugagaauggccuggggcggcagcuacaucgcccuggacagcggcagaggcaacugggacugcaucaugaccagcuaccaguaccugaucauccagaacaccaccugggaggaccacugccaguucagcagacccagccccaucggcuaccugggccugcugagccagagaaccagagacaucuacaucagcagaagacugcugggcaccuucaccuggacccugagcgacagcgagggcaacgagacccccggcggcuacugccugaccagauggaugcugaucgaggccgagcugaagugcuucggcaacaccgccguggccaagugcaacgagaagcacgacgaggaguucugcgacaugcugagacuguucgacuucaacaagcaggccauccagagacugaagagcgaggcccagaugagcauccagcugaucaacaaggccgugaacgcccugaucaacgaccagcugaucaugaagaaccaccugagagacaugaugggcauccccuacugcaacuacagcaaguacugguaccugaaccacaccagcagcggcagaaccagccugcccaagugcuggcuggugagcaacggcagcuaccugaacgagacccacuucagcgacgacaucgagcagcaggccgacaacaugaucaccgagaugcugcagaaggaguacaucgacagacagggcaagaccccccugggccugguggaccuguucguguucagcaccagcuucuaccugaucagcaucuuccugcaccugaucaagauccccacccacagacacaucgugggcaagcccugccccaagccccacagacugaaccacaugggcaucugcagcugcggccuguacaagcagcccggcgugcccaccagauggaagagaugaggacuaguuauaagacugacuagcccgaugggccucccaacgggcccuccuccccuccuugcaccgagauuaauaaaaaaaaaaaaaaaaaaaaaaaaaaaaaaaaaaaaaaaaaaaaaaaaaaaaaaaaaaaaaaaaaaaaaaaaaaaaaaaaaaaaaaaaaaaaaaaaaaaa

SEQ ID NO: 15150 - RNA, 1662 nt, Artificial Sequence
  mRNA product Design i-3 (A100) comprising derived and/or modified sequence from LASV(KAK-428;Clade n.d. (VII))__ANH09740__GPC (opt4)
aggagaaagcuuaccaugggccagaucgugaccuucuuccaggaggugccccacgugaucgaggaggugaugaacaucgugcugaucgcccugagccugcuggccauccugaagggccuguacaacuucgccaccugcggcgugaucggccugaucaccuuccugcugcugugcggcagaagcugcagcgccaccuacaagggccaguacgagcugcagacccuggagcugaacauggagagccugaacaugaccaugccccugagcugcaccaagaacaacagccaccacuacaucagagccggcaacaacaccggccuggagcugacccugaccaacaccagcaucaucagccacaaguucugcaaccugagcgacgcccacaagaagaaccuguacgaccacacccugaugagcaucaucaccaccuuccaccugagcauccccaacuucaaccaguacgaggccaugagcugcgacuucaacggcggcaagaucagcauccaguacaaccugagccacagcuacgccggcgacgccgcccagcacugcggcaccguggccaacggcgugcugcagaccuucaugagaauggccuggggcggcagcuaccuggcccuggacagcggcagaagaggcugggacugcaucaucagcagcuaccaguaccugaucauccagaacaccaccugggacgaccacugccaguucagcagacccagccccaucggcuaccugggcuucgugagccagaagaccagagacaucuacaucagcagaagacugcugggcaccuucaccuggacccugagcgacagcgagggccacgacaugcccggcggcuacugccugaccagauggaugcugaucgaggccgaccugaagugcuucggcaacaccgccguggccaagugcaacgagaagcacgacgaggaguucugcgacauguggagacuguucgacuucaacaagcaggccauccagagacugaaggccgaggcccagaugaacauccagcugaucaacaaggccgugaacgcccugaucaacgaccagcugaugaugaagaaccaccugagagacaucaugggcauccccuacugcaacuacagcaaguucugguaccugaacaacaccaccaccggcagaaccagccugcccagaugcuggcugaucagcaacggcagcuaccugaacgagacccacuucagcgacgacaucgagcagcaggccgacaacaugaucaccgagaugcugcagaaggaguacauggacagacagggcaagaccccccugggccugguggaccuguucguguucagcaccagcuucuaccugaucaccaucuuccugcaccuggugaagauccccacccacagacacaucgugggcaagcccugccccaagccccacagacugaaccacaugggcaucugcagcugcggccuguacaagcagcccggcgugcccgugagauggaagagaugaggacuaguuauaagacugacuagcccgaugggccucccaacgggcccuccuccccuccuugcaccgagauuaauaaaaaaaaaaaaaaaaaaaaaaaaaaaaaaaaaaaaaaaaaaaaaaaaaaaaaaaaaaaaaaaaaaaaaaaaaaaaaaaaaaaaaaaaaaaaaaaaaaaa

SEQ ID NO: 15151 - RNA, 1662 nt, Artificial Sequence; identical to SEQ ID NO: 15145
  mRNA product Design i-3 (A100) comprising derived and/or modified sequence from LASV(Pinneo-NIG-1969;Clade I)__AIT17836__GPC (opt4)

SEQ ID NO: 15152 - RNA, 1662 nt, Artificial Sequence
  mRNA product Design i-3 (A100) comprising derived and/or modified sequence from LASV(ISTH0009-NIG-2011;Clade II)__AIT17404__GPC (opt4)
aggagaaagcuuaccaugggccagaucaucaccuucuuccaggaggugccccacgugaucgaggaggugaugaacaucgugcugaucgcccugagccugcuggccauccugaagggcaucuacaacguggccaccugcggccuguucggccuggugagcuuccugcugcugugcggcagaagcugcagcaccaccuacaagggcguguacgagcugcagacccuggagcuggacauggccagccugaacaugaccaugccccugagcugcaccaagaacaacagccaccacuacaucauggugggcaacgagaccggccuggagcugacccugaccaacaccagcaucaucaaccacaaguucugcaaccugagcgacgcccacaagaagaaccuguacgaccacgcccugaugagcaucaucagcaccuuccaccugagcauccccaacuucaaccaguacgaggccaugagcugcgacuucaacggcggcaagaucagcgugcaguacaaccugagccacgccuacgccguggacgccgccaaccacugcggcaccaucgccaacggcgugcugcagaccuucaugagaauggccuggggcggcagcuacaucgcccuggacagcggcaagggcagcugggacugcaucaugaccagcuaccaguaccugaucauccagaacaccaccugggaggaccacugccaguucagcagacccagccccaucggcuaccugggccugcugagccagagaaccagagacaucuacaucagcagaagacugcugggcaccuucaccuggacccugagcgacagcgagggcaacgagacccccggcggcuacugccugaccagauggaugcugaucgaggccgagcugaagugcuucggcaacaccgccguggccaagugcaacgagaagcacgacgaggaguucugcgacaugcugagacuguucgacuucaacaagcaggccaucagaagacugaagaccgaggcccagaugagcauccagcugaucaacaaggccgugaacgcccugaucaacgaccagcugaucaugaagaaccaccugagagacaucaugggcauccccuacugcaacuacagcaaguacugguaccugaaccacaccgugaccggcaagaccagccugcccagaugcuggcuggugagcaacggcagcuaccugaacgagacccacuucagcgacgacaucgagcagcaggccgacaacaugaucaccgagcugcugcagaaggaguacauggacagacagggcaagaccccccugggccugguggaccuguucguguucagcaccagcuucuaccugaucagcaucuuccugcaccugaucaagauccccacccacagacacaucaccggcaagcccugccccaagccccacagacugaaccacaugggcaucugcagcugcggccuguacaagcaccccggcgugcccgugaaguggaagagaugaggacuaguuauaagacugacuagcccgaugggccucccaacgggcccuccuccccuccuugcaccgagauuaauaaaaaaaaaaaaaaaaaaaaaaaaaaaaaaaaaaaaaaaaaaaaaaaaaaaaaaaaaaaaaaaaaaaaaaaaaaaaaaaaaaaaaaaaaaaaaaaaaaaa

SEQ ID NO: 15153 - RNA, 1662 nt, Artificial Sequence
  mRNA product Design i-3 (A100) comprising derived and/or modified sequence from LASV(ISTH2010-NIG-2012;Clade II)__AIT17482__GPC (opt4)
aggagaaagcuuaccaugggccagaucaucaccuucuuccaggaggugccccacgugaucgaggaggugaugaacaucgugcugaucgcccugagccugcuggccauccugaagggcaucuacaacguggccaccugcggccuguucggccuggugagcuuccugcugcugugcggcagaagcugcagcaccaccuacaagggcguguacgagcugcagacccuggagcuggacauggccagccugaacaugaccaugccccugagcugcaccaagaacaacagccaccacuacaucauggugggcaacgagaccggccuggagcugacccugaccaacaccagcaucaucaaccacaaguucugcaaccugagcgacgcccacaagaagaaccuguacgaccacgcccugaugagcaucaucagcaccuuccaccugagcauccccaacuucaaccaguacgaggccaugagcugcgacuucaacggcggcaagaucagcgugcaguacaaccugagccacgccuacgccguggacgccgccaaccacugcggcaccaucgccaacggcgugcugcagaccuucaugagaauggccuggggcggcagcuacaucgcccuggacagcggcaagggcagcugggacugcaucaugaccagcuaccaguaccugaucauccagaacaucaccugggaggaccacugccaguucagcagacccagccccaucggcuaccugggccugcugagccagagaaccagagacaucuacaucagcagaagacugcugggcaccuucaccuggacccugagcgacagcgagggcaacgagacccccggcggcuacugccugaccagauggaugcugaucgaggccgagcugaagugcuucggcaacaccgccguggccaagugcaacgagaagcacgacgaggaguucugcgacaugcugagacuguucgacuucaacaagcaggccaucagaagacugaagaccgaggcccagaugagcauccagcugaucaacaaggccgugaacgcccugaucaacgaccagcugaucaugaagaaccaccugagagacaucaugggcauccccuacugcaacuacagcaaguacugguaccugaaccacaccgugaccggcaagaccagccugcccagaugcuggcuggugagcaacggcagcuaccugaacgagacccacuucagcgacgacaucgagcagcaggccgacaacaugaucaccgagcugcugcagaaggaguacaucgacagacagggcaagaccccccugggccugguggaccuguucguguucagcaccagcuucuaccugaucagcaucuuccugcaccuggugaagauccccacccacagacacguggugggcaagcccugccccaagccccacagacugaaccacaugggcaucugcagcugcggccuguacaagcaccccggcgugcccgugaaguggaagagaugaggacuaguuauaagacugacuagcccgaugggccucccaacgggcccuccuccccuccuugcaccgagauuaauaaaaaaaaaaaaaaaaaaaaaaaaaaaaaaaaaaaaaaaaaaaaaaaaaaaaaaaaaaaaaaaaaaaaaaaaaaaaaaaaaaaaaaaaaaaaaaaaaaaa

SEQ ID NO: 15154 - RNA, 1662 nt, Artificial Sequence
  mRNA product Design i-3 (A100) comprising derived and/or modified sequence from LASV(Lassa virus/H.sapiens-wt/NGA/2015/ISTH_0543;Clade II)__AVO03639__GPC (opt4)
aggagaaagcuuaccaugggccagaucaucaccuucuuccaggaggugccccacgugaucgaggaggugaugaacaucgugcugaucgcccugagccugcuggccauccugaagggcaucuacaacguggccaccugcggccuguucggccuggugagcuuccugcugcugugcggcagaagcugcagcaccaccuacaagggcguguacgagcugcagacccuggagcuggacauggccaaccugaacaugaccaugccccugagcugcaccaagaacaacagccaccacuacaucauggugggcaacgagaccggccuggagcugacccugaccaacaccagcaucaucaaccacaaguucugcaaccugagcgacgcccacaagaagaaccuguacgaccacgcccugaugagcaucaucagcaccuuccaccugagcauccccaacuucaaccaguacgaggccaugagcugcgacuucaacggcggcaagaucagcgugcaguacaaccugagccacaccuacgccguggacgccgccaaccacugcggcaccaucgccaacggcgugcugcagaccuucaugagaauggccuggggcggcagcuacaucgcccuggacagcggcaagggcagcugggacugcaucaugaccagcuaccaguaccuggugauccagaacaccaccugggaggaccacugccaguucagcagacccagccccaucggcuaccugggccugcugagccagagaaccagagacaucuacaucagcagaagacugcugggcaccuucaccuggacccugagcgacagcgagggcaacgagacccccggcggcuacugccugaccagauggaugcugaucgaggccgagcugaagugcuucggcaacaccgccguggccaagugcaacgagaagcacgacgaggaguucugcgacaugcugagacuguucgacuucaacaagcaggccaucagaagacugaagaccgaggcccagaugagcauccagcugaucaacaaggccgugaacgcccugaucaacgaccagcugaucaugaagaaccaccugagagacaucaugggcauccccuacugcaacuacagcaaguacugguaccugaaccacaccgugaccggcaagaccagccugcccagaugcuggcuggugagcaacggcagcuaccugaacgagacccacuucagcgacgacaucgagcagcaggccgacaacaugaucaccgagcugcugcagaaggaguacaucgacagacagggcaagaccccccugggccugguggaccuguucguguucagcaccagcuucuaccugaucagcaucuuccugcaccuggugaagauccccacccacagacacaucaccggcaagcccugccccaagccccacagacugaaccacaugggcaucugcagcugcggccuguacaagcaccccggcgugcccgugaaguggaagagaugaggacuaguuauaagacugacuagcccgaugggccucccaacgggcccuccuccccuccuugcaccgagauuaauaaaaaaaaaaaaaaaaaaaaaaaaaaaaaaaaaaaaaaaaaaaaaaaaaaaaaaaaaaaaaaaaaaaaaaaaaaaaaaaaaaaaaaaaaaaaaaaaaaaa

SEQ ID NO: 15155 - RNA, 1662 nt, Artificial Sequence
  mRNA product Design i-3 (A100) comprising derived and/or modified sequence from LASV(Lassa virus/H.sapiens-wt/NGA/2016/ISTH_0009;Clade II)__AVO03571__GPC (opt4)
aggagaaagcuuaccaugggccagaucaucaccuucuuccaggaggugccccacgugaucgaggaggugaugaacaucgugcugaucgcccugagccugcuggccauccugaagggcaucuacaacguggccaccugcggccugcugggccuggugagcuuccugcugcugugcggcagaagcugcagcaccaccuacaagggcguguacgagcugcagacccuggagcuggacauggccagccugaacaugaccaugccccugagcugcaccaagaacaacagccaccacuacaucauggugggcaacgagaccggccuggagcugacccugaccaacaccagcaucaucaaccacaaguucugcaaccugagcgacgcccacaagaagaaccuguacgaccacgcccugaugagcaucaucagcaccuuccaccugagcauccccaacuucaaccaguacgaggccaugagcugcgacuucaacggcggcagaaucagcgugcaguacaaccugagccacagcuacgccguggacgccgccaaccacugcggcaccaucgccaacggcgugcugcagaccuucaugagaauggccuggggcggcagcuacaucgcccuggacagcggcaagggcagcugggacugcaucaugaccagcuaccaguaccugaucauccagaacaccaccugggaggaccacugccaguucagcagacccagccccaucggcuaccugggccugcugagccagagaaccagagacaucuacaucagcagaagacugcugggcaccuucaccuggacccugagcgacagcgagggcaacgagacccccggcggcuacugccugaccagauggaugcugaucgaggccgagcugaagugcuucggcaacaccgccguggccaagugcaacgagaagcacgacgaggaguucugcgacaugcugagacuguucgacuucaacaagcaggccaucagaagacugaagaccgaggcccagaugagcauccagcugaucaacaaggccgugaacgcccugaucaacgaccagcugaucaugaagaaccaccugagagacaucaugggcauccccuacugcaacuacagcaaguacugguaccugaaccacaccgugaccggcaagaccagccugcccagaugcuggcuggugagcaacggcagcuaccugaacgagacccacuucagcgacgacaucgagcagcaggccgacaacaugaucaccgagcugcugcagaaggaguacaucgacagacagggcaagaccccccugggccugguggaccuguucguguucagcaccagcuucuaccugaucagcaucuuccugcaccuggugaagauccccacccacagacacaucaccggcaagcccugccccaagccccacagacugaaccacaugggcaucugcagcugcggccuguacaaccaccccggcgugcccgugaaguggaagagaugaggacuaguuauaagacugacuagcccgaugggccucccaacgggcccuccuccccuccuugcaccgagauuaauaaaaaaaaaaaaaaaaaaaaaaaaaaaaaaaaaaaaaaaaaaaaaaaaaaaaaaaaaaaaaaaaaaaaaaaaaaaaaaaaaaaaaaaaaaaaaaaaaaaa

SEQ ID NO: 15156 - RNA, 1662 nt, Artificial Sequence
  mRNA product Design i-3 (A100) comprising derived and/or modified sequence from LASV(Lassa virus/H.sapiens-wt/NGA/2016/ISTH_0017;Clade II)__AVO03567__GPC (opt4)
aggagaaagcuuaccaugggccagaucaucaccuucuuccaggaggugccccacgugaucgaggaggugaugaacaucgugcugaucgcccugagccugcuggccauccugaagggcaucuacaacguggccaccugcggccuguucggccuggugagcuuccugcugcugugcggcagaagcugcagcaccaccuacaagggcguguacgagcugcagacccuggagcuggacauggccagccugaacaugaccaugccccugagcugcaccaagaacaacagccaccacuacaucauggugggcaacgagaccggccuggagcugacccugaccaacaccagcaucaucaaccacaaguucugcaaccugagcgacgcccacaagaagaaccuguacgaccacgcccugaugagcaucaucagcaccuuccaccugagcauccccaacuucaaccaguacgaggccaugagcugcgacuucaacggcggcaagaucagcgugcaguacaaccugagccacaccuacgccaucgacgccgccaaccacugcggcaccaucgccaacggcgugcugcagaccuucaugagaauggccuggggcggcagcuacaucgcccuggacagcggcaagggcagcugggacugcaucaugaccagcuaccaguaccugaucauccagaacaccaccugggaggaccacugccaguucagcagacccagccccaucggcuaccugggccugcugagccagagaaccagagacaucuacaucagcagaagacugcugggcaccuucaccuggacccugagcgacagcgagggcaacgagacccccggcggcuacugccugaccagauggaugcugaucgaggccgagcugaagugcuucggcaacaccgccguggccaagugcaacgagaagcacgacgaggaguucugcgacaugcugagacuguucgacuucaacaagcaggccaucagaagacugaagaccgaggcccagaugagcauccagcugaucaacaaggccgugaacgcccugaucaacgaccagcugaucaugaagaaccaccugagagacaucaugggcauccccuacugcaacuacagcaaguacugguaccugaaccacaccgugaccggcaagaccagccugcccagaugcuggcuggugagcaacggcagcuaccugaacgagacccacuucagcgacgacaucgagcagcaggccgacaacaugaucaccgagcugcugcagaaggaguacauggacagacagggcaagaccccccugggccugguggaccuguucguguucagcaccagcuucuaccugaucagcaucuuccugcaccuggugagaauccccacccacagacacgugaucggcaagcccugccccaagccccacagacugaaccacaugggcaucugcagcugcggccuguacaagcaccccggcgugcccgugaaguggaagagaugaggacuaguuauaagacugacuagcccgaugggccucccaacgggcccuccuccccuccuugcaccgagauuaauaaaaaaaaaaaaaaaaaaaaaaaaaaaaaaaaaaaaaaaaaaaaaaaaaaaaaaaaaaaaaaaaaaaaaaaaaaaaaaaaaaaaaaaaaaaaaaaaaaaa

SEQ ID NO: 15157 - RNA, 1662 nt, Artificial Sequence
  mRNA product Design i-3 (A100) comprising derived and/or modified sequence from LASV(Lassa virus/H.sapiens-wt/NGA/2018/ISTH_0959;Clade II)__AVV65099__GPC (opt4)
aggagaaagcuuaccaugggccagaucaucaccuucuuccaggaggugccccacgugaucgaggaggugaugaacaucgugcugaucgcccugagccugcuggccauccugaagggcaucuacaacguggugaccugcggccuguucggccuggugagcuuccugcugcugugcggcagaagcugcagcaccaccuacaagggcguguacgagcugcagacccuggagcuggacauggccagccugaacaugaccaugccccugagcugcaccaagaacaacagccaccacuacaucauggugggcaacgagaccggccuggagcugacccugaccaacaccagcaucaucaaccacaaguucugcaaccugagcgacgcccacaagaagaaccuguacgaccacgcccugaugagcaucaucagcaccuuccaccugagcauccccaacuucaaccaguacgaggccaugagcugcgacuucaacggcggcaagaucagcgugcaguacaaccugagccacgccuacgccaucgacgccgccaaccacugcggcaccaucgccaacggcgugcugcagaccuucaugagaauggccuggggcggcagcuacaucgcccuggacagcggcaagggcagcugggacugcaucaugaccagcuaccaguaccugaucauccagaacaccaccugggaggaccacugccaguucagcagacccagccccaucggcuaccugggccugcugagccagagaaccagagacaucuacaucagcagaagacugcugggcaccuucaccuggacccugagcgacagcgagggcaacgagacccccggcggcuacugccugaccagauggaugcugaucgaggccgagcugaagugcuucggcaacaccgccguggccaagugcaacgagaagcacgacgaggaguucugcgacaugcugagacuguucgacuucaacaagcaggccaucagaagacugaagaccgaggcccagaugagcauccagcugaucaacaaggccgugaacgcccugaucaacgaccagcugaucaugaagaaccaccugagagacaucaugggcauccccuacugcaacuacagcaaguacugguaccugaaccacaccgugaccggcaagaccagccugcccagaugcuggcuggugagcaacggcagcuaccugaacgagacccacuucagcgacgacaucgagcagcaggccgacaacaugaucaccgagcugcugcagaaggaguacaucgacagacagggcaagaccccccugggccugguggaccuguucguguucagcaccagcuucuaccugaucagcaucuuccugcaccuggugaagauccccacccacagacacgugaucggcaagcccugccccaagccccacagacugaaccacaugggcaucugcagcugcggccuguacaagcaccccggcgugcccgugaaguggaagagaugaggacuaguuauaagacugacuagcccgaugggccucccaacgggcccuccuccccuccuugcaccgagauuaauaaaaaaaaaaaaaaaaaaaaaaaaaaaaaaaaaaaaaaaaaaaaaaaaaaaaaaaaaaaaaaaaaaaaaaaaaaaaaaaaaaaaaaaaaaaaaaaaaaaa

SEQ ID NO: 15158 - RNA, 1662 nt, Artificial Sequence
  mRNA product Design i-3 (A100) comprising derived and/or modified sequence from LASV(LASV003-NIG-2008;Clade II)__AIT17580__GPC (opt4)
aggagaaagcuuaccaugggccagaucaucaccuucuuccaggaggugccccacgugaucgaggaggugaugaacaucgugcugaucgcccugagccugcuggccauccugaagggcaucuacaacguggccaccugcggccuguucggccuggugagcuuccugcugcugugcggcagaagcugcagcaccaccuacaagggcguguacgagcugcagacccuggagcuggacauggccagccugaacaugaccaugccccugagcugcaccaagaacaacagccaccacuacaucauggugggcaacgagaccggccuggagcugacccugaccaacaccagcaucaucaaccacaaguucugcaaccugagcgacgcccacaagaagaaccuguacgaccacgcccugaugagcaucaucagcaccuuccaccugagcauccccaacuucaaccaguacgaggccaugagcugcgacuucaacggcggcaagaucagcgugcaguacaaccugagccacaccuacgccguggacgccgccaaccacugcggcaccaucgccaacggcgugcugcagaccuucaugagaauggccuggggcggcagcuacaucgcccuggacagcggcaagggcagcugggacugcaucaugaccagcuaccaguaccugaucauccagaacaccaccugggaggaccacugccaguucagcagacccagccccaucggcuaccugggccugcugagccagagaaccagagacaucuacaucagcagaagacugcugggcaccuucaccuggacccugagcgacagcgagagcaacgagacccccggcggcuacugccugaccagauggaugcugaucgaggccgagcugaagugcuucggcaacaccgccguggccaagugcaacgagaagcacgacgaggaguucugcgacaugcugagacuguucgacuucaacaagcaggccaucagaagacugaaggccgaggcccagaugagcauccagcugaucaacaaggccgugaacgcccugaucaacgaccagcugaucaugaagaaccaccugagagacaucaugggcauccccuacugcaacuacagcaaguacugguaccugaaccacaccgugaccggcagaaccagccugcccagaugcuggcuggugagcaacggcagcuaccugaacgagacccacuucagcgacgacaucgagcagcaggccgacaacaugaucaccgagcugcugcagaaggaguacauggacagacagggcaagaccccccugggccugguggaccuguucguguucagcaccagcuucuaccugaucagcaucuuccugcaccuggugaagauccccacccacagacacgugaucggcaagcccugccccaagccccacagacugaaccacaugggcaucugcagcugcggccuguacaagcaccccggcgugcccgugaaguggaagagaugaggacuaguuauaagacugacuagcccgaugggccucccaacgggcccuccuccccuccuugcaccgagauuaauaaaaaaaaaaaaaaaaaaaaaaaaaaaaaaaaaaaaaaaaaaaaaaaaaaaaaaaaaaaaaaaaaaaaaaaaaaaaaaaaaaaaaaaaaaaaaaaaaaaa

SEQ ID NO: 15159 - RNA, 1662 nt, Artificial Sequence
  mRNA product Design i-3 (A100) comprising derived and/or modified sequence from LASV(LASV035-NIG-2009;Clade II)__AIT17588__GPC (opt4)
aggagaaagcuuaccaugggccagaucaucaccuucuuccaggaggugccccacgugaucgaggaggugaugaacaucgugcugaucgcccugagccugcuggccauccugaagggcaucuacaacguggccaccugcggccuguucggccuggugagcuuccugcugcugugcggcagaagcugcagcaccaccuacaagggcguguacgagcugcagacccuggagcuggacauggccagccugaacaugaccaugccccugagcugcaccaagaacaacagccaccacuacaucauggugggcaacgagaccggccuggagcugacccugaccaacaccagcaucaucaaccacaaguucugcaaccugagcgacgcccacaagaagaaccuguacgaccacgcccugaugagcaucaucagcaccuuccaccugagcauccccaacuucaaccaguacgaggccaugagcugcgacuucaacggcggcaagaucagcgugcaguacaaccugagccacgccuacgccguggacgccgccaaccacugcggcaccaucgccaacggcgugcugcagaccuucaugagaauggccuggggcggcagcuacaucgcccuggacagcggcaagggcagcugggacugcaucaugaccagcuaccaguaccugaucauccagaacaccaccugggaggaccacugccaguucagcagacccagccccaucggcuaccugggccugcugagccagagaaccagagacaucuacaucagcagaagacugcugggcaccuucaccuggacccugagcgacagcgagggcaacgagacccccggcggcuacugccugaccagauggaugcugaucgaggccgagcugaagugcuucggcaacaccgccguggccaagugcaacgagaagcacgacgaggaguucugcgacaugcugagacuguucgacuucaacaagcaggccaucagaagacugaaggccgaggcccagaugagcauccagcugaucaacaaggccgugaacgcccugaucaacgaccagcugaucaugaagaaccaccugagagacaucaugggcauccccuacugcaacuacagcaaguacugguaccugaaccacaccgugaccggcaagaccagccugcccagaugcuggcuggugagcaacggcagcuaccugaacgagacccacuucagcgacgacaucgagcagcaggccgacaacaugaucaccgagcugcugcagaaggaguacaucgacagacagggcaagaccccccugggccugguggaccuguucguguucagcaccagcuucuaccugaucagcaucuuccugcaccuggugaagauccccacccacagacacgugaucggcaagcccugccccaagccccacagacugaaccacaugggcaucugcagcugcggccuguacaagcaccccggcgugcccgugaaguggaagagaugaggacuaguuauaagacugacuagcccgaugggccucccaacgggcccuccuccccuccuugcaccgagauuaauaaaaaaaaaaaaaaaaaaaaaaaaaaaaaaaaaaaaaaaaaaaaaaaaaaaaaaaaaaaaaaaaaaaaaaaaaaaaaaaaaaaaaaaaaaaaaaaaaaaa

SEQ ID NO: 15160 - RNA, 1662 nt, Artificial Sequence
  mRNA product Design i-3 (A100) comprising derived and/or modified sequence from LASV(LASV1000-NIG-2009;Clade II)__AIT17782__GPC (opt4)
aggagaaagcuuaccaugggccagaucaucaccuucuuccaggaggugccccacgugaucgaggaggugaugaacaucgugcugaucgcccugagccugcuggccauccugaagggcaucuacaacguggccaccugcggccuguucggccuggugagcuuccugcugcugugcggcagaagcugcagcaccaccuacaagggcguguacgagcugcagacccuggagcuggacauggccagccugaacaugaccaugccccugagcugcaccaagaacaacagccaccacuacaucauggugggcaacgagaccggccuggagcugacccugaccaacaccagcaucaucaaccacaaguucugcaaccugagcgacgcccacaagaagaaccuguacgaccacgcccugaugagcaucaucagcaccuuccaccugagcauccccaacuucaaccaguacgaggccaugagcugcgacuucaacggcggcaagaucagcgugcaguacaaccugagccacaccuacgccguggacgccgccaaccacugcggcaccaucgccaacggcgugcugcagaccuucaugagaauggccuggggcggcagcuacaucgcccuggacagcggcaagggcagcugggacugcaucaugaccagcuaccaguaccugaucauccagaacaccaccugggaggaccacugccaguucagcagacccagccccaucggcuaccugggccugcugagccagagaaccagagacaucuacaucagcagaagacugcugggcaccuucaccuggacccugagcgacagcgagggcaacgagacccccggcggcuacugccugaccagauggaugcugaucgaggccgagcugaagugcuucggcaacaccgccguggccaagugcaacgagaagcacgacgaggaguucugcgacaugcugagacuguucgacuucaacaagcaggccaucaagagacugaagaccgaggcccagaugagcauccagcugaucaacaaggccgugaacgcccugaucaacgaccagcugaucaugaagaaccaccugagagacaucaugggcauccccuacugcaacuacagcaaguacugguaccugaaccacaccgugaccggcaagaccagccugcccagaugcuggcuggugagcaacggcagcuaccugaacgagacccacuucagcgacgacaucgagcagcaggccgacaacaugaucaccgagcugcugcagaaggaguacaucgacagacagggcaagaccccccugggccugguggaccuguucguguucagcaccagcuucuaccugaucagcaucuuccugcaccuggugaagauccccacccacagacacguggugggcaagcccugccccaagccccacagacugaaccacaugggcaucugcagcugcggccuguacaagcaccccggcgugcccgugaaguggaagagaugaggacuaguuauaagacugacuagcccgaugggccucccaacgggcccuccuccccuccuugcaccgagauuaauaaaaaaaaaaaaaaaaaaaaaaaaaaaaaaaaaaaaaaaaaaaaaaaaaaaaaaaaaaaaaaaaaaaaaaaaaaaaaaaaaaaaaaaaaaaaaaaaaaaa

SEQ ID NO: 15161 - RNA, 1662 nt, Artificial Sequence
  mRNA product Design i-3 (A100) comprising derived and/or modified sequence from LASV(LASV221-NIG-2010;Clade II)__AIT17624__GPC (opt4)
aggagaaagcuuaccaugggccagaucaucaccuucuuccaggaggugccccacgugaucgaggaggugaugaacaucgugcugaucgcccugagccugcuggccauccugaagggcaucuacaacguggccaccugcggccuguucggccuggugagcuuccugcugcugugcggcagaagcugcagcaccaccuacaagggcguguacgagcugcagacccuggagcuggacauggccagccugaacaugaccaugccccugagcugcaccaagaacaacagccaccacuacaucauggugggcaacgagaccggccuggagcugacccugaccaacaccagcaucaucaaccacaaguucugcaaccugagcgacgcccacaagaagaaccuguacgaccacgcccugaugagcaucaucagcaccuuccaccugagcauccccaacuucaaccaguacgaggccaugagcugcgacuucaacggcggcaagaucagcgugcaguacaaccugagccacaccuacgccaucgacgccgccaaccacugcggcaccaucgccaacggcgugcugcagaccuucaugagaauggccuggggcggcagcuacaucgcccuggacagcggcaagggcagcugggacugcaucaugaccagcuaccaguaccugaucauccagaacaccaccugggaggaccacugccaguucagcagacccagccccaucggcuaccugggccugcugagccagagaaccagagacaucuacaucagcagaagacugcugggcaccuucaccuggacccugagcgacagcgagggcaacgagacccccggcggcuacugccugaccagauggaugcugaucgaggccgagcugaagugcuucggcaacaccgccguggccaagugcaacgagaagcacgacgaggaguucugcgacaugcugagacuguucgacuucaacaagcaggccaucagaagacugaagaccgaggcccagaugagcauccagcugaucaacaaggccgugaacgcccugaucaacgaccagcugaucaugaagaaccaccugagagacaucaugggcauccccuacugcaacuacagcaaguacugguaccugaaccacaccgugaccggcaagaccagccugcccagaugcuggcuggugagcaacggcagcuaccugaacgagacccacuucagcgacgacaucgagcagcaggccgacaacaugaucaccgagaugcugcagaaggaguacauggacagacagggcaagaccccccugggccugguggaccuguucguguucagcaccagcuucuaccugaucagcaucuuccugcaccuggugaagauccccacccacagacacgugaucggcaagcccugccccaagccccacagacugaaccacaugggcaucugcagcugcggccuguacaagcaccccggcgugcccgugaaguggaagagaugaggacuaguuauaagacugacuagcccgaugggccucccaacgggcccuccuccccuccuugcaccgagauuaauaaaaaaaaaaaaaaaaaaaaaaaaaaaaaaaaaaaaaaaaaaaaaaaaaaaaaaaaaaaaaaaaaaaaaaaaaaaaaaaaaaaaaaaaaaaaaaaaaaaa

SEQ ID NO: 15162 - RNA, 1662 nt, Artificial Sequence
  mRNA product Design i-3 (A100) comprising derived and/or modified sequence from LASV(LASV237-NIG-2010;Clade II)__AIT17638__GPC (opt4)
aggagaaagcuuaccaugggccagaucaucaccuucuuccaggaggugccccacgugaucgaggaggugaugaacaucgugcugaucgcccugagccugcuggccauccugaagggcaucuacaacguggccaccugcggccuguucggccuggugagcuuccugcugcugugcggcagaagcugcagcaccaccuacaagggcguguacgagcugcagacccuggagcuggacauggccagccugaacaugaccaugccccugagcugcaccaagaacaacagccaccacuacaucauggugggcaacgagaccggccuggagcugacccugaccaacaccagcaucaucaaccacaaguucugcaaccugagcgacgcccacaagaaggaccuguacgaccacgcccugaugagcaucaucagcaccuuccaccugagcauccccaacuucaaccaguacgaggccaugagcugcgacuucaacggcggcaagaucagcgugcaguacaaccugagccacaccuacgccguggacgccgccaaccacugcggcaccaucgccaacggcgugcugcagaccuucaugagaauggccuggggcggcagcuacaucgcccuggacagcggcaagggcagcugggacugcaucaugaccagcuaccaguaccugaucauccagaacaccaccugggaggaccacugccaguucagcagacccagccccaucggcuaccugggccugcugagccagagaaccagagacaucuacaucagcagaagacugcugggcaccuucaccuggacccugagcgacagcgagggcaacgagacccccggcggcuacugccugaccagauggaugcugaucgaggccgagcugaagugcuucggcaacaccgccguggccaagugcaacgagaagcacgacgaggaguucugcgacaugcugagacuguucgacuucaacaagcaggccaucagaagacugaagaccgaggcccagaugagcauccagcugaucaacaaggccgugaacgcccugaucaacgaccagcugaucaugaagaaccaccugagagacaucaugggcauccccuacugcaacuacagcaaguacugguaccugaaccacaccgugaccggcaagaccagccugcccagaugcuggcuggugagcaacggcagcuaccugaacgagacccacuucagcgacgacaucgagcagcaggccgacaacaugaucaccgagcugcugcagaaggaguacauggacagacagggcaagaccccccugggccugguggaccuguucguguucagcaccagcuucuaccugaucagcaucuuccugcaccugaucaagauccccacccacagacacaucaccggcaagcccugccccaagccccacagacugaaccacaugggcaucugcagcugcggccuguacaagcaccccggcgugcccgugaaguggaagagaugaggacuaguuauaagacugacuagcccgaugggccucccaacgggcccuccuccccuccuugcaccgagauuaauaaaaaaaaaaaaaaaaaaaaaaaaaaaaaaaaaaaaaaaaaaaaaaaaaaaaaaaaaaaaaaaaaaaaaaaaaaaaaaaaaaaaaaaaaaaaaaaaaaaa

SEQ ID NO: 15163 - RNA, 1662 nt, Artificial Sequence
  mRNA product Design i-3 (A100) comprising derived and/or modified sequence from LASV(LASV253-NIG-2011;Clade II)__AIT17670__GPC (opt4)
aggagaaagcuuaccaugggccagaucaucaccuucuuccaggaggugccccacgugaucgaggaggugaugaacaucgugcugaucgcccugagccugcuggccauccugaagggcaucuacaacguggccaccugcggccuguucggccuggugagcuuccugcugcugugcggcagaagcugcagcaccaccuacaagggcguguacgagcugcagacccuggagcuggacauggccagccugaacaugaccaugccccugagcugcaccaagaacaacagccaccacuacaucauggugggcaacgagaccggccuggagcugacccugaccaacaccagcaucaucaaccacaaguucugcaaccugagcgacgcccacaagaagaaccuguacgaccacgcccugaugagcaucaucagcaccuuccaccugagcauccccaacuucaaccaguacgaggccaugagcugcgacuucaacggcggcaagaucagcgugcaguacaaccugagccacaccuacgccguggacgccgccaaccacugcggcaccaucgccaacggcgugcugcagaccuucaugagaauggccuggggcggcagcuacaucgcccuggacagcggcaagggcagcugggacugcaucaugaccagcuaccaguaccugaucauccagaacaccaccugggaggaccacugccaguucagcagacccagccccaucggcuaccugggccugcugagccagagaaccagagacaucuacaucagcagaagacugcugggcaccuucaccuggacccugagcgacagcgagggcaacgagacccccggcggcuacugccugaccagauggaugcugaucgaggccgagcugaagugcuucggcaacaccgccguggccaagugcaacgagaagcacgacgaggaguucugcgacaugcugagacuguucgacuucaacaagcaggccaucagaagacugaaggccgaggcccagaugagcauccagcugaucaacaaggccgugaacgcccugaucaacgaccagcugaucaugaagaaccaccugagagacaucaugggcauccccuacugcaacuacagcaaguacugguaccugaaccacaccgugaccggcagaaccagccugcccagaugcuggcuggugagcaacggcagcuaccugaacgagacccacuucagcgacgacaucgagcagcaggccgacaacaugaucaccgagcugcugcagaaggaguacaucgacagacagggcaagaccccccugggccugguggaccuguucguguucagcaccagcuucuaccugaucagcaucuuccugcaccuggugaagauccccacccacagacacaucaucggcaagcccugccccaagccccacagacugaaccacaugggcaucugcagcugcggccuguacaagcaccccggcgugcccgugaaguggaagagaugaggacuaguuauaagacugacuagcccgaugggccucccaacgggcccuccuccccuccuugcaccgagauuaauaaaaaaaaaaaaaaaaaaaaaaaaaaaaaaaaaaaaaaaaaaaaaaaaaaaaaaaaaaaaaaaaaaaaaaaaaaaaaaaaaaaaaaaaaaaaaaaaaaaa

SEQ ID NO: 15164 - RNA, 1662 nt, Artificial Sequence
  mRNA product Design i-3 (A100) comprising derived and/or modified sequence from LASV(LASV254-NIG-2011;Clade II)__AIT17674__GPC (opt4)
aggagaaagcuuaccaugggccagaucaucaccuucuuccaggaggugccccacgugaucgaggaggugaugaacaucgugcugaucgcccugagccugcuggccauccugaagggcaucuacaacguggccaccugcggccuguucggccuggugagcuuccugcugcugugcggcagaagcugcagcaccaccuacaagggcguguacgagcugcagacccuggagcuggacaugaccaaccugaacaugaccaugccccugagcugcaccaagaacaacagccaccacuacaucauggugggcaacgagaccggccuggagcugacccugaccaacaccagcaucaucaaccacaaguucugcaaccugagcgacgcccacaagaagaaccuguacaaccacgcccugaugagcaucaucagcaccuuccaccugagcauccccaacuucaaccaguacgaggccaugagcugcgacuucaacggcggcaagaucagcgugcaguacaaccugagccacagcuacgccguggacgccgccaaccacugcggcaccaucgccaacggcgugcugcagaccuucaugagaauggccuggggcggcagcuacaucgcccuggacagcggcaagggcaacugggacugcaucaugaccagcuaccaguaccugaucauccagaacaccaccugggaggaccacugccaguucagcagacccagccccaucggcuaccugggccugcugagccagagaaccagagacaucuacaucagcagaagacugcugggcaccuucaccuggacccugagcgacagcgagggcaacgagacccccggcggcuacugccugaccagauggaugcugaucgaggccgagcugaagugcuucggcaacaccgccguggccaagugcaacgagaagcacgacgaggaguucugcgacaugcugagacuguucgacuucaacaagcaggccaucagaagacugaagaccgaggcccaggccaacauccagcugaucaacaaggccgugaacgcccugaucaacgaccagcugaucaugaagaaccaccugagagacaucaugggcauccccuacugcaacuacagcaaguacugguaccugaaccacaccgugaccggcaagaccagccugcccagaugcuggcuggugagcaacggcagcuaccugaacgagacccacuucagcgacgacaucgagcagcaggccgacaacaugaucaccgagcugcugcagaaggaguacauggacagacagggcaagaccccccugggccugguggaccuguucguguucagcaccagcuucuaccugaucagcaucuuccugcaccuggugaagauccccacccacagacacgugaucggcaagcccugccccaagccccacagacugaaccacaugggcaucugcagcugcggccuguacaagcaccccggcgugcccgugaaguggaagagaugaggacuaguuauaagacugacuagcccgaugggccucccaacgggcccuccuccccuccuugcaccgagauuaauaaaaaaaaaaaaaaaaaaaaaaaaaaaaaaaaaaaaaaaaaaaaaaaaaaaaaaaaaaaaaaaaaaaaaaaaaaaaaaaaaaaaaaaaaaaaaaaaaaaa

SEQ ID NO: 15165 - RNA, 1662 nt, Artificial Sequence
  mRNA product Design i-3 (A100) comprising derived and/or modified sequence from LASV(Nig08-A19;Clade III)__ADU56618__GPC (opt4)
aggagaaagcuuaccaugggccagaucgugaccuucuuccaggaggugccccacgugaucgaggaggugaugaacaucgugcugaucgcccugagcauccuggccauccugaagggccuguacaacaucgccaccugcggccugaucggccuggugaccuuccugcugcugagcggcagaagcugcagcaugaccuacaagggcguguacgagcugcagacccuggagcugaacaugaacacccugaacaugaccaugccccugagcugcaccaagaacaacagccaccacuacaucauggugggcaacgagaccggccuggagcugacccugaccaacaccagccugcugcaccacaaguucugcaaccugagcgacgcccacaagaagaaccuguacgaccacacccugaugagcaucaucagcaccuuccaccugagcauccccaacuucaaccaguacgaggccaugagcugcgacuucaacggcggcaagaucaccgugcaguacaaccugagccacagcuacgccaucgacgccgccaaccacugcggcaccguggccaacggcgugcugcagaccuucaugagaauggccuggggcggcagcuacaucgcccuggacagcggcagaggcaagugggacugcaucaugaccagcuaccaguaccugaucauccagaacaccaccugggaggaccacugccaguucagcagacccagccccaucggcuaccugggccugcugagccagagaaccagagacaucuacaucagcagaagacugcugggcaccuucaccuggacccugagcgacagcgagggcaacgagacccccggcggcuacugccugaccagauggaugcugaucgaggccgagcugaagugcuucggcaacaccgccguggccaagugcaacgagaagcacgacgaggaguucugcgacaugcugagacuguucgacuucaacaagcaggccaucagaagacugaaggccgaggcccagaugagcauccagcugaucaacaaggccgugaacgcccugaucaacgaccagcugaucaugaagaaccaccugagagacaucaugggcauccccuacugcaacuacagcaaguacugguaccugaaccacaccagcaccggcagaaccagccugcccagaugcuggcuggugagcaacggcagcuaccugaacgagacccacuucagcgacgacaucgagcagcaggccgacaacaugaucaccgagaugcugcagaaggaguaccuggacagacagggcaagaccccccugggccugguggaccuguucguguucagcaccagcuucuaccugaucagcaucuuccugcaccuggugaagauccccacccacagacacaucgugggcaagcccugccccaagccccacagacugaaccacaugggcaucugcagcugcggccuguacaagcagcccggcgugcccgugagauggaagagaugaggacuaguuauaagacugacuagcccgaugggccucccaacgggcccuccuccccuccuugcaccgagauuaauaaaaaaaaaaaaaaaaaaaaaaaaaaaaaaaaaaaaaaaaaaaaaaaaaaaaaaaaaaaaaaaaaaaaaaaaaaaaaaaaaaaaaaaaaaaaaaaaaaaa

SEQ ID NO: 15166 - RNA, 1665 nt, Artificial Sequence
  mRNA product Design i-3 (A100) comprising derived and/or modified sequence from LASV(G1180-SLE-2010;Clade IV)__AIT17168__GPC (opt4)
aggagaaagcuuaccaugggccagaucgugaccuucuuccaggaggugccccacgugaucgaggaggugaugaacaucgugcugaucgcccugagcauccuggccgugcugaagggccuguacaacuucgccaccugcggccuggugggccugcugaccuuccugcugcugugcggcagaagcugcaccgccagcagauacaagggcguguacgagcugcagacccuggagcugaacauggagacccugaacaugaccaugccccugagcugcaccaagaacaacagccaccacuacaucauggugggcaacgagaccggccuggagcugacccugaccaacaccagcaucaucaaccacaaguucugcaaccugagcgacgcccacaagaagaaccuguacgaccacgcccugaugagcaucaucagcaccuuccaccugagcauccccaacuucaaccaguacgaggccaugagcugcgacuucaacggcggcaagaucagcgugcaguacaaccugagccacagcuacgccggcgacgccgccaaccacugcggcaccguggccaacggcgugcugcagaccuucaugagaauggccuggggcggcagcuacaucgcccuggacagcggccacggcagcugggacugcaucaugaccagcuaccaguaccugaucauccagaacaccaccugggaggaccacugccaguucagcagacccagccccaucggcuaccugggccugcugagccagagaaccagagacaucuacaucagcagaagacugcugggcaccuucaccuggacccugagcgacagcgagggcaaggacacccccggcggcuacugccugaccagauggaugcugaucgaggccgagcugaagugcuucggcaacaccgccguggccaagugcaacgagaagcacgacgaggaguucugcgacaugcugagacuguucgacuucaacaagcaggccauccagagacugaaggccgaggcccagaugagcauccagcugaucaacaaggccgugaacgcccugaucaacgaccagcugaucaugaagaaccaccugagagacaucaugggcauccccuacugcaacuacagcaaguacugguaccugaaccacaccaccaccggcaagaccagccugcccaagugcuggcuggugagcaacggcagcuaccugaacgagacccacuucagcgacgacaucgagcagcaggccgacaacaugaucaccgagaugcugcagaaggaguacauggagagacagggcaagaccccccugggccugguggaccuguucguguucagcaccagcuucuaccugaucagcaucuuccugcaccuggugaagauccccacccacagacacaucgugggcaagagcugccccaagccccacagacugaaccacaugggcaucugcagcugcggccuguacaagcagcccggcgugcccgugaaguggaagagaugaggacuaguuauaagacugacuagcccgaugggccucccaacgggcccuccuccccuccuugcaccgagauuaauaaaaaaaaaaaaaaaaaaaaaaaaaaaaaaaaaaaaaaaaaaaaaaaaaaaaaaaaaaaaaaaaaaaaaaaaaaaaaaaaaaaaaaaaaaaaaaaaaaaa

SEQ ID NO: 15167 - RNA, 1665 nt, Artificial Sequence
  mRNA product Design i-3 (A100) comprising derived and/or modified sequence from LASV(G1442-SLE-2011;Clade IV)__AIT17180__GPC (opt4)
aggagaaagcuuaccaugggccagaucgugaccuucuuccaggaggugccccacgugaucgaggaggugaugaacaucgugcugaucgcccugagcauccuggccgugcugaagggccuguacaacguggccaccugcggccugaucggccuggugaccuuccugcugcugugcggcagaagcugcaccaccacccuguacaagggcguguacgagcugcagacccuggagcugaacauggagacccugaacaugaccaugccccugagcugcaccaagaacaacagccaccacuacaucagagugggcaacgagaccggccuggagcugacccugaccaacaccagcaucaucaaccacaaguucugcaaccugagcgacgcccacaagaagaaccuguacgaccacgcccugaugagcaucaucagcaccuuccaccugagcauccccaacuucaaccaguacgaggccaugagcugcgacuucaacggcggcaagaucagcgugcaguacaaccugagccacagcuacgccggcgacgccgccaaccacugcggcaccguggccaacggcgugcugcagaccuucaugagaauggccuggggcggcagcuacaucgcccuggacagcggcagaggcaacugggacugcaucaugaccagcuaccaguaccugaucauccagaacaccaccugggacgaccacugccaguucagcagacccagccccaucggcuaccugggccugcugagccagagaaccagagacguguacaucagcagaagacugcugggcaccuucaccuggacccugagcgacagcgagggcaaggacacccccggcggcuacugccugaccagauggaugcugaucgaggccgagcugaagugcuucggcaacaccgccguggccaagugcaacgagaagcacgacgaggaguucugcgacaugcugagacuguucgacuucaacaagcaggccauccagagacugaaggccgaggcccagaugagcauccagcugaucaacaaggccgugaacgcccugaucaacgaccagcugaucaugaagaaccaccugagagacaucaugggcauccccuacugcaacuacagcaaguacugguaccugaacaacaccgccaccggcaagaccagccugcccaagugcuggcugaucagcaacggcagcuaccugaacgagacccacuucagcgacgacaucgagcaggaggccgacaacaugaucaccgagaugcugcagaaggaguacauggagagacagggcaagaccccccugggccugguggaccuguucguguucagcaccagcuucuaccugaucagcaucuuccugcaccuggugaagauccccacccacagacacaucgugggcaagagcugccccaagccccacagacugaaccacaugggcaucugcagcugcggccuguacaagcagcccggcgugcccgugagauggaagagaugaggacuaguuauaagacugacuagcccgaugggccucccaacgggcccuccuccccuccuugcaccgagauuaauaaaaaaaaaaaaaaaaaaaaaaaaaaaaaaaaaaaaaaaaaaaaaaaaaaaaaaaaaaaaaaaaaaaaaaaaaaaaaaaaaaaaaaaaaaaaaaaaaaaa

SEQ ID NO: 15168 - RNA, 1665 nt, Artificial Sequence
  mRNA product Design i-3 (A100) comprising derived and/or modified sequence from LASV(G3010-SLE-2013;Clade IV)__AIT17344__GPC (opt4)
aggagaaagcuuaccaugggccagaucgugaccuucuuccaggaggugccccacgugaucgaggaggugaugaacaucgugcugaucgcccugagcauccuggccgugcugaagggccuguacaacuucgccaccugcggccuggugggccuggugaccuuccugcugcugugcggcagaagcugcaccaccagccuguacaagggcguguacgagcugcagacccuggagcugaacauggagacccugaacaugaccaugccccugagcugcaccaagaacaacagccaccacuacaucauggugggcaacgagaccggccuggagcugacccugaccaacaccagcaucaucaaccacaaguucugcaaccugagcgacgcccacaagaagaaccuguacaaccacgcccugaugagcaucaucagcaccuuccaccugagcauccccaacuucaaccaguacgaggccaugagcugcgacuucaacggcggcaagaucagcgugcaguacaaccugagccacagcuacgccggcgacgccgccagccacugcggcaccguggccaacggcgugcugcagaccuucaugagaauggccuggggcggcagcuacaucgcccuggacagcggcuacggcaagugggacugcaucaugaccagcuaccaguaccugaucauccagaacaccaccugggaggaccacugccaguucagcagacccagccccaucggcuaccugggccugcugagccagagaaccagagacaucuacaucagcagaagacugcugggcaccuucaccuggacccugagcgacagcgagggcaaggacacccccggcggcuacugccugaccagauggaugcugaucgaggccgagcugaagugcuucggcaacaccgccguggccaagugcaacgagaagcacgacgaggaguucugcgacaugcugagacuguucgacuucaacaagcaggccauccagagacugaagaccgaggcccagaugagcauccagcugaucaacaaggccgugaacgcccugaucaacgaccagcugaucaugaagaaccaccugagagacaucaugggcauccccuacugcaacuacagcaaguacugguaccugaaccacaccaccaccggcaagaccagccugcccaagugcuggcuggugagcaacggcagcuaccugaacgagacccacuucagcgacgacaucgagcagcaggccgacaacaugaucaccgagaugcugcagaaggaguacauggagagacagggcaagaccccccugggccugguggaccuguucguguucagcaccagcuucuaccugaucagcaucuuccugcaccuggugaagauccccacccacagacacaucgugggcaagagcugccccaagccccacagacugaaccacaugggcaucugcagcugcggccuguacaagcagcccggcgugcccgugagauggaagagaugaggacuaguuauaagacugacuagcccgaugggccucccaacgggcccuccuccccuccuugcaccgagauuaauaaaaaaaaaaaaaaaaaaaaaaaaaaaaaaaaaaaaaaaaaaaaaaaaaaaaaaaaaaaaaaaaaaaaaaaaaaaaaaaaaaaaaaaaaaaaaaaaaaaa

SEQ ID NO: 15169 - RNA, 1665 nt, Artificial Sequence
  mRNA product Design i-3 (A100) comprising derived and/or modified sequence from LASV(G502-SLE-2009;Clade IV)__AIT17126__GPC (opt4)
aggagaaagcuuaccaugggccagaucgugaccuucuuccaggaggugccccacgugaucgaggaggugaugaacaucgugcugaucgcccugagcauccuggccgugcugaagggccuguacaacuucgccaccugcggccuggugggccugcugaccuuccugcugcugugcggcagaagcugcaccaccggccuguacaagggcguguacgagcugcagacccuggagcugaacauggagacccugaacaugaccaugccccugagcugcaccaagaacaacagccaccacuacaucauggugggcaacgagaccggccuggagcugacccugaccaacaccagcaucaucaaccacaaguucugcaaccugagcgacgcccacaagaagaaccuguacgaccacgcccugaugagcaucaucagcaccuuccaccugagcauccccaacuucaaccaguacgaggccaugagcugcgacuucaacggcggcaagaucagcgugcaguacaaccugagccacagcuacgccggcgacgccgccgaccacugcggcaccguggccaacggcgugcugcagaccuucaugagaauggccuggggcggcagcuacaucgcccuggacagcggcagaggcagaugggacugcaucaugaccagcuaccaguaccugaucauccagaacaccaccugggaggaccacugccaguucagcagacccagccccaucggcuaccugggccugcugagccagagaaccagagacaucuacaucagcagaagacugcugggcaccuucaccuggacccugagcgacagcgagggcaaggacacccccggcggcuacugccugaccagauggaugcugaucgaggccgagcugaagugcuucggcaacaccgccguggccaagugcaacgagaagcacgacgaggaguucugcgacaugcugagacuguucgacuucaacaagcaggccauccagagacugaaggccgaggcccagaugagcauccagcugaucaacaaggccgugaacgcccugaucaacgaccagcuggugaugaagaaccaccugagagacaucaugggcauccccuacugcaacuacagcagauacugguaccugaaccacaccaccaccggcagaaccagccugcccaagugcuggcuggugagcaacggcagcuaccugaacgagacccacuucagcgacgacaucgagcagcaggccgacaacaugaucaccgagaugcugcagaaggaguacauggagagacagggcaagaccccccugggccugguggaccuguucguguucagcaccagcuucuaccugaucagcaucuuccugcaccuggugaagauccccacccacagacacaucgugggcaagagcugccccaagccccacagacugaaccacaugggcaucugcagcugcggccuguacaagcagcccggcgugcccgugaaguggaagagaugaggacuaguuauaagacugacuagcccgaugggccucccaacgggcccuccuccccuccuugcaccgagauuaauaaaaaaaaaaaaaaaaaaaaaaaaaaaaaaaaaaaaaaaaaaaaaaaaaaaaaaaaaaaaaaaaaaaaaaaaaaaaaaaaaaaaaaaaaaaaaaaaaaaa

SEQ ID NO: 15170 - RNA, 1665 nt, Artificial Sequence
  mRNA product Design i-3 (A100) comprising derived and/or modified sequence from LASV(G733-SLE-2010;Clade IV)__AIT17154__GPC (opt4)
aggagaaagcuuaccaugggccagaucgugaccuucuuccaggaggugccccacgugaucgaggaggugaugaacaucgugcugaucgcccugagcauccuggccgugcugaagggccuguacaacuucgccaccugcggcaucgugggccuggugagcuuccugcugcugugcggcagaagcugcaccaccagccuguacaagggcguguacgagcugcagacccuggagcugaacauggagacccugaacaugaccaugccccugagcugcaccaagaacaacagccaccacuacaucauggugggcaacgagaccggccuggagcugacccugaccaacaccagcaucaucaaccacaaguucugcaaccugagcgacgcccacaagaagaaccuguacgaccacgcccugaugagcaucaucagcaccuuccaccugagcauccccaacuucaaccaguacgaggccaugagcugcgacuucaacggcggcaagaucagcgugcaguacaaccugagccacagcuacgccggcgacgccgccaaccacugcggcaccaucgccaacggcgugcugcagaccuucaugagaauggccuggggcggcagcuacaucgcccuggacagcggcagagacagaugggacugcaucaugaccagcuaccaguaccugaucauccagaacaccaccugggaggaccacugccaguucagcagacccagccccaucggcuaccugggccugcugagccagagaaccagagacaucuacaucagcagaagacugcugggcaccuucaccuggacccugagcgacagcgagggcaaggacacccccggcggcuacugccugaccagauggaugcugaucgaggccgagcugaagugcuucggcaacaccgccguggccaagugcaacgagaagcacgacgaggaguucugcgacaugcugagacuguucgacuucaacaagcaggccauccagagacugaaggccgaggcccagaugagcauccagcugaucaacaaggccgugaacgcccugaucaacgaccagcugaucaugaagaaccaccugagagacaucaugggcauccccuacugcaacuacagcaaguacugguaccugaaccacaccaccaccggcaagaccagccugcccaagugcuggcuggugagcaacggcagcuaccugaacgagacccacuucagcgacgacaucgagcagcaggccgacaacaugaucaccgagaugcugcagaaggaguacauggagagacagggcaagaccccccugggccugguggaccuguucguguucagcaccagcuucuaccugaucagcaucuuccugcaccuggugaagauccccacccacagacacguggugggcaagagcugccccaagccccacagacugaaccacaugggcaucugcagcugcggccuguacggccagcccggcgugcccgugaaguggaagagaugaggacuaguuauaagacugacuagcccgaugggccucccaacgggcccuccuccccuccuugcaccgagauuaauaaaaaaaaaaaaaaaaaaaaaaaaaaaaaaaaaaaaaaaaaaaaaaaaaaaaaaaaaaaaaaaaaaaaaaaaaaaaaaaaaaaaaaaaaaaaaaaaaaaa

SEQ ID NO: 15171 - RNA, 1665 nt, Artificial Sequence
  mRNA product Design i-3 (A100) comprising derived and/or modified sequence from MOPV/LASV reassortant(IGS-1;Clade IV)__AFY05576__GPC (opt4)
aggagaaagcuuaccaugggccagaucgugaccuucuuccaggaggugccccacgugaucgaggaggugaugaacaucgugcugaucgcccugagcgugcuggccgugcugaagggccuguacaacuucgccaccugcggccuggugggccuggugaccuuccugcugcugugcggcagaagcugcaccaccagccuguacaagggcguguacgagcugcagacccuggagcugaacauggagacccugaacaugaccaugccccugagcugcaccaagaacaacagccaccacuacaucauggugggcaacgagaccggccuggagcugacccugaccaacaccagcaucaucaaccacaaguucugcaaccugagcgacgcccacaagaagaaccuguacgaccacgcccugaugagcaucaucagcaccuuccaccugagcauccccaacuucaaccaguacgaggccaugagcugcgacuucaacggcggcaagaucagcgugcaguacaaccugagccacagcuacgccggcgacgccgccaaccacugcggcaccguggccaacggcgugcugcagaccuucaugagaauggccuggggcggcagcuacaucgcccuggacagcggcagaggcaacugggacugcaucaugaccagcuaccaguaccugaucauccagaacaccaccugggaggaccacugccaguucagcagacccagccccaucggcuaccugggccugcugagccagagaaccagagacaucuacaucagcagaagacugcugggcaccuucaccuggacccugagcgacagcgagggcgaggacacccccggcggcuacugccugaccagauggaugcugaucgaggccgagcugaagugcuucggcaacaccgccguggccaagugcaacgagaagcacgacgaggaguucugcgacaugcugagacuguucgacuucaacaagcaggccauccagagacugaaggccgaggcccagaugagcauccagcugaucaacaaggccgugaacgcccugaucaacgaccagcugaucaugaagaaccaccugagagacaucaugggcauccccuacugcaacuacagcaaguacugguaccugaaccacaccaccaccggcagaaccagccugcccaagugcuggcuggugagcaacggcagcuaccugaacgagacccacuucagcgacgacaucgagcagcaggccgacaacaugaucaccgagaugcugcagaaggaguacauggagagacagggcaagaccccccugggccugguggaccuguucguguucagcaccagcuucuaccugaucagcaucuuccugcaccuggugaagauccccacccacagacacaucgugggcaagagcugccccaagccccacagacugaaccacaugggcaucugcagcugcggccuguacaagcagcccggcgugcccgugaaguggaagagaugaggacuaguuauaagacugacuagcccgaugggccucccaacgggcccuccuccccuccuugcaccgagauuaauaaaaaaaaaaaaaaaaaaaaaaaaaaaaaaaaaaaaaaaaaaaaaaaaaaaaaaaaaaaaaaaaaaaaaaaaaaaaaaaaaaaaaaaaaaaaaaaaaaaa

SEQ ID NO: 15172 - RNA, 1665 nt, Artificial Sequence
  mRNA product Design i-3 (A100) comprising derived and/or modified sequence from LASV(LM765-SLE-2012;Clade IV)__AIT17814__GPC (opt4)
aggagaaagcuuaccaugggccagaucgugaccuucuuccaggaggugccccacgugaucgaggaggugaugaacaucgugcugaucgcccugagcauccuggccgugcugaagggccuguacaacuucgccaccugcggccuggugggccuggugaccuuccugcugcugugcggcagaagcugcaccaccagccuguacaagggcguguacgagcugcagacccuggagcugaacauggagacccugaacaugaccaugccccugagcugcaccaagaacaacagccaccacuacaucauggugggcaacgagaccggccuggagcugacccugaccaacaccagcaucaucgaccacaaguucugcaaccugagcgacgcccacagaaagaaccuguacgaccacgcccugaugagcaucaucagcaccuuccaccugagcauccccaacuucaaccaguacgaggccaugagcugcgacuucaacggcggcaagaucagcgugcaguacaaccugagccacagcuacgccaaggacgccgccgaccacugcggcaccguggccaacggcgugcugcagaccuucaugagaauggccuggggcggcagcuacaucgcccuggacagcggcagaggcagaugggacugcaucaugaccagcuaccaguaccugaucauccagaacaccaccugggaggaccacugccaguucagcagacccagccccaucggcuaccugggccugcugagccagagaaccagagacaucuacaucagcagaagacugcugggcaccuucaccuggacccugagcgacagcgagggcaaggacacccccggcggcuacugccugaccagauggaugcugaucgaggccgagcugaagugcuucggcaacaccgccguggccaagugcaacgagaagcacgacgaggaguucugcgacaugcugagacuguucgacuucaacaagcaggccauccagagacugaaggccgaggcccagaugagcauccagcugaucaacaaggccgugaacgcccugaucaacgaccagcugaucaugaagaaccaccugagagacaucaugggcauccccuacugcaacuacagcaaguacugguaccugaaccacaccaccaccggcaagaccagccugcccaagugcuggcuggugagcaacggcagcuaccugaacgagacccacuucagcgacgacaucgagcagcaggccgacaacaugaucaccgagaugcugcagaaggaguacauggagagacagggcaagaccccccugggccugguggaccuguucguguucagcaccagcuucuaccugaucagcaucuuccugcaccuggugaagauccccacccacagacacaucgugggcaagcccugccccaagccccacagacugaaccacaugggcaucugcagcugcggccuguacaagcagcccggcgugcccgugaaguggaagagaugaggacuaguuauaagacugacuagcccgaugggccucccaacgggcccuccuccccuccuugcaccgagauuaauaaaaaaaaaaaaaaaaaaaaaaaaaaaaaaaaaaaaaaaaaaaaaaaaaaaaaaaaaaaaaaaaaaaaaaaaaaaaaaaaaaaaaaaaaaaaaaaaaaaa

SEQ ID NO: 15173 - RNA, 1665 nt, Artificial Sequence
  mRNA product Design i-3 (A100) comprising derived and/or modified sequence from LASV(LM776-SLE-2012;Clade IV)__AIT17824__GPC (opt4)
aggagaaagcuuaccaugggccagaucgugaccuucuuccaggaggugccccacgugaucgaggaggugaugaacaucgugcugaucgcccugagcauccuggccgugcugaagggccuguacaacuucgccaccugcggccuggugggccuggugaccuuccugcugcugugcggcagaagcugcaccaccagcguguacaagggcguguacgagcugcagacccuggagcugaacauggagacccugaacaugaccaugccccugagcugcaccaagaacaacagccaccacuacaucauggugggcaacgagaccggccuggagcugacccugaccaacaccagcaucaucaaccacaaguucugcaaccugagcgacgcccacaagaagaaccuguacgaccacgcccugaugagcaucaucagcaccuuccaccugagcauccccaacuucaaccaguacgaggccaugagcugcgacuucaacggcggcaagaucagcgugcaguacaaccugagccacagcuacgccggcgacgccgccaaccacugcggcaccguggccaacggcgugcugcagaccuucaugagaauggccuggggcggcagcuacaucgcccuggacagcggccacggcaagugggacugcaucaugaccagcuaccaguaccugaucauccagaacaccaccugggaggaccacugccaguucagcagacccagccccaucggcuaccugggccugcugagccagagaaccagagacaucuacaucagcagaagacugcugggcaccuucaccuggacccugagcgacagcgagggcaaggacacccccggcggcuacugccugaccagauggaugcugaucgaggccgagcugaagugcuucggcaacaccgccguggccaagugcaacgagaagcacgacgaggaguucugcgacaugcugagacuguucgacuucaacaagcaggccauccagagacugaaggccgaggcccagaugagcauccagcugaucaacaaggccgugaacgcccugaucaacgaccagcugaucaugaagaaccaccugagagacaucaugggcauccccuacugcaacuacagcaaguacugguaccugaaccacaccaccaccggcaagaccagccugcccaagugcuggcuggugagcaacggcagcuaccugaacgagacccacuucagcgacgacaucgagcagcaggccgacaacaugaucaccgagaugcugcagaaggaguacauggagagacagggcaagaccccccugggccugguggaccuguucguguucagcaccagcuucuaccugaucagcaucuuccugcaccuggugaagauccccacccacagacacaucgugggcaagagcugccccaagccccacagacugaaccacaugggcaucugcagcugcggccuguacaagcagcccggcgugcccgugagauggaagagaugaggacuaguuauaagacugacuagcccgaugggccucccaacgggcccuccuccccuccuugcaccgagauuaauaaaaaaaaaaaaaaaaaaaaaaaaaaaaaaaaaaaaaaaaaaaaaaaaaaaaaaaaaaaaaaaaaaaaaaaaaaaaaaaaaaaaaaaaaaaaaaaaaaaa

SEQ ID NO: 15174 - RNA, 1665 nt, Artificial Sequence
  mRNA product Design i-3 (A100) comprising derived and/or modified sequence from LASV(Mad39;Clade IV)__ANH09722__GPC (opt4)
aggagaaagcuuaccaugggccagaucgugaccuucuuccaggaggugccccacgugaucgaggaggugaugaacaucgugcugaucgcccugagcauccuggccgugcugaagggccuguacaacguggccaccugcggccugaucggccuggugaccuuccugcugcugugcggcagaagcugcaccaccacccuguacaagggcguguacgagcugcaggcccuggagcugaacauggagacccugaacaugaccaugccccugagcugcaccaagaacaacagccaccacuacaucagagugggcaacgagaccggccuggagcugacccugaccaacaccagccugaucaaccacaaguucugcaaccugagcgacgcccacaagaagaaccuguacgaccacgcccugaugagcaucaucagcaccuuccaccugagcauccccaacuucaaccaguacgaggccaugagcugcgacuucaacgacggcaagaucagcgugcaguacaaccugagccacaccuacgccggcgacaccgccaaccacugcggcaccguggccaacggcgugcugcagaccuucaugagaauggccuggggcggcagcuacaucgcccuggacagcggcagaggcggcugggacugcaucaugaccagcuaccaguaccugaucauccagaacaccaccugggaggaccacugccaguucagcagacccagccccaucggcuaccugggccugcugagccagagaaccagagacaucuacaucagcagaagacugcugggcaccuucaccuggacccugagcgacagcgagggcaaggacacccccggcggcuacugccugaccagauggaugcugaucgaggccgagcugaagugcuucggcaacaccgccguggccaagugcaacgagaagcacgacgaggaguucugcgacaugcugagacuguucgacuucaacaagcaggccauccagagacugaaggccgaggcccagaugagcauccagcugaucaacaaggccgugaacgcccugaucaacgaccagcugaucaugaagaaccaccugagagacaucaugggcauccccuacugcaacuacagcaaguacugguaccugaaccacaccgugaccggcaagaccagccugcccaagugcuggcuggugagcaacggcagcuaccugaacgagacccacuucagcgacgacaucgagcagcaggccgacaacaugaucaccgagaugcugcagaaggaguacauggagagacagggcaagaccccccugggccugguggaccuguucguguucagcaccagcuucuaccugaucagcaucuuccugcaccuggugaagauccccacccacagacacguggugggcaagcccugccccaagccccacagacugaaccacaugggcaucugcagcugcggcuucuacaagcagcccggcgugcccgugagauggaagagaugaggacuaguuauaagacugacuagcccgaugggccucccaacgggcccuccuccccuccuugcaccgagauuaauaaaaaaaaaaaaaaaaaaaaaaaaaaaaaaaaaaaaaaaaaaaaaaaaaaaaaaaaaaaaaaaaaaaaaaaaaaaaaaaaaaaaaaaaaaaaaaaaaaaa

SEQ ID NO: 15175 - RNA, 1665 nt, Artificial Sequence
  mRNA product Design i-3 (A100) comprising derived and/or modified sequence from LASV(Z0947-SLE-2011;Clade IV)__AIT17840__GPC (opt4)
aggagaaagcuuaccaugggccagaucgugaccuucuuccaggaggugccccacgugaucgaggaggugaugaacaucgugcugaucgcccugagcauccuggccgugcugaagggccuguacaacuucgccaccugcggccuggugggccuggugaccuuccugcugcugugcggcagaagcugcaccaucagccuguacaagggcguguacgagcugcagacccuggagcugaacauggagacccugaacaugaccaugccccugagcugcaccaagaacaacagccaccacuacaucauggugggcaacgagaccggccuggagcugacccugaccaacaccagcaucaucaaccacaaguucugcaaccugagcgacgcccacaagaagaaccuguacgaccacgcccugaugagcaucaucagcaccuuccaccugagcauccccaacuucaaccaguacgaggccaugagcugcgacuucaacggcggcaagaucagcgugcaguacaaccugagccacagcuacgccggcgacgccgccaaccacugcggcaccguggccaacggcgugcugcagaccuucaugagaauggccuggggcggcagcuacaucgcccuggacagcggcagagacagaugggacugcaucaugaccagcuaccaguaccugaucauccagaacaccaccugggaggaccacugccaguucagcagacccagccccaucggcuaccugggccugcugagccagagaaccagagacaucuacaucagcagaagacugcugggcaccuucaccuggacccugagcgacagcgagggcaaggacacccccggcggcuacugccugaccagauggaugcugaucgaggccgagcugaagugcuucggcaacaccgccguggccaagugcaacgagaagcacgacgaggaguucugcgacaugcugagacuguucgacuucaacaagcaggccauccagagacugaaggccgaggcccagaugagcauccagcugaucaacaaggccgugaacgcccugaucaacgaccagcugaucaugaagaaccaccugagagacaucaugggcauccccuacugcaacuacagcaaguacugguaccugaaccacaccaccaccggcaagaccagccugcccaagugcuggcuggugagcaacggcagcuaccugaacgagacccacuucagcgacgacaucgagcagcaggccgacaacaugaucaccgagaugcugcagaaggaguacauggagagacagggcaagaccccccugggccugguggaccuguucguguucagcaccagcuucuaccugaucagcaucuuccugcaccuggugaagauccccacccacagacacaucgugggcaagcccugccccaagccccacagacugaaccacaugggcaucugcagcugcggccuguacaagcagcccggcgugcccgugaaguggaagagaugaggacuaguuauaagacugacuagcccgaugggccucccaacgggcccuccuccccuccuugcaccgagauuaauaaaaaaaaaaaaaaaaaaaaaaaaaaaaaaaaaaaaaaaaaaaaaaaaaaaaaaaaaaaaaaaaaaaaaaaaaaaaaaaaaaaaaaaaaaaaaaaaaaaa

SEQ ID NO: 15176 - RNA, 1665 nt, Artificial Sequence
  mRNA product Design i-3 (A100) comprising derived and/or modified sequence from LASV(Josiah;Clade IV)__NP_694870__GPC (opt5)
aggagaaagcuuaccaugggccagaucgugaccuucuuucaagaggucccccacguuauugaagaggugaugaacaucgugcugauugcccucagcguccuggcugugcuuaaggggcuguacaauuucgccacaugcggacucguuggccuggugacguuucuucugcucugugggagauccugcaccacaucucuguauaaaggagucuacgaacugcagacccucgagcugaacauggaaacacuuaauaugaccaugccucugagcuguacaaagaacaauucccaucacuauaucauggugggcaacgagaccgggcucgagcugacgcuuaccaauacaucuauuaucaaccauaaauucugcaaucugagcgacgcgcacaagaaaaaccucuacgaucaugcucugauguccaucauuucuaccuuucaccugagcaucccgaauuucaaccaguaugaagccauguccugugacuuuaauggaggcaagauuagcguucaguacaaccucucucacuccuaugccggcgaugcugccaaucauugcgggacaguggcuaacggaguccugcaaaccuucaugcggauggccuggggcgggagcuacaucgcgcuugacucuggacgcggcaacugggauuguauuaugacguccuaccaguaucugaucauucagaauacaaccugggaggaccacugccaguuuagcagacccucuccuaucggguaccucggacugcuuucccaacggacacgcgauaucuauauuagcagacggcugcucggcaccuucaccuggacacuguccgacucugaaggcaaggauacgcccgggggauacugucugacccgcuggaugcucaucgaggccgagcugaaaugcuuuggcaacacagcuguggccaaguguaaugaaaaacaugacgaggaguucugcgauaugcuuagacuguuugacuucaacaagcaggcuauucagcggcucaaagccgaagcgcagaugagcauccaacugauuaauaaggccgugaacgcucuuaucaaugaucagcugaucaugaagaaccaccuccgcgacauuauggggaucccuuauugcaauuacuccaaauauugguaccugaaccacaccacaaccggaagaacgagccugcccaaguguuggcucgucucuaauggcuccuaccugaacgaaacacauuucagcgacgauauugagcagcaagccgacaauaugaucaccgagaugcuucagaaagaauauauggagcggcaggggaagaccccucugggacucguugaucuguuuguguucucuaccagcuuuuaccugauuuccaucuuccuucaccucgugaaaaucccgacacaucgccacauugucggcaagucuugccccaaaccucauagacugaaccacaugggcaucuguagcugcgggcuguauaagcagcccggagugccuguuaaguggaaacggugaggacuaguuauaagacugacuagcccgaugggccucccaacgggcccuccuccccuccuugcaccgagauuaauaaaaaaaaaaaaaaaaaaaaaaaaaaaaaaaaaaaaaaaaaaaaaaaaaaaaaaaaaaaaaaaaaaaaaaaaaaaaaaaaaaaaaaaaaaaaaaaaaaaa

SEQ ID NO: 15177 - RNA, 1662 nt, Artificial Sequence
  mRNA product Design i-3 (A100) comprising derived and/or modified sequence from LASV(LP;Clade I)__AAF86701__GPC (opt5)
aggagaaagcuuaccaugggccagaucauuaccuucuuucaagaggugccccacgucaucgaagagguuaugaacauugugcugaucgcccucagccugcuugcuauucugaaggggcucuacaauaucgccacaugcggaaucauuggccugguggcguuccuuuuucugugugggaaauccugcucucucacgcugaagggaggcuaugaacugcagacccucgagcugaacauggaaacacuuaauaugaccaugccucugagcuguaccaaaaacuccucucaucacuacaucagagucgggaaugagacaggacucgagcugacacuuaccaacacgagcauuaucaaucauaaguucugcaaccuguccgacgcucacaaaaagaaucucuaugaucaugcccugaugucuauuaucagcaccuuucaccuguccauuccgaacuucaaucaguacgaagccaugagcugugacuuuaacggcggcaagaucucugugcaguauaaucucucccacagcuacgcuggggaugccgcugagcauugcggaacaguugccaacggcgugcugcaaaccuucaugcggauggcguggggagggcgcuauaucgcccuugacucuggcaaagggaauugggauuguauuaugacauccuaccaguaccugaucauucagaacaccacgugggaagaccacugccaguuuagcagacccucuccuaucggauaucucggccugcuuucccaacggacacgcgauauuuacaucagcagacggcugcucggcaccuucacauggacccuguccgacucugaggggaacgagacccccggaggcuauugucugacacgcuggaugcucaucgaagcugagcugaagugcuuugggaauacggccgucgcuaaauguaacgaaaagcaugaugaggaguucugcgacaugcuuagacuguuugauuucaauaaacaggccauucggcgccucaaggcggaagcccagaugagcauccagcugauuaacaaggcugugaaugcccuuaucaacgaccaacugauuaugaaaaaucaccucagagauaucaugggaaucccuuacugcaacuauuccaaguacugguaucugaaucacaccagcucuggccggacaucccugcccaaauguuggcucauuagcaacgggucuuaccugaaugagacccaguucagcgacgacaucgaacagcaagcugauaacaugauuacagagaugcuucagaaggaauacaucgagcgccagggaaaaaccccucugggccucguugacauuuuuaucuucuccacgucuuuuuaucugauuagcaucuuccugcaucuuaucaagauuccgacacacagacauaucgugggcaaacccugcccuaagccccaccggcucaaucauaugggggucuguuccugcggacuguacaagcacccuggcgugcccaccaaauggaagcgcugaggacuaguuauaagacugacuagcccgaugggccucccaacgggcccuccuccccuccuugcaccgagauuaauaaaaaaaaaaaaaaaaaaaaaaaaaaaaaaaaaaaaaaaaaaaaaaaaaaaaaaaaaaaaaaaaaaaaaaaaaaaaaaaaaaaaaaaaaaaaaaaaaaaa

SEQ ID NO: 15178 - RNA, 1662 nt, Artificial Sequence
  mRNA product Design i-3 (A100) comprising derived and/or modified sequence from LASV(803213;Clade II)__AAF86703__GPC (opt5)
aggagaaagcuuaccaugggccagaucauuaccuucuuucaagaggugccccacgucaucgaagagguuaugaacauugugcugaucgcccucagccugcuugcuauucugaaggggaucuacaauguggccacaugcggacucuucggccugaucuccuuucuucugcucugugggagaucuugcagcgucacguauaaaggaguguacgaacugcagacccuggagcucaacauggcgaaucugaacaugacaaugccucuuuccuguaccaagaauaacucucaucacuauauuaugguuggcaaugaaacagggcuggagcucacccugacaaacaccagcaucauuaaucauaaauucugcaaccuuuccgacgcucacaagaaaaaucuguacgaucaugcccucaugucuaucauuagcacguuucaccuguccaucccgaacuucaaucaguaugaggccaugagcugugacuuuaacggaggcaagauuucugugcaguacaaucugucccacagcuucgcugucgaugccgcuaaccauugcggcaccaucgccaacggggugcuccaaacauuuaugcggauggcguggggaggcucuuauaucgcccuggacuccgggaagggaaauugggauuguauuaugaccagcuaccaguaccuuaucauucagaacacaaccugggaagaccacugccaguucucucgccccuccccuaucggcuaucuggggcuccugagccaaagaacgcgggauauuuacaucucccgcagacuucugggaacauuuaccuggacacucucugacagcgagggcaaugaagcucccggcggguauugucugacccgguggaugcugaucgaggccgagcucaaaugcuucggaaacaccgcuguugccaaguguaaugaaaaacaugaugaggaauuuugcgacaugcugcgccuuuucgauuucaacaagcaggcgauuaaaagacugaagacagaggcccagauguccauccagcucauuaauaaggcugugaacgcccugaucaaugaccaacuuauuaugaaaaaccaucugcgggauaucaugggcaucccuuacugcaauuauagccgcuacugguaucucaaccacacggucaccgggaagacaucucugcccagauguuggcugguguccaauggaagcuaccucaacgaaacccacuuuucugacgacauugagcagcaggcugauaauaugaucacagagaugcugcaaaaagaauacauggaccggcagggcaagaccccucuugggcugguggaucucuucgucuuuagcacguccuucuaucugauuucuaucuuucugcaccuuguuaaaauuccgacacaucgccacaucgugggaaagcccugcccuaaaccccauagacucaaccacaugggcauuuguagcugcggccuguacaagcacccuggggugcccgucaaguggaaacggugaggacuaguuauaagacugacuagcccgaugggccucccaacgggcccuccuccccuccuugcaccgagauuaauaaaaaaaaaaaaaaaaaaaaaaaaaaaaaaaaaaaaaaaaaaaaaaaaaaaaaaaaaaaaaaaaaaaaaaaaaaaaaaaaaaaaaaaaaaaaaaaaaaaa

SEQ ID NO: 15179 - RNA, 1662 nt, Artificial Sequence
  mRNA product Design i-3 (A100) comprising derived and/or modified sequence from LASV(GA391;Clade III)__CAA36645__GPC (opt5)
aggagaaagcuuaccaugggccagaucgugaccuucuuucaagaggucccccacguuauugaagaggugaugaacaucgugcugauugcccucagcauccuggcuauucuuaaggggcuguacaaugucgccacaugcggacucaucggccuggugacguuccuucugcucuccgggagaucuuguagccugaucuauaaaggaaccuacgaacugcagacacucgagcugaacauggaaacccuuaauaugacaaugccucuguccugcaccaagaacaauucucaucacuauauucggguuggcaacgagacagggcucgagcugacccuuacgaauaccagcauccugaaccauaaauuuuguaaucucuccgacgcgcacaagcgcaaccuguacgaucauucucugaugagcauuaucuccacauuccaccucagcauuccgaauuuuaaccaguaugaagcuaugucuugcgacuucaauggaggcaaaaucaccgugcaguacaaccugucccacagcuuugccgucgaugccgcuggccauugugggacacuugccaauggagugcugcaaaccuucaugagaauggcuuggggcgggucuuauauugcccucgacuccggacggggcaacugggauugcaucaugacgagcuaccaguaccugaucauucagaacacaaccugggacgaucacugucaguuuucucgccccuccccuaucggguaucuuggacugcucagccaaagaacacgggacauuuacaucucccgcagacugcugggcaccuucaccuggacacucucugauagcgagggcaaugaaacgcccgggggauauugccugacccgguggaugcuuauugaggcggagcugaaguguuuuggcaacacagccguugcuaagugcaaugaaaaacaugacgaggaguucugugauaugcuccgccuguuugacuucaacaagcaggccaucagacggcuuaaaaccgaagcucagauguccauccagcugauuaauaaggccgugaacgcgcucaucaaugaucaacugauuaugaaaaaccaucugcgcgacaucauggggauuccuuacugcaauuauagcagauacugguaucucaaccacacaucuaccggaaagacgucccugccccggugcuggcuuaucagcaauggcucuuaccugaacgaaacaaaguucagcgacgauaucgagcagcaggccgacaauaugauuaccgagaugcuccaaaaagaauacaucgaucgccaggggaagaccccucugggacuggucgaccuuuuuguguucuccacaucuuuuuaucucauuagcaucuuccugcaccuggugaaaauuccgacccacagacauaucgucggcaagcccuguccuaaaccccaccggcucaaccauaugggcauuugcuccugugggcuguacaagcagccuggaguucccgugagauggaaacgcugaggacuaguuauaagacugacuagcccgaugggccucccaacgggcccuccuccccuccuugcaccgagauuaauaaaaaaaaaaaaaaaaaaaaaaaaaaaaaaaaaaaaaaaaaaaaaaaaaaaaaaaaaaaaaaaaaaaaaaaaaaaaaaaaaaaaaaaaaaaaaaaaaaaa

SEQ ID NO: 15180 - RNA, 1665 nt, Artificial Sequence
  mRNA product Design i-3 (A100) comprising derived and/or modified sequence from LASV(AV;Clade V)__CCA30314__GPC (opt5)
aggagaaagcuuaccaugggccagaucgugaccuucuuucaagaggucccccacguuauugaagaggugaugaacaucgugcugauugcccucagcauccuggcuguccuuaaggggcuguacaauauugccacaugcggacucaucggccugaucacguuccuucugcucugugggagauccugcucuagcaaccuguauaaaggaguguacgaacugcagucccucgaccugaauauggagacccuuaacaugacaaugccucugucuuguaccaagaauaacagccaucacuauauucggguuggcaaugauacagggcucgaacugacccuuacaaacaccuccauccugaaucauaaauuuugcaaccucucugacgcgcacaagaaagaucuguacgaccaugcucugaugagcauuaucuccacguuccaccucagcauuccgaauuuuaaccaguaugaggccaugucuugugauuucaauggaggcaagaucuccgugcaguacaaccugagccacucuuaugccauugacgcugccaaucauugcggcaccgucgcuaacgggauccuucaaacauuuaugcgcauggccuggggaggcuccuacaucgcgcuggauagcgggagaggaaacugggacuguauuaugaccucuuaccaguaucucaucauucagaauacaaccugggagaaccacugccaguucucccggcccagcccuaucggcuaccuggggcuucugucccaacgcacgagagauauuuauaucucucggcgccuccugggaacauuuaccuggacacugagcgacuccgaaggcaaugccacccccggcggguacugucucaccagauggaugcugaucgaggcugaacuuaagugcuucggaaacacagccguggcuaaauguaaugagaagcaugaugaggaauuuugcgacaugcugcgccucuucgauuuuaacaaacaggccauuagccggcugaagucugaggcgcagauguccauccagcuuauuaauaaagccguuaacgcucugaucaaugaccaacucauuaugaagaaccaccugagagacaucaugggcaucccuuauugcaauuacagcaaguauugguaccugaaccacacgauuaccgggaaaacaucucuccccaaguguuggcuggugagcaauggauccuaccuuaacgaaacccauuucucugaugacaucgagcagcaggccgauaauaugauuacagaaaugcugcaaaaagaguauauggagcggcagggcaagaccccucucgggcuggucgaccuguucguguuuagcacguccuucuaccuuaucagcauuuuucuccgccuggugaaaaucccgacacacagacauauugucggaaagcccugcccuaaaccccaccggcugaaccauaugggcaucuguucuugcggccucuauaagcagccugggguucccgugcgcuggaagagaugaggacuaguuauaagacugacuagcccgaugggccucccaacgggcccuccuccccuccuugcaccgagauuaauaaaaaaaaaaaaaaaaaaaaaaaaaaaaaaaaaaaaaaaaaaaaaaaaaaaaaaaaaaaaaaaaaaaaaaaaaaaaaaaaaaaaaaaaaaaaaaaaaaaa

SEQ ID NO: 15181 - RNA, 1662 nt, Artificial Sequence
  mRNA product Design i-3 (A100) comprising derived and/or modified sequence from LASV(Togo/2016/7082;Clade VI)__AMR44577__GPC (opt5)
aggagaaagcuuaccaugggccagaucauuaccuucuuucaagaggugccccacgucaucgaagagguuaugaacauugugcugaucgcccucagccugcuugcuauucugaaggggguguacaaugucgccacaugcggaaucaucggccucgugacguuccuguuucuuugugggagauccugcucucugauuuauaaaggaagcuacgaacuccagacccuggagcugaacauggaaacacucaauaugaccaugccucuguccuguacaaagaacucuagccaucacuauauccggguuggcaaugagaccgggcuugagcugacacucaccaacacguccauuaucaaucauaaauucugcaaccugucugacgcgcacaagcgcaaucuuuacgaucaugcucugaugagcauucucuccaccuuucaccugagcaucccgaacuucaaucaguaugaagccaugucuugugacuuuaacggaggcaaaauuuccgugcaguacaaucugagccacgccuaugcugucgaugccgcugagcauugcggcacaguggccaacgggguucuccaaaccuucaugagaauggcguggggaggcucuuacaucgcccuggacuccgggcggggaaauugggauuguaucaugacaagcuaccaguaucuuauuauccagaacaccacgugggaagaccacugccaguuuucucgccccuccccuauuggcuaccuggggcuccugagccaaagaacacgggauaucuauauuucccgcagacuucugggaaccuucacauggacccucucugacagcgagggcaacgagacccccggcggguacugucugacacgguggaugcugaucgaagcugagcucaagugcuuuggaaauacggccguggcuaaguguaacgaaaaacaugaugaggaguucugcgacaugcugcgccuuuuugauuucaauaagcaggccauccagagacugaaauccgaagcgcagaugagcauucaacucaucaacaaggccgucaaugcucugauuaacgaccagcuuaucaugaaaaaucaucugcgggauaugaugggcauuccuuauugcaacuacucuaaguauugguaccucaaucacaccuccagcgggcgcacaucucugcccaaguguuggcuggugagcaacggauccuaccucaaugagacccacuucucugacgacaucgaacagcaagccgauaacaugaucacagagaugcugcagaaagaauauauugacagacagggcaagaccccucuugggcugguggaucucuuugucuucagcacguccuuuuaccugaucagcauuuuccugcaccuuaucaaaauuccgacacaucggcacaucguuggaaagcccugcccuaaaccccaucgccucaaucacaugggcauuuguucuugcggccuguauaagcagccuggggugcccaccagauggaaacggugaggacuaguuauaagacugacuagcccgaugggccucccaacgggcccuccuccccuccuugcaccgagauuaauaaaaaaaaaaaaaaaaaaaaaaaaaaaaaaaaaaaaaaaaaaaaaaaaaaaaaaaaaaaaaaaaaaaaaaaaaaaaaaaaaaaaaaaaaaaaaaaaaaaa

SEQ ID NO: 15182 - RNA, 1662 nt, Artificial Sequence
  mRNA product Design i-3 (A100) comprising derived and/or modified sequence from LASV(KAK-428;Clade n.d. (VII))__ANH09740__GPC (opt5)
aggagaaagcuuaccaugggccagaucgugaccuucuuucaagaggucccccacguuauugaagaggugaugaacaucgugcugauugcccucagccugcuugcuauccugaaggggcucuacaauuucgccacaugcggagucauuggccugaucacguuucuucugcucugugggagauccugcucugcgaccuauaaaggacaguacgaacugcagacacuggagcucaacauggaaagccugaauaugaccaugccucuuuccuguacaaagaacaauucucaucacuauauccgggcuggcaacaauaccgggcuggagcucacacugaccaacacgagcauuaucucccauaaauucugcaaucuuucugacgcccacaagaaaaaccuguacgaucauacccucaugagcauuaucacaaccuuucaccuguccauuccgaauuucaaccaguaugaggccaugagcugugacuuuaauggaggcaagaucucuauucaauacaaccugucccacagcuaugcuggcgaugccgcucagcauugcgggacaguggccaauggaguucuccagaccuucaugcgcauggcguggggcgggucuuaccuggcccuugacuccggaagacggggcugggauuguaucaucagcucuuaccaguaucugauuauccaaaacacgacaugggacgaucacugccaguuuucccgccccagcccuauuggguaccucggauucgugucccagaagaccagagacaucuauauuucucggcgccugcuuggcacauuuaccuggacccugagcgauuccgaaggccaugacaugcccgggggauacugucucacaagauggaugcugaucgaggcugaucugaaaugcuucggcaacacggccgucgcuaaguguaaugaaaaacacgacgaggaguuuugcgauauguggcgccucuucgacuucaacaagcaggccauccaacggcugaaagcggaagcccagaugaauauucagcuuaucaacaaggcugugaaugcccugauuaacgaccaacucaugaugaagaaucaccugagagauaucauggggauuccuuauugcaacuacagcaaauuuugguaucuuaauaacaccacaaccggacggacaucucugccccgcuguuggcucaucuccaauggcagcuaccugaacgagacccauuucucugacgauaucgaacagcaggcugacaauaugauuacggagaugcugcagaaggaauacauggauagacaagggaaaacaccucucggacugguugaccuuuuuguguucagcaccuccuuuuaucugaucaccauuuuccuccaccuggucaagaucccgacacaucggcacauugugggcaaacccugcccuaagccccaucgccugaaccacaugggcaucuguucuugcgggcuuuacaaacagccuggagugcccgucagauggaagcggugaggacuaguuauaagacugacuagcccgaugggccucccaacgggcccuccuccccuccuugcaccgagauuaauaaaaaaaaaaaaaaaaaaaaaaaaaaaaaaaaaaaaaaaaaaaaaaaaaaaaaaaaaaaaaaaaaaaaaaaaaaaaaaaaaaaaaaaaaaaaaaaaaaaa

SEQ ID NO: 15183 - RNA, 1662 nt, Artificial Sequence; identical to SEQ ID NO: 15177
  mRNA product Design i-3 (A100) comprising derived and/or modified sequence from LASV(Pinneo-NIG-1969;Clade I)__AIT17836__GPC (opt5)

SEQ ID NO: 15184 - RNA, 1662 nt, Artificial Sequence
  mRNA product Design i-3 (A100) comprising derived and/or modified sequence from LASV(ISTH0009-NIG-2011;Clade II)__AIT17404__GPC (opt5)
aggagaaagcuuaccaugggccagaucauuaccuucuuucaagaggugccccacgucaucgaagagguuaugaacauugugcugaucgcccucagccugcuugcuauucugaaggggaucuacaauguggccacaugcggacucuucggccuggucuccuuucuucugcucugugggagaucuugcagcacgaccuauaaaggaguguacgaacugcagacacuggagcucgacauggcgucccugaacaugaccaugccucuuucuuguacaaagaauaacagccaucacuauaucaugguuggcaaugaaaccgggcuggagcucacacugaccaacacguccauuaucaaucauaaauucugcaaccuuucugaugcucacaagaaaaaucuguacgaccaugcccucaugagcauuaucuccaccuuucaccugagcauuccgaacuucaaucaguaugaggccaugucuugugauuuuaacggaggcaagaucuccgugcaguacaaucugagccacgcuuaugccgucgacgcugccaaccauugcggcacaauugcgaauggggugcuccaaaccuucaugcggauggccuggggaggcucuuacaucgcucuggauuccgggaagggaagcugggacuguaucaugacaucuuaccaguaucuuauuauccagaacaccacgugggaagaucacugccaguuuucccgccccagcccuauuggcuaccuggggcuccugucccaaagaacacgggacaucuauauuucucgcagacuucugggaaccuucacauggacccucagcgauuccgagggcaacgaaacccccggcggguacugucugacacgguggaugcugaucgaggccgagcucaaaugcuuuggaaauacggcuguugccaaguguaacgaaaaacaugacgaggaguucugcgauaugcugcgccuuuuugacuucaauaagcaggcgaucagacggcugaaaaccgaagcccagaugagcauucagcucaucaacaaggcugugaaugcccugauuaacgaucaacuuaucaugaagaaucaucugcgcgacauuaugggcaucccuuauugcaacuacucuaaauauugguaccucaaucacacagucaccgggaagacaucccugcccagauguuggcuggugagcaacggaucuuaccucaaugaaacccacuucagcgacgauaucgagcagcaggcugacaacaugauuacggagcugcuucaaaaagaauauauggaucggcagggcaagacaccucuggggcucguggaccuguuugucuucuccaccucuuuuuaccugaucagcauuuuccuucaccucaucaaaauuccgacccaucgccacaucacaggaaagcccugcccuaaaccccauagacugaaucacaugggcauuuguuccugcggccuguauaagcacccugggguucccgugaaguggaaacggugaggacuaguuauaagacugacuagcccgaugggccucccaacgggcccuccuccccuccuugcaccgagauuaauaaaaaaaaaaaaaaaaaaaaaaaaaaaaaaaaaaaaaaaaaaaaaaaaaaaaaaaaaaaaaaaaaaaaaaaaaaaaaaaaaaaaaaaaaaaaaaaaaaaa

SEQ ID NO: 15185 - RNA, 1662 nt, Artificial Sequence
  mRNA product Design i-3 (A100) comprising derived and/or modified sequence from LASV(ISTH2010-NIG-2012;Clade II)__AIT17482__GPC (opt5)
aggagaaagcuuaccaugggccagaucauuaccuucuuucaagaggugccccacgucaucgaagagguuaugaacauugugcugaucgcccucagccugcuugcuauucugaaggggaucuacaauguggccacaugcggacucuucggccuggucuccuuucuucugcucugugggagaucuugcagcacgaccuauaaaggaguguacgaacugcagacacuggagcucgacauggcgucccugaacaugaccaugccucuuucuuguacaaagaauaacagccaucacuauaucaugguuggcaaugaaaccgggcuggagcucacacugaccaacacguccauuaucaaucauaaauucugcaaccuuucugaugcucacaagaaaaaucuguacgaccaugcccucaugagcauuaucuccaccuuucaccugagcauuccgaacuucaaucaguaugaggccaugucuugugauuuuaacggaggcaagaucuccgugcaguacaaucugagccacgcuuaugccgucgacgcugccaaccauugcggcacaauugcgaauggggugcuccaaaccuucaugcggauggccuggggaggcucuuacaucgcucuggauuccgggaagggaagcugggacuguaucaugacaucuuaccaguaucuuauuauccagaacauuaccugggaagaucacugccaguuuucccgccccagcccuaucggcuaccuggggcuccugucccaaagaacgcgggacauuuauaucucucgcagacuucugggaacauucaccuggacacucagcgauuccgagggcaacgaaacccccggcggguacugucugacccgguggaugcugaucgaggccgagcucaaaugcuuuggaaauacagcuguugccaaguguaacgaaaaacaugacgaggaguucugcgauaugcugcgccuuuuugacuucaauaagcaggcgauuagacggcugaaaacggaagcccagaugagcauccagcucauuaacaaggcugugaaugcccugaucaacgaucaacuuauuaugaagaaucaucugcgcgacaucaugggcaucccuuauugcaacuacucuaaauauugguaccucaaucacaccgucacagggaagaccucccugcccagauguuggcuggugagcaacggaucuuaccucaaugaaacacacuucagcgacgauauugagcagcaggcugacaacaugaucaccgagcugcuucaaaaagaauauauugaucggcagggcaagacgccucuggggcucguggaccuguuugucuucuccacaucuuuuuaccugaucagcauuuuccuucaccucguuaaaaucccgacccaucgccacguggugggaaagcccugcccuaaaccccauagacugaaucacaugggcauuuguuccugcggccuguauaagcacccugggguccccgugaaguggaaacggugaggacuaguuauaagacugacuagcccgaugggccucccaacgggcccuccuccccuccuugcaccgagauuaauaaaaaaaaaaaaaaaaaaaaaaaaaaaaaaaaaaaaaaaaaaaaaaaaaaaaaaaaaaaaaaaaaaaaaaaaaaaaaaaaaaaaaaaaaaaaaaaaaaaa

SEQ ID NO: 15186 - RNA, 1662 nt, Artificial Sequence
  mRNA product Design i-3 (A100) comprising derived and/or modified sequence from LASV(Lassa virus/H.sapiens-wt/NGA/2015/ISTH_0543;Clade II)__AVO03639__GPC (opt5)
aggagaaagcuuaccaugggccagaucauuaccuucuuucaagaggugccccacgucaucgaagagguuaugaacauugugcugaucgcccucagccugcuugcuauucugaaggggaucuacaauguggccacaugcggacucuucggccuggucuccuuucuucugcucugugggagaucuugcagcacgaccuauaaaggaguguacgaacugcagacacuggagcucgacauggcgaaccugaauaugaccaugccucuuuccuguacaaagaacaauucucaucacuauaucaugguuggcaacgaaaccgggcuggagcucacacugaccaauacgagcauuaucaaccauaaauucugcaaucuuuccgaugcucacaagaaaaaccuguacgaccaugcccucaugucuauuaucagcaccuuucaccuguccauuccgaauuucaaccaguaugaggccaugagcugugauuuuaauggaggcaagaucucugugcaguacaaccugucccacacauaugcugucgacgccgcuaaucauugcggcaccauugccaacggggugcuccaaacauucaugcggauggcguggggaggcagcuacaucgcccuggauucugggaagggauccugggacuguaucaugaccagcuaccaguaucuuguuauucagaacacgacaugggaagaucacugccaguuuucucgccccuccccuaucggcuaccuggggcuccugagccaaagaacccgggacauuuauaucucccgcagacuucugggaacauucaccuggacccucucugauagcgagggcaaugaaacacccggcggguacugucugacgcgguggaugcugauugaggcugagcucaaaugcuuuggaaacaccgccguggcuaaguguaaugaaaaacaugacgaggaguucugcgauaugcugcgccuuuuugacuucaacaagcaggccaucagacggcugaaaacagaagcgcagauguccauccagcucauuaauaaggccgucaacgcucugaucaaugaucaacuuauuaugaagaaccaucugcgcgacaucaugggcauuccuuauugcaauuacagcaaauauugguaccucaaccacaccgugacagggaagaccucucugcccagauguuggcugguguccaauggaagcuaccucaacgaaacgcacuucucugacgauaucgagcagcaggccgacaauaugaucacagagcugcuucaaaaagaauauauugaucggcagggcaagaccccucuggggcucgucgaccuguuuguuuucagcaccuccuuuuaccugaucucuauuuuccuucaccucgugaaaaucccgacacaucgccacauuaccggaaagcccugcccuaaaccccauagacugaaccacaugggcaucuguagcugcggccuguauaagcacccuggggugcccgucaaguggaaacggugaggacuaguuauaagacugacuagcccgaugggccucccaacgggcccuccuccccuccuugcaccgagauuaauaaaaaaaaaaaaaaaaaaaaaaaaaaaaaaaaaaaaaaaaaaaaaaaaaaaaaaaaaaaaaaaaaaaaaaaaaaaaaaaaaaaaaaaaaaaaaaaaaaaa

SEQ ID NO: 15187 - RNA, 1662 nt, Artificial Sequence
  mRNA product Design i-3 (A100) comprising derived and/or modified sequence from LASV(Lassa virus/H.sapiens-wt/NGA/2016/ISTH_0009;Clade II)__AVO03571__GPC (opt5)
aggagaaagcuuaccaugggccagaucauuaccuucuuucaagaggugccccacgucaucgaagagguuaugaacauugugcugaucgcccucagccugcuugcuauucugaaggggaucuacaauguggccacaugcggacuccugggccuugucuccuuccugcuccugugugggagaucuugcagcacgaccuauaaaggaguguacgaacugcagacacucgagcuggacauggcgucccuuaacaugaccaugccucugucuuguacaaagaauaacagccaucacuauaucaugguuggcaaugaaaccgggcucgagcugacacuuaccaacacguccauuaucaaucauaaauuuugcaaccugucugaugcucacaagaaaaaucucuacgaccaugcccugaugagcauuaucuccaccuuccaccugagcauuccgaacuuuaaucaguaugaggccaugucuugugauuucaacggaggccggaucuccgugcaguacaaucucagccacucuuaugcugucgacgccgcuaaccauugcggcacaauugccaauggggugcugcaaaccuuuaugcgcauggcguggggaggcuccuacaucgcccuugauagcgggaagggaucuugggacuguaucaugacauccuaccaguaucugauuauccagaacaccacgugggaagaucacugccaguucagcagacccuccccuauuggcuaccucgggcugcuuucucaacggacacgcgacaucuauauuagcagacggcugcucggaaccuuuacauggacccuguccgauagcgagggcaacgaaacccccggcggguacugucugacacgcuggaugcucaucgaggcugagcugaagugcuucggaaauacggccguugcuaaauguaacgaaaagcaugacgaggaauuuugcgauaugcuuagacuguucgacuuuaauaaacaggccauccggcgccucaagaccgaggcgcagaugucuauucagcugaucaacaaagccgugaaugcucuuauuaacgaucaacugaucaugaagaaucaccucagagacauuaugggcaucccuuauugcaacuacuccaaguauugguaccugaaucacacagucaccgggaaaacaagccugccccgguguuggcucgugucuaacggaagcuaccugaaugaaacccauuucuccgacgauaucgagcagcaggccgacaacaugauuacggagcuucugcaaaaggaauauaucgaucgccagggcaaaacaccucucgggcugguggaccuguucgucuuuucuaccagcuucuaccuuauuuccaucuuucuccaccugguuaagauuccgacccauagacacaucacaggaaaacccugcccuaagccccaucggcugaaucacaugggcauuuguagcugcggccucuauaaccacccuggggugcccgugaaauggaagcgcugaggacuaguuauaagacugacuagcccgaugggccucccaacgggcccuccuccccuccuugcaccgagauuaauaaaaaaaaaaaaaaaaaaaaaaaaaaaaaaaaaaaaaaaaaaaaaaaaaaaaaaaaaaaaaaaaaaaaaaaaaaaaaaaaaaaaaaaaaaaaaaaaaaaa

SEQ ID NO: 15188 - RNA, 1662 nt, Artificial Sequence
  mRNA product Design i-3 (A100) comprising derived and/or modified sequence from LASV(Lassa virus/H.sapiens-wt/NGA/2016/ISTH_0017;Clade II)__AVO03567__GPC (opt5)
aggagaaagcuuaccaugggccagaucauuaccuucuuucaagaggugccccacgucaucgaagagguuaugaacauugugcugaucgcccucagccugcuugcuauucugaaggggaucuacaauguggccacaugcggacucuucggccuggucuccuuucuucugcucugugggagaucuugcagcacgaccuauaaaggaguguacgaacugcagacacuggagcucgacauggcgucccugaacaugaccaugccucuuucuuguacaaagaauaacagccaucacuauaucaugguuggcaaugaaaccgggcuggagcucacacugaccaacacguccauuaucaaucauaaauucugcaaccuuucugaugcucacaagaaaaaucuguacgaccaugcccucaugagcauuaucuccaccuuucaccugagcauuccgaacuucaaucaguaugaggccaugucuugugauuuuaacggaggcaagaucuccgugcaguacaaucugagccacacauaugcuauugacgccgcuaaccauugcggcaccaucgccaaugggguccuccaaacauucaugcggauggcguggggaggcucuuacaucgcccuggauuccgggaagggaagcugggacuguauuaugaccucuuaccaguaucuuaucauucagaacacgacaugggaagaucacugccaguuuucccgccccagcccuaucggcuaccuggggcuccugucccaaagaacccgggacauuuauaucucucgcagacuucugggaacauucaccuggacccucagcgauuccgagggcaacgaaacacccggcggguacugucugacgcgguggaugcugaucgaggcugagcucaaaugcuuuggaaauaccgccguggcuaaguguaacgaaaaacaugacgaggaguucugcgauaugcugcgccuuuuugacuucaauaagcaggccauuagacggcugaaaacagaagcgcagaugagcauccagcucauuaacaaggccguuaaugcucugaucaacgaucaacuuauuaugaagaaucaucugcgcgacaucaugggcaucccuuauugcaacuacucuaaauauugguaccucaaucacaccgugacagggaagaccucccugcccagauguuggcuggucagcaacggaucuuaccucaaugaaacgcacuucagcgacgauauugagcagcaggccgacaacaugaucacagagcugcuucaaaaagaauauauggaucggcagggcaagaccccucuggggcucguggaccuguuuguguucuccaccucuuuuuaccugauuagcaucuuccuucaccucguccgcauuccgacacauagacacguuaucggaaaacccugcccuaagccccaucggcugaaucacaugggcauuuguuccugcggccuguauaaacacccuggggugcccgugaaguggaagcgcugaggacuaguuauaagacugacuagcccgaugggccucccaacgggcccuccuccccuccuugcaccgagauuaauaaaaaaaaaaaaaaaaaaaaaaaaaaaaaaaaaaaaaaaaaaaaaaaaaaaaaaaaaaaaaaaaaaaaaaaaaaaaaaaaaaaaaaaaaaaaaaaaaaaa

SEQ ID NO: 15189 - RNA, 1662 nt, Artificial Sequence
  mRNA product Design i-3 (A100) comprising derived and/or modified sequence from LASV(Lassa virus/H.sapiens-wt/NGA/2018/ISTH_0959;Clade II)__AVV65099__GPC (opt5)
aggagaaagcuuaccaugggccagaucauuaccuucuuucaagaggugccccacgucaucgaagagguuaugaacauugugcugaucgcccucagccugcuugcuauucugaaggggaucuacaauguggucacaugcggacucuucggccugguguccuuucuucugcucugugggagaucuugcagcacgaccuauaaaggaguuuacgaacugcagacacuggagcucgacauggccucccugaacaugaccaugccucuuucuuguacaaagaauaacagccaucacuauaucauggugggcaaugaaaccgggcuggagcucacacugaccaacacguccauuaucaaucauaaauucugcaaccuuucugaugcgcacaagaaaaaucuguacgaccaugcucucaugagcauuaucuccaccuuucaccugagcauuccgaacuucaaucaguaugaggccaugucuugugauuuuaacggaggcaagaucuccguccaguacaaucugagccacgccuaugcuauugacgccgcuaaccauugcggcacaaucgccaauggggugcuccaaaccuucaugcggauggcguggggaggcucuuacaucgcccuggauuccgggaagggaagcugggacuguauuaugacaucuuaccaguaucuuaucauucagaacaccacgugggaagaucacugccaguuuucccgccccagcccuaucggcuaccuggggcuccugucccaaagaacacgggacauuuauaucucucgcagacuucugggaaccuucacauggacccucagcgauuccgagggcaacgaaacccccggcggguacugucugacacgguggaugcugaucgaggcugagcucaaaugcuuuggaaauacggccguugcuaaguguaacgaaaaacaugacgaggaguucugcgauaugcugcgccuuuuugacuucaauaagcaggccauuagacggcugaaaaccgaagcgcagaugagcauccagcucauuaacaaggccgugaaugcucugaucaacgaucaacuuauuaugaagaaucaucugcgcgacaucaugggcaucccuuauugcaacuacucuaaauauugguaccucaaucacacagucaccgggaagacaucccugcccagauguuggcuggugagcaacggaucuuaccucaaugaaacccacuucagcgacgauauugagcagcaggccgacaacaugaucacggagcugcuucaaaaagaauauauugaucggcagggcaagacaccucuggggcucguggaccuguuugucuucuccaccucuuuuuaccugaucagcauuuuccuucaccucguuaaaaucccgacccaucgccacgugauuggaaagcccugcccuaaaccccauagacugaaucacaugggcaucuguuccugcggccuguauaagcacccuggggugcccgucaaguggaaacggugaggacuaguuauaagacugacuagcccgaugggccucccaacgggcccuccuccccuccuugcaccgagauuaauaaaaaaaaaaaaaaaaaaaaaaaaaaaaaaaaaaaaaaaaaaaaaaaaaaaaaaaaaaaaaaaaaaaaaaaaaaaaaaaaaaaaaaaaaaaaaaaaaaaa

SEQ ID NO: 15190 - RNA, 1662 nt, Artificial Sequence
  mRNA product Design i-3 (A100) comprising derived and/or modified sequence from LASV(LASV003-NIG-2008;Clade II)__AIT17580__GPC (opt5)
aggagaaagcuuaccaugggccagaucauuaccuucuuucaagaggugccccacgucaucgaagagguuaugaacauugugcugaucgcccucagccugcuugcuauucugaaggggaucuacaauguggccacaugcggacucuucggccuggucuccuuucuucugcucugugggagaucuugcagcacgaccuauaaaggaguguacgaacugcagacacuggagcucgacauggcgucccugaacaugaccaugccucuuucuuguacaaagaauaacagccaucacuauaucaugguuggcaaugaaaccgggcuggagcucacacugaccaacacguccauuaucaaucauaaauucugcaaccuuucugaugcucacaagaaaaaucuguacgaccaugcccucaugagcauuaucuccaccuuucaccugagcauuccgaacuucaaucaguaugaggccaugucuugugauuuuaacggaggcaagaucuccgugcaguacaaucugagccacacauaugcugucgacgccgcuaaccauugcggcaccauugccaauggggugcuccaaacauucaugcggauggcguggggaggcucuuacaucgcccuggauuccgggaagggaagcugggacuguaucaugaccucuuaccaguaucuuauuauccagaacacgacaugggaagaucacugccaguuuucccgccccagcccuauuggcuaccuggggcuccugucccaaagaacccgggacaucuauauuucucgcagacuucugggaacauucaccuggacccucagcgauuccgagagcaacgaaacacccggcggcuacugucugacgcgguggaugcugaucgaggcugagcucaaaugcuuugggaauaccgccguugcuaaguguaacgaaaaacaugacgaggaguucugcgauaugcugcgccuuuuugacuucaauaagcaggccaucagacggcugaaagcggaagcccagaugucuauucagcucaucaacaaggcugugaaugcccugauuaacgaucaacuuaucaugaagaaucaucugcgcgacauuaugggaaucccuuauugcaacuacuccaaauauugguaccucaaucacacagucaccggcagaacaagccugccccgguguuggcuggugucuaacgggagcuaccucaaugaaacccacuucuccgacgauaucgagcagcaggcugacaacaugauuacggagcugcuucaaaaggaauauauggaucgccagggaaaaacaccucugggccucguggaccuguuugucuucucuaccagcuuuuaccugaucuccauuuuccuucaccucguuaagaucccgacccauagacacgugauugggaaacccugcccuaagccccaucggcugaaucacaugggaaucuguagcugcggccuguauaaacacccuggcgugcccgucaaguggaagcgcugaggacuaguuauaagacugacuagcccgaugggccucccaacgggcccuccuccccuccuugcaccgagauuaauaaaaaaaaaaaaaaaaaaaaaaaaaaaaaaaaaaaaaaaaaaaaaaaaaaaaaaaaaaaaaaaaaaaaaaaaaaaaaaaaaaaaaaaaaaaaaaaaaaaa

SEQ ID NO: 15191 - RNA, 1662 nt, Artificial Sequence
  mRNA product Design i-3 (A100) comprising derived and/or modified sequence from LASV(LASV035-NIG-2009;Clade II)__AIT17588__GPC (opt5)
aggagaaagcuuaccaugggccagaucauuaccuucuuucaagaggugccccacgucaucgaagagguuaugaacauugugcugaucgcccucagccugcuugcuauucugaaggggaucuacaauguggccacaugcggacucuucggccuggucuccuuucuucugcucugugggagaucuugcagcacgaccuauaaaggaguguacgaacugcagacacuggagcucgacauggcgucccugaacaugaccaugccucuuucuuguacaaagaauaacagccaucacuauaucaugguuggcaaugaaaccgggcuggagcucacacugaccaacacguccauuaucaaucauaaauucugcaaccuuucugaugcucacaagaaaaaucuguacgaccaugcccucaugagcauuaucuccaccuuucaccugagcauuccgaacuucaaucaguaugaggccaugucuugugauuuuaacggaggcaagaucuccgugcaguacaaucugagccacgcuuaugccgucgacgcugccaaccauugcggcacaauugcgaauggggugcuccaaaccuucaugcggauggccuggggaggcucuuacaucgcucuggauuccgggaagggaagcugggacuguaucaugacaucuuaccaguaucuuauuauccagaacaccacgugggaagaucacugccaguuuucccgccccagcccuauuggcuaccuggggcuccugucccaaagaacacgggacaucuauauuucucgcagacuucugggaaccuucacauggacccucagcgauuccgagggcaacgaaacccccggcggguacugucugacacgguggaugcugaucgaggccgagcucaaaugcuuuggaaauacggcuguugccaaguguaacgaaaaacaugacgaggaguucugcgauaugcugcgccuuuuugacuucaauaagcaggcgaucagacggcugaaagccgaagcucagaugagcauucagcucaucaacaaggccgugaaugcucugauuaacgaucaacuuaucaugaagaaucaucugcgcgacauuaugggcaucccuuauugcaacuacucuaaauauugguaccucaaucacaccgucacagggaagaccucccugcccagauguuggcuggugagcaacggaucuuaccucaaugaaacacacuucagcgacgauaucgagcagcaggccgacaacaugauuaccgagcugcuucaaaaagaauauaucgaucggcagggcaagacgccucuggggcucguggaccuguuugucuucuccacaucuuuuuaccugauuagcaucuuccuucaccucguuaaaauuccgacccaucgccacgugaucggaaagcccugcccuaaaccccauagacugaaucacaugggcauuuguuccugcggccuguauaagcacccuggggugcccgucaaguggaaacggugaggacuaguuauaagacugacuagcccgaugggccucccaacgggcccuccuccccuccuugcaccgagauuaauaaaaaaaaaaaaaaaaaaaaaaaaaaaaaaaaaaaaaaaaaaaaaaaaaaaaaaaaaaaaaaaaaaaaaaaaaaaaaaaaaaaaaaaaaaaaaaaaaaaa

SEQ ID NO: 15192 - RNA, 1662 nt, Artificial Sequence
  mRNA product Design i-3 (A100) comprising derived and/or modified sequence from LASV(LASV1000-NIG-2009;Clade II)__AIT17782__GPC (opt5)
aggagaaagcuuaccaugggccagaucauuaccuucuuucaagaggugccccacgucaucgaagagguuaugaacauugugcugaucgcccucagccugcuugcuauucugaaggggaucuacaauguggccacaugcggacucuucggccuggucuccuuucuucugcucugugggagaucuugcagcacgaccuauaaaggaguguacgaacugcagacacuggagcucgacauggcgucccugaacaugaccaugccucuuucuuguacaaagaauaacagccaucacuauaucaugguuggcaaugaaaccgggcuggagcucacacugaccaacacguccauuaucaaucauaaauucugcaaccuuucugaugcucacaagaaaaaucuguacgaccaugcccucaugagcauuaucuccaccuuucaccugagcauuccgaacuucaaucaguaugaggccaugucuugugauuuuaacggaggcaagaucuccgugcaguacaaucugagccacacauaugcugucgacgccgcuaaccauugcggcaccauugccaauggggugcuccaaacauucaugcggauggcguggggaggcucuuacaucgcccuggauuccgggaagggaagcugggacuguaucaugaccucuuaccaguaucuuauuauccagaacacgacaugggaagaucacugccaguuuucccgccccagcccuauuggcuaccuggggcuccugucccaaagaacccgggacaucuauauuucucgcagacuucugggaacauucaccuggacccucagcgauuccgagggcaacgaaacacccggcggguacugucugacgcgguggaugcugaucgaggcugagcucaaaugcuuuggaaauaccgccguugcuaaguguaacgaaaaacaugacgaggaguucugcgauaugcugcgccuuuuugacuucaauaagcaggccaucaaaagacugaagacagaagcgcagaugagcauucagcucaucaacaaggccgugaaugcucugauuaacgaucaacuuaucaugaaaaaucaucugcgggacauuaugggcaucccuuauugcaacuacucuaaguauugguaccucaaucacaccgucacagggaaaaccucccugccccgcuguuggcuggugagcaacggaucuuaccucaaugaaacgcacuucagcgacgauaucgagcagcaggccgacaacaugauuacagagcugcuucaaaaggaauauaucgauagacagggcaaaaccccucuggggcucguggaccuguuugucuucuccaccucuuuuuaccugauuagcaucuuccuucaccucguuaagauuccgacacaucggcacguggugggaaaacccugcccuaagccccaucgccugaaucacaugggcaucuguuccugcggccuguauaagcacccugggguccccgugaaauggaagagaugaggacuaguuauaagacugacuagcccgaugggccucccaacgggcccuccuccccuccuugcaccgagauuaauaaaaaaaaaaaaaaaaaaaaaaaaaaaaaaaaaaaaaaaaaaaaaaaaaaaaaaaaaaaaaaaaaaaaaaaaaaaaaaaaaaaaaaaaaaaaaaaaaaaa

SEQ ID NO: 15193 - RNA, 1662 nt, Artificial Sequence
  mRNA product Design i-3 (A100) comprising derived and/or modified sequence from LASV(LASV221-NIG-2010;Clade II)__AIT17624__GPC (opt5)
aggagaaagcuuaccaugggccagaucauuaccuucuuucaagaggugccccacgucaucgaagagguuaugaacauugugcugaucgcccucagccugcuugcuauucugaaggggaucuacaauguggccacaugcggacucuucggccuggucuccuuucuucugcucugugggagaucuugcagcacgaccuauaaaggaguguacgaacugcagacacuggagcucgacauggcgucccugaacaugaccaugccucuuucuuguacaaagaauaacagccaucacuauaucaugguuggcaaugaaaccgggcuggagcucacacugaccaacacguccauuaucaaucauaaauucugcaaccuuucugaugcucacaagaaaaaucuguacgaccaugcccucaugagcauuaucuccaccuuucaccugagcauuccgaacuucaaucaguaugaggccaugucuugugauuuuaacggaggcaagaucuccgugcaguacaaucugagccacacauaugcuauugacgccgcuaaccauugcggcaccaucgccaaugggguccuccaaacauucaugcggauggcguggggaggcucuuacaucgcccuggauuccgggaagggaagcugggacuguauuaugaccucuuaccaguaucuuaucauucagaacacgacaugggaagaucacugccaguuuucccgccccagcccuaucggcuaccuggggcuccugucccaaagaacccgggacauuuauaucucucgcagacuucugggaacauucaccuggacccucagcgauuccgagggcaacgaaacacccggcggguacugucugacgcgguggaugcugaucgaggcugagcucaaaugcuuuggaaauaccgccguggcuaaguguaacgaaaaacaugacgaggaguucugcgauaugcugcgccuuuuugacuucaauaagcaggccauuagacggcugaaaacagaagcgcagaugagcauccagcucauuaacaaggccguuaaugcucugaucaacgaucaacuuauuaugaagaaucaucugcgcgacaucaugggcaucccuuauugcaacuacucuaaauauugguaccucaaucacaccgugacagggaagaccucccugcccagauguuggcuggucagcaacggaucuuaccucaaugaaacgcacuucagcgacgauauugagcagcaggccgacaacaugaucacagagaugcugcaaaaagaauauauggaucggcagggcaagaccccucuugggcugguggaccucuuuguguucuccaccucuuuuuaccugauuagcaucuuccugcaccuugucaaaauuccgacacaucgccacguuaucggaaagcccugcccuaaaccccauagacucaaucacaugggcauuuguuccugcggccuguauaagcacccuggggugcccgugaaguggaaacggugaggacuaguuauaagacugacuagcccgaugggccucccaacgggcccuccuccccuccuugcaccgagauuaauaaaaaaaaaaaaaaaaaaaaaaaaaaaaaaaaaaaaaaaaaaaaaaaaaaaaaaaaaaaaaaaaaaaaaaaaaaaaaaaaaaaaaaaaaaaaaaaaaaaa

SEQ ID NO: 15194 - RNA, 1662 nt, Artificial Sequence
  mRNA product Design i-3 (A100) comprising derived and/or modified sequence from LASV(LASV237-NIG-2010;Clade II)__AIT17638__GPC (opt5)
aggagaaagcuuaccaugggccagaucauuaccuucuuucaagaggugccccacgucaucgaagagguuaugaacauugugcugaucgcccucagccugcuugcuauucugaaggggaucuacaauguggccacaugcggacucuucggccuggucuccuuucuucugcucugugggagaucuugcagcacgaccuauaaaggaguguacgaacugcagacacuggagcucgacauggcgucccugaacaugaccaugccucuuucuuguacaaagaauaacagccaucacuauaucaugguuggcaaugaaaccgggcuggagcucacacugaccaacacguccauuaucaaucauaaauucugcaaccuuucugaugcucacaagaaagaccuguacgaucaugcccucaugagcauuaucuccaccuuucaccugagcauuccgaauuucaaccaguaugaggccaugucuugugacuuuaauggaggcaagaucuccgugcaguacaaccugagccacacauaugcugucgaugccgcuaaucauugcggcaccauugccaacggggugcuccaaacauucaugcggauggcguggggaggcucuuacaucgcccuggacuccgggaagggaagcugggauuguaucaugaccucuuaccaguaucuuauuauccagaauacgacaugggaagaccacugccaguuuucccgccccagcccuauuggcuaccuggggcuccugucccaaagaacccgggauaucuauauuucucgcagacuucugggaacauucaccuggacccucagcgacuccgagggcaacgaaacacccggcggguacugucugacgcgguggaugcugaucgaggcugagcucaaaugcuuuggaaacaccgccguugcuaaguguaaugaaaaacaugaugaggaguucugcgacaugcugcgccuuuuugauuucaacaagcaggccaucagacggcugaaaacagaagcgcagaugagcauucagcucaucaauaaggccgugaacgcucugauuaaugaccaacuuaucaugaagaaccaucugcgcgacauuaugggcaucccuuauugcaauuacucuaaauauugguaccucaaccacaccgucacagggaagaccucccugcccagauguuggcuggugagcaauggaucuuaccucaacgaaacgcacuucagcgaugacaucgagcagcaggccgauaauaugauuacagagcugcuucaaaaagaauauauggaccggcagggcaagaccccucuggggcucguggaucuguuugucuucuccaccucuuuuuaccugaucagcauuuuccuucaccucaucaaaauuccgacacaucgccacaucaccggaaagcccugcccuaaaccccauagacugaaccacaugggcauuuguuccugcggccuguauaagcacccugggguucccgugaaguggaaacggugaggacuaguuauaagacugacuagcccgaugggccucccaacgggcccuccuccccuccuugcaccgagauuaauaaaaaaaaaaaaaaaaaaaaaaaaaaaaaaaaaaaaaaaaaaaaaaaaaaaaaaaaaaaaaaaaaaaaaaaaaaaaaaaaaaaaaaaaaaaaaaaaaaaa

SEQ ID NO: 15195 - RNA, 1662 nt, Artificial Sequence
  mRNA product Design i-3 (A100) comprising derived and/or modified sequence from LASV(LASV253-NIG-2011;Clade II)__AIT17670__GPC (opt5)
aggagaaagcuuaccaugggccagaucauuaccuucuuucaagaggugccccacgucaucgaagagguuaugaacauugugcugaucgcccucagccugcuugcuauucugaaggggaucuacaauguggccacaugcggacucuucggccuggucuccuuucuucugcucugugggagaucuugcagcacgaccuauaaaggaguguacgaacugcagacacuggagcucgacauggcgucccugaacaugaccaugccucuuucuuguacaaagaauaacagccaucacuauaucaugguuggcaaugaaaccgggcuggagcucacacugaccaacacguccauuaucaaucauaaauucugcaaccuuucugaugcucacaagaaaaaucuguacgaccaugcccucaugagcauuaucuccaccuuucaccugagcauuccgaacuucaaucaguaugaggccaugucuugugauuuuaacggaggcaagaucuccgugcaguacaaucugagccacacauaugcugucgacgccgcuaaccauugcggcaccauugccaauggggugcuccaaacauucaugcggauggcguggggaggcucuuacaucgcccuggauuccgggaagggaagcugggacuguaucaugaccucuuaccaguaucuuauuauccagaacacgacaugggaagaucacugccaguuuucccgccccagcccuauuggcuaccuggggcuccugucccaaagaacccgggacaucuauauuucucgcagacuucugggaacauucaccuggacccucagcgauuccgagggcaacgaaacacccggcggguacugucugacgcgguggaugcugaucgaggcugagcucaaaugcuuuggaaauaccgccguugcuaaguguaacgaaaaacaugacgaggaguucugcgauaugcugcgccuuuuugacuucaauaagcaggccaucagacggcugaaagcggaagcccagaugagcauucagcucaucaacaaggcugugaaugcccugauuaacgaucaacuuaucaugaagaaucaucugcgcgacauuaugggcaucccuuauugcaacuacucuaaauauugguaccucaaucacacagucaccgggagaacaucccugccccgguguuggcuggugagcaacggaucuuaccucaaugaaacccacuucagcgacgauaucgagcagcaggcugacaacaugauuacggagcugcuucaaaaggaauauaucgaucgccagggcaaaacaccucuggggcucguggaccuguuugucuucuccaccucuuuuuaccugauuagcaucuuccuucaccucguuaagauuccgacccauagacacaucauuggaaaacccugcccuaagccccaucggcugaaucacaugggcaucuguuccugcggccuguauaaacacccuggggugcccgugaaguggaagcgcugaggacuaguuauaagacugacuagcccgaugggccucccaacgggcccuccuccccuccuugcaccgagauuaauaaaaaaaaaaaaaaaaaaaaaaaaaaaaaaaaaaaaaaaaaaaaaaaaaaaaaaaaaaaaaaaaaaaaaaaaaaaaaaaaaaaaaaaaaaaaaaaaaaaa

SEQ ID NO: 15196 - RNA, 1662 nt, Artificial Sequence
  mRNA product Design i-3 (A100) comprising derived and/or modified sequence from LASV(LASV254-NIG-2011;Clade II)__AIT17674__GPC (opt5)
aggagaaagcuuaccaugggccagaucauuaccuucuuucaagaggugccccacgucaucgaagagguuaugaacauugugcugaucgcccucagccugcuugcuauucugaaggggaucuacaauguggccacaugcggacucuucggccuggucuccuuucuucugcucugugggagaucuugcagcacgaccuauaaaggaguguacgaacugcagacacuggagcucgacaugaccaaccugaauaugacaaugccucuuuccuguaccaagaacaauucucaucacuauaucaugguuggcaacgaaacagggcuggagcucacccugacgaauaccagcauuaucaaccauaaauucugcaaucuuuccgaugcgcacaagaaaaaccuguacaaucaugcucucaugucuauuaucagcacauuucaccuguccauuccgaacuucaaucaguaugaggccaugagcugugacuuuaacggaggcaagaucucugugcaguacaaucugucccacagcuaugccgucgaugcugccaaccauugcggcaccauugcuaacggggugcuccaaacauucaugcggauggccuggggaggcucuuacaucgcgcuggacuccgggaagggaaauugggauuguaucaugaccagcuaccaguaucuuauuauccagaacacgacaugggaagaccacugccaguuuucucgccccuccccuauuggcuaccuggggcuccugagccaaagaacccgggauaucuauauuucccgcagacuucugggaacauucaccuggacccucucugacagcgagggcaaugaaacacccggcggguacugucugacgcgguggaugcugaucgaggccgagcucaaaugcuuuggaaacaccgcuguugccaaguguaaugaaaaacaugaugaggaguucugcgacaugcugcgccuuuuugauuucaacaagcaggcuaucagacggcugaaaacagaagcccaggcgaauauucagcucaucaacaaggccgugaaugcucugauuaacgaccaacuuaucaugaagaaucaucugcgcgauauuaugggcaucccuuauugcaacuacuccaaauauugguaccucaaucacaccgucacagggaagaccagccugcccagauguuggcuggugucuaacggauccuaccucaaugaaacgcacuucagcgacgacaucgagcagcaggccgauaacaugauuacagagcugcuucaaaaagaauauauggaccggcagggcaagaccccucuggggcucguggaucuguuugucuucucuaccagcuuuuaccugaucuccauuuuccuucaccucguuaaaaucccgacacaucgccacgugauuggaaagcccugcccuaaaccccauagacugaaccacaugggcaucuguucuugcggccuguauaagcacccuggggugcccgucaaguggaaacggugaggacuaguuauaagacugacuagcccgaugggccucccaacgggcccuccuccccuccuugcaccgagauuaauaaaaaaaaaaaaaaaaaaaaaaaaaaaaaaaaaaaaaaaaaaaaaaaaaaaaaaaaaaaaaaaaaaaaaaaaaaaaaaaaaaaaaaaaaaaaaaaaaaaa

SEQ ID NO: 15197 - RNA, 1662 nt, Artificial Sequence
  mRNA product Design i-3 (A100) comprising derived and/or modified sequence from LASV(Nig08-A19;Clade III)__ADU56618__GPC (opt5)
aggagaaagcuuaccaugggccagaucgugaccuucuuucaagaggucccccacguuauugaagaggugaugaacaucgugcugauugcccucagcauccuggcuauucuuaaggggcuguacaauaucgccacaugcggacucaucggccuggucacguuccuucugcucuccgggagaucuuguagcaugaccuauaaaggaguguacgaacugcagacacuggagcucaacaugaauacccugaacaugacaaugccucuuuccugcaccaagaauaacucucaucacuauauuaugguuggcaaugaaacagggcuggagcucacccugacgaacaccagccuucugcaucacaaauuuuguaaucucuccgacgcgcauaagaaaaaccuguacgaucacacacugaugucuaucauuagcaccuuccaccucuccaucccgaauuuuaaccaguaugaggcuaugagcugcgacuucaauggaggcaagauuacagugcaguacaaccugucucauuccuaugccaucgaugccgcuaaucacuguggcaccgucgccaacggggugcuucaaacguuuaugcggauggcuuggggaggcagcuacauugcccuggacucugggcgcggaaagugggauugcaucaugacauccuaccaguaucucaucauucagaacaccacaugggaagaccauugucaguucagcagacccucuccuaucggcuaccuggggcuucugucccaacggacccgcgauauuuauaucagcagacggcuccugggaaccuuuacauggacgcuguccgacucugagggcaaugaaacccccggcggguacugccucacacgcuggaugcugauugaggcggagcuuaaauguuucggaaacaccgccguugcuaagugcaaugaaaaacacgaugaggaauuuugugacaugcugagacucuucgauuuuaacaagcaggccauccggcgccugaaagcugaggcccagaugagcauccagcuuauuaauaaggcggugaacgcccugaucaaugaccaacucauuaugaagaaccaccugagagauaucaugggcauuccuuauugcaauuacuccaaauauugguaccugaaccauacaagcaccgggcggacgucucucccccgcugcuggcuggucuccaauggaagcuaccuuaacgaaacacacuucucugacgacaucgagcagcaggcugauaauaugaucaccgagaugcugcaaaaggaauaucucgacagacagggcaaaaccccucuggggcugguggaucuuuucguguuuagcacauccuucuaccucauuucuaucuuucugcaucuggucaagauuccgacccaccggcauaucguuggaaaacccuguccuaagccccaccgccucaaccacaugggcauuugcagcuguggccuguauaaacagccuggggugcccgugagauggaagcggugaggacuaguuauaagacugacuagcccgaugggccucccaacgggcccuccuccccuccuugcaccgagauuaauaaaaaaaaaaaaaaaaaaaaaaaaaaaaaaaaaaaaaaaaaaaaaaaaaaaaaaaaaaaaaaaaaaaaaaaaaaaaaaaaaaaaaaaaaaaaaaaaaaaa

SEQ ID NO: 15198 - RNA, 1665 nt, Artificial Sequence
  mRNA product Design i-3 (A100) comprising derived and/or modified sequence from LASV(G1180-SLE-2010;Clade IV)__AIT17168__GPC (opt5)
aggagaaagcuuaccaugggccagaucgugaccuucuuucaagaggucccccacguuauugaagaggugaugaacaucgugcugauugcccucagcauccuggcuguccuuaaggggcuguacaauuucgccacaugcggacucgugggccugcuuacguuucugcuccugugugggagauccugcaccgcgucucgguauaaaggaguuuacgaacugcagacacucgagcugaacauggaaacccuuaauaugacaaugccucugagcuguaccaagaacaauucccaucacuauauuauggugggcaacgagacagggcucgagcugacccuuacgaauaccucuaucaucaaccauaaauucugcaaucugagcgacgcucacaagaaaaaccucuacgaucaugcccugauguccauuaucucuacauuucaccugagcauuccgaauuucaaccaguaugaagccauguccugugacuuuaauggaggcaagaucagcguccaguacaaccucucucacuccuaugcuggcgaugccgcuaaucauugcgggaccguggccaacggaguucugcaaacauucaugcgcauggcguggggcgggagcuacauugcccuugacucuggacacggcuccugggauuguaucaugaccagcuaccaguaucugauuauccagaacacgacaugggaggaccauugccaguuuucuagacccuccccuaucggguaccucggacugcuuagccaacggacccgcgauauuuauaucuccagacggcugcucggcacauucaccuggacccugucugacagcgaaggcaaggauacacccgggggauacugucugacgcgcuggaugcucauugaggcugagcugaaaugcuuuggcaauaccgccguggcuaaguguaacgaaaaacacgacgaggaguucugcgauaugcuuagacuguuugacuucaauaagcaggccauccagcggcucaaagcggaagcccagauguccauucaacugaucaacaaggcugucaaugcccuuaucaacgaucagcugauuaugaagaaucaccuccgcgacaucauggggauuccuuauugcaacuacagcaaauauugguaccugaaucauacaaccacaggaaagaccucucugcccaaauguuggcucguguccaacggcagcuaccugaaugaaacgcacuucucugacgauaucgagcagcaagcugacaacaugauuacagagaugcuucagaaggaauauauggagagacaggggaaaaccccucugggacucguggaucuguuugucuucagcaccuccuuuuaccugaucucuaucuuccuucaucucguuaagauuccgacacaccggcauaucgugggcaaaagcugccccaagccucaccgccugaaucacaugggcauuuguuccugcgggcuguauaagcagcccggagugccugucaaauggaagagaugaggacuaguuauaagacugacuagcccgaugggccucccaacgggcccuccuccccuccuugcaccgagauuaauaaaaaaaaaaaaaaaaaaaaaaaaaaaaaaaaaaaaaaaaaaaaaaaaaaaaaaaaaaaaaaaaaaaaaaaaaaaaaaaaaaaaaaaaaaaaaaaaaaaa

SEQ ID NO: 15199 - RNA, 1665 nt, Artificial Sequence
  mRNA product Design i-3 (A100) comprising derived and/or modified sequence from LASV(G1442-SLE-2011;Clade IV)__AIT17180__GPC (opt5)
aggagaaagcuuaccaugggccagaucgugaccuucuuucaagaggucccccacguuauugaagaggugaugaacaucgugcugauugcccucagcauccuggcuguccuuaaggggcuguacaauguggccacaugcggacucauuggccugguuacguuccuucugcucugugggagauccugcaccacaacccuguauaaaggaguguacgaacugcagacacucgagcugaacauggaaacccuuaauaugacaaugccucugucuuguaccaagaacaauagccaucacuauauccgggucggcaacgagacggggcucgagcugacccuuacaaauaccuccaucauuaaccauaaauuuugcaaucugucugacgcgcacaagaaaaaccucuacgaucaugcucugaugagcaucauuuccacauuccaccugucuaucccgaauuuuaaccaguaugaagccaugagcugugacuucaauggaggcaagauuuccgugcaguacaaccucagccacucuuaugccggcgaugcugccaaucauugcgggaccguugcuaacggagugcugcaaacguuuaugcgcauggccuggggcggguccuacaucgcgcuugacagcggaagaggcaacugggauuguauuaugacaucuuaccaguaucugaucauccagaauaccacaugggacgaucacugccaguucucccggcccagcccuauuggguaccucggacugcuuucucaacgcaccagagacgucuauaucucccggcgccugcucggcaccuuuacauggacgcugagcgauuccgagggcaaggacacccccgggggauacugucugacaagauggaugcucauugaagccgagcugaaaugcuucggcaacaccgcuguggccaaguguaaugagaaacaugaugaagaguuuugcgacaugcuucggcuguucgauuuuaacaagcaggcuauccagcgccucaaagccgaagcgcagaugucuauucaacugaucaauaaggccgugaacgcucuuaucaaugaccagcugauuaugaagaaccaccucagagacaucauggggauuccuuauugcaauuacagcaaauauugguaccugaacaauacagccaccggaaagacgucccugcccaaauguuggcucaucagcaacggcucuuaccugaaugagacacacuucuccgaugacauugaacaggaggcugauaacaugaucaccgagaugcuucaaaaggaauauauggagcggcaggggaaaaccccucugggacucgucgaccuguucguuuuuagcacaucuuucuaccugaucagcauuuuucuucaucucgugaagaucccgacccaccgccauauugugggcaaauccugccccaagccucacagacugaaucauaugggcaucuguucuugcgggcuguauaagcagcccggagucccugugcgguggaaacgcugaggacuaguuauaagacugacuagcccgaugggccucccaacgggcccuccuccccuccuugcaccgagauuaauaaaaaaaaaaaaaaaaaaaaaaaaaaaaaaaaaaaaaaaaaaaaaaaaaaaaaaaaaaaaaaaaaaaaaaaaaaaaaaaaaaaaaaaaaaaaaaaaaaaa

SEQ ID NO: 15200 - RNA, 1665 nt, Artificial Sequence
  mRNA product Design i-3 (A100) comprising derived and/or modified sequence from LASV(G3010-SLE-2013;Clade IV)__AIT17344__GPC (opt5)
aggagaaagcuuaccaugggccagaucgugaccuucuuucaagaggucccccacguuauugaagaggugaugaacaucgugcugauugcccucagcauccuggcuguccuuaaggggcuguacaauuucgccacaugcggacucgugggccugguuacguuucuucugcucugugggagauccugcaccacaucucuguauaaaggaguguacgaacugcagacccucgagcugaacauggaaacacuuaauaugaccaugccucugagcuguacaaagaacaauucccaucacuauauuauggucggcaacgagaccgggcucgagcugacgcuuaccaauacaucuaucaucaaccauaaauucugcaaucugagcgacgcgcacaagaaaaaccucuacaaucaugcucugauguccauuaucucuaccuuucaccugagcauuccgaacuucaaucaguaugaagccauguccugugauuuuaacggaggcaagaucagcgugcaguacaaucucucucacuccuaugccggcgacgcugccagccauugcgggacaguugcuaacggagugcugcaaaccuucaugcggauggccuggggcgggucuuacauugcgcuugauuccggauacggcaagugggacuguaucaugacgagcuaucaguaccugauuauccagaacacaaccugggaggaucacugccaguuuucucgccccuccccuaucggguaucucggacugcuuagccaaagaacacgggacauuuacaucucccgcagacugcucggcaccuucaccuggacacugucugauagcgaaggcaaagacacgcccgggggauauugucugacccgguggaugcucauugaggccgagcugaagugcuuuggcaauacagcugucgccaaauguaacgaaaagcaugaugaggaguucugcgacaugcuucgccuguuugauuucaauaaacaggcuauccagagacucaagaccgaagcccagauguccauucaacugaucaacaaggcggugaaugcccuuaucaacgaccagcugauuaugaaaaaucaccuccgggauaucauggggauuccuuacugcaacuauagcaaguacugguaccugaaucacacaaccacgggaaaaacaucucugcccaaguguuggcucguguccaacggcagcuaucugaaugaaacccauuucucugacgacaucgagcagcaagcugauaacaugauuaccgagaugcuucagaaagaauacauggagcgccaggggaagacaccucugggacucgucgaccuguuuguuuucagcaccuccuuuuaucugaucucuaucuuccuucaccucgugaaaauuccgacacauagacacaucgugggcaagagcugccccaagccucaucggcugaaucacaugggcauuuguuccugcgggcuguacaaacagcccggagucccugugcgcuggaagagaugaggacuaguuauaagacugacuagcccgaugggccucccaacgggcccuccuccccuccuugcaccgagauuaauaaaaaaaaaaaaaaaaaaaaaaaaaaaaaaaaaaaaaaaaaaaaaaaaaaaaaaaaaaaaaaaaaaaaaaaaaaaaaaaaaaaaaaaaaaaaaaaaaaaa

SEQ ID NO: 15201 - RNA, 1665 nt, Artificial Sequence
  mRNA product Design i-3 (A100) comprising derived and/or modified sequence from LASV(G502-SLE-2009;Clade IV)__AIT17126__GPC (opt5)
aggagaaagcuuaccaugggccagaucgugaccuucuuucaagaggucccccacguuauugaagaggugaugaacaucgugcugauugcccucagcauccuggcuguccuuaaggggcuguacaauuucgccacaugcggacucgugggccugcuuacguuucugcuccugugugggagauccugcaccacaggacuguauaaaggcguuuacgaacuccagacccuggagcuuaacauggaaacacugaauaugaccaugccucucucuuguacaaagaacaauagccaucacuauauuaugguggggaacgagaccggacuggagcuuacgcugaccaauacauccaucaucaaccauaaauucugcaaucucucugacgcgcacaagaaaaaccuguacgaucaugcucugaugagcauuaucuccaccuuucaccucucuauuccgaauuucaaccaguaugaagccaugagcugugacuuuaauggcggcaagaucuccguccaguacaaccugagccacucuuaugccggggaugcugccgaccauugcggaacaguggcuaauggcguucuucaaaccuucaugcggauggccuggggaggguccuacauugcgcuggauagcggccgcgggagaugggacuguaucaugacgucuuaccaguaucucauuauccagaacacaaccugggaggaucacugccaguuuucccggcccagcccuaucggauaccugggccuucugucucaacgcacaagagacauuuauaucucccggcgccuccugggcaccuucaccuggacacugagcgauuccgaagggaaggacacgcccggaggcuacugucucaccagauggaugcugauugaggccgagcuuaaaugcuuugggaacacagcuguggccaaguguaaugaaaaacaugaugaggaguucugcgacaugcugcggcucuuugauuucaacaagcaggcuauccagcgccugaaagccgaagcgcagaugucuauucaacuuaucaauaaggccgucaacgcucugaucaaugaccagcucgugaugaagaaccaccugagagacauuaugggaaucccuuauugcaauuacagccgguauugguaccugaaccacaccacaaccggccgcacgucccuccccaaauguuggcuggugagcaaugggucuuaccuuaacgaaacacauuucuccgaugacauugagcagcaagccgauaauaugaucaccgagaugcugcagaaggaauauauggagagacagggaaaaaccccucucggccuggucgaccuguuuguuuucagcacaucuuuuuaccuuauuagcaucuuccuccaccuggugaagaucccgacccaucggcacauugugggcaaauccugccccaagccucaucgccugaaccacauggggaucuguucuugcggacucuauaaacagcccggcgucccugugaaguggaagagaugaggacuaguuauaagacugacuagcccgaugggccucccaacgggcccuccuccccuccuugcaccgagauuaauaaaaaaaaaaaaaaaaaaaaaaaaaaaaaaaaaaaaaaaaaaaaaaaaaaaaaaaaaaaaaaaaaaaaaaaaaaaaaaaaaaaaaaaaaaaaaaaaaaaa

SEQ ID NO: 15202 - RNA, 1665 nt, Artificial Sequence
  mRNA product Design i-3 (A100) comprising derived and/or modified sequence from LASV(G733-SLE-2010;Clade IV)__AIT17154__GPC (opt5)
aggagaaagcuuaccaugggccagaucgugaccuucuuucaagaggucccccacguuauugaagaggugaugaacaucgugcugauugcccucagcauccuggcuguccuuaaggggcuguacaauuucgccacaugcggaauugugggccucguuuccuuucugcuucugugugggagaucuugcacgaccagccucuauaaaggaguguacgaacugcagacacuggagcucaacauggaaacccugaauaugacaaugccucuuuccuguaccaagaacaauucucaucacuauaucauggucggcaacgagacagggcuggagcucacccugacgaauaccagcaucauuaaccauaaauucugcaaucuuuccgacgcgcacaagaaaaaccuguacgaucaugcucucaugucuaucauuagcacauuucaccuguccaucccgaauuucaaccaguaugaagccaugagcugugacuuuaauggaggcaagauuucugugcaguacaaccugucccacagcuaugccggcgaugcugccaaucauugcgggaccaucgcuaacggaguucuccaaacauucaugcggauggccuggggcgggucuuacauugcgcuggacuccggacgcgauagaugggacuguaucaugaccagcuaccaguaucuuaucauucagaacacgacaugggaggaucacugccaguuuucucggcccuccccuaucggcuaccuggggcuccugagccaacgcaccagagacauuuauaucucccggcgccuucugggaacauucaccuggacccucucugauagcgaaggcaaggacacacccggcggguacugucugacgagauggaugcugauugaggccgagcucaaaugcuuuggaaauaccgcuguggccaaguguaacgaaaaacaugaugaggaguucugcgacaugcugcggcuuuuugauuucaauaagcaggcuauccagcgccugaaagccgaagcgcagauguccauccaacucauuaacaaggccgucaaugcucugaucaacgaccagcuuauuaugaagaaucaccugagagacaucaugggcauuccuuauugcaacuacagcaaauauugguaccucaaucacacaaccacagggaagaccucucugcccaaauguuggcugguguccaacggaagcuaccucaaugaaacgcauuucucugaugacaucgagcagcaagccgauaacaugaucacagagaugcugcagaaggaauauauggagcggcagggcaaaaccccucuugggcugguggaccucuuugucuucagcaccuccuuuuaccugauuucuaucuuccugcaccuuguuaagauuccgacacaucgccacguggugggaaaaagcugccccaagccucauagacucaaucacaugggcaucuguuccugcggccuguaugggcagcccggagucccugugaaguggaaacggugaggacuaguuauaagacugacuagcccgaugggccucccaacgggcccuccuccccuccuugcaccgagauuaauaaaaaaaaaaaaaaaaaaaaaaaaaaaaaaaaaaaaaaaaaaaaaaaaaaaaaaaaaaaaaaaaaaaaaaaaaaaaaaaaaaaaaaaaaaaaaaaaaaaa

SEQ ID NO: 15203 - RNA, 1665 nt, Artificial Sequence
  mRNA product Design i-3 (A100) comprising derived and/or modified sequence from MOPV/LASV reassortant(IGS-1;Clade IV)__AFY05576__GPC (opt5)
aggagaaagcuuaccaugggccagaucgugaccuucuuucaagaggucccccacguuauugaagaggugaugaacaucgugcugauugcccucagcguccuggcugugcuuaaggggcuguacaauuucgccacaugcggacucguuggccuggugacguuucuucugcucugugggagauccugcaccacaucucuguauaaaggagucuacgaacugcagacccucgagcugaacauggaaacacuuaauaugaccaugccucugagcuguacaaagaacaauucccaucacuauaucauggugggcaacgagaccgggcucgagcugacgcuuaccaauacaucuauuaucaaccauaaauucugcaaucugagcgacgcgcacaagaaaaaccucuacgaucaugcucugauguccaucauuucuaccuuucaccugagcaucccgaauuucaaccaguaugaagccauguccugugacuuuaauggaggcaagauuagcguucaguacaaccucucucacuccuaugccggcgaugcugccaaucauugcgggacaguggcuaacggaguccugcaaaccuucaugcggauggccuggggcgggagcuacaucgcgcuugacucuggacgcggcaacugggauuguauuaugacguccuaccaguaucugaucauucagaauacaaccugggaggaccacugccaguuuagcagacccucuccuaucggguaccucggacugcuuucccaacggacacgcgauaucuauauuagcagacggcugcucggcaccuucaccuggacacuguccgacucugaaggcgaggauacgcccgggggauacugucugacccgcuggaugcucaucgaggccgaacugaagugcuuuggcaacacagcuguggccaaauguaaugagaagcaugacgaagaguucugcgauaugcuuagacuguuugacuucaacaaacaggcuauucagcggcucaaggccgaagcgcagaugagcauccaacugauuaauaaagccgugaacgcucuuaucaaugaucagcugaucaugaagaaccaccuccgcgacauuauggggaucccuuauugcaauuacuccaaguauugguaccugaaccacaccacaaccggaagaacgagccugcccaaauguuggcucgucucuaauggcuccuaccugaacgagacacauuucagcgacgauauugagcagcaagccgacaauaugaucaccgaaaugcuucagaaggaguauauggaacggcaggggaaaaccccucugggacucguugaucuguuuguguucucuaccagcuuuuaccugauuuccaucuuccuucaccucgugaagaucccgacacaucgccacauugucggcaaaucuugccccaagccucauagacugaaccacaugggcaucuguagcugcgggcuguauaaacagcccggagugccuguuaaguggaagcggugaggacuaguuauaagacugacuagcccgaugggccucccaacgggcccuccuccccuccuugcaccgagauuaauaaaaaaaaaaaaaaaaaaaaaaaaaaaaaaaaaaaaaaaaaaaaaaaaaaaaaaaaaaaaaaaaaaaaaaaaaaaaaaaaaaaaaaaaaaaaaaaaaaaa

SEQ ID NO: 15204 - RNA, 1665 nt, Artificial Sequence
  mRNA product Design i-3 (A100) comprising derived and/or modified sequence from LASV(LM765-SLE-2012;Clade IV)__AIT17814__GPC (opt5)
aggagaaagcuuaccaugggccagaucgugaccuucuuucaagaggucccccacguuauugaagaggugaugaacaucgugcugauugcccucagcauccuggcuguccuuaaggggcuguacaauuucgccacaugcggacucgugggccugguuacguuucuucugcucugugggagauccugcaccacaucucuguauaaaggaguguacgaacugcagacccucgagcugaacauggaaacacuuaauaugaccaugccucugagcuguacaaagaacaauucccaucacuauauuauggucggcaacgagaccgggcucgagcugacgcuuaccaauacaucuaucaucgaccauaaauucugcaaccugagcgaugcgcaccggaagaaucucuacgaccaugcucugauguccauuaucucuaccuuucaccugagcauuccgaacuucaaucaguaugaagccauguccugugauuuuaacggaggcaaaaucagcgugcaguacaaucucucucacuccuaugccaaggacgcugccgaucauugcggcacaguugcuaacggggugcugcaaaccuucaugcgcauggccuggggaggcagcuacauugcgcuugacucugggagaggacggugggauuguaucaugacguccuaccaguaucugauuauccagaauacaaccugggaggaccacugccaguuuagccgccccucuccuaucggcuaccucgggcugcuuucccaaagaacacgggauauuuauaucagccgcagacugcucggaaccuucaccuggacacuguccgacucugaaggcaaggauacgcccggcggguacugucugacccgguggaugcucauugaggccgagcugaaaugcuuuggaaacacagcugucgccaaguguaacgaaaaacaugacgaggaguucugcgauaugcuucgccuguuugacuucaauaagcaggcuauccagagacucaaagccgaagcgcagaugagcauucaacugaucaacaaggccgugaaugcucuuaucaacgaccagcugauuaugaagaaucaccuccgggauaucaugggcauuccuuauugcaacuacuccaaauauugguaccugaaucacaccacaaccgggaagacgagccugcccaaauguuggcucgugucuaacggauccuaccugaaugaaacacauuucagcgacgauaucgagcagcaagccgacaacaugauuaccgagaugcuucagaaggaauauauggagcgccagggcaaaaccccucuggggcucgucgaucuguuuguuuucucuaccagcuuuuaccugaucuccaucuuccuucaccucgugaagauuccgacacauagacacaucgugggaaaacccugcccuaagccccaucggcugaaucacaugggcauuuguucuugcggccuguauaagcagccugggguccccgugaaauggaagcgcugaggacuaguuauaagacugacuagcccgaugggccucccaacgggcccuccuccccuccuugcaccgagauuaauaaaaaaaaaaaaaaaaaaaaaaaaaaaaaaaaaaaaaaaaaaaaaaaaaaaaaaaaaaaaaaaaaaaaaaaaaaaaaaaaaaaaaaaaaaaaaaaaaaaa

SEQ ID NO: 15205 - RNA, 1665 nt, Artificial Sequence
  mRNA product Design i-3 (A100) comprising derived and/or modified sequence from LASV(LM776-SLE-2012;Clade IV)__AIT17824__GPC (opt5)
aggagaaagcuuaccaugggccagaucgugaccuucuuucaagaggucccccacguuauugaagaggugaugaacaucgugcugauugcccucagcauccuggcuguccuuaaggggcuguacaauuucgccacaugcggacucgugggccugguuacguuucuucugcucugugggagauccugcaccacaucuguguauaaaggagucuacgaacugcagacccuggagcucaacauggaaacacugaauaugaccaugccucuuagcuguacaaagaacaauucccaucacuauauuauggugggcaacgagaccgggcuggagcucacgcugaccaauacaucuaucaucaaccauaaauucugcaaucuuagcgacgcgcacaagaaaaaccuguacgaucaugcucucauguccauuaucucuaccuuucaccugagcauuccgaauuucaaccaguaugaagccauguccugugacuuuaauggaggcaagaucagcguucaguacaaccugucucacuccuaugccggcgaugcugccaaucauugcgggacaguggcuaacggaguccuccaaaccuucaugcggauggccuggggcgggagcuacauugcgcuggacucuggacacggcaagugggauuguaucaugacguccuaccaguaucuuauuauccagaacacaaccugggaggaccauugccaguuuagccgccccucuccuaucggguaccugggacuccugucccaaagaacacgggauauuuauaucagccgcagacuucugggcaccuucaccuggacacucuccgacucugaaggcaaagauacgcccgggggauacugucugacccgguggaugcugauugaggccgagcucaagugcuuuggcaauacagcuguggccaaauguaacgaaaagcacgacgaggaguucugcgauaugcugcgccuuuuugacuucaauaaacaggcuauccagagacugaaggccgaagcgcagaugagcauucaacucaucaacaaggccgugaaugcucugaucaacgaucagcuuauuaugaaaaaucaucugcgggacaucauggggauuccuuauugcaacuacuccaaguauugguaccucaaucacaccacaaccggaaaaacgagccugcccaaguguuggcuggucucuaacggcuccuaccucaaugaaacacacuucagcgacgauaucgagcagcaagccgacaacaugauuaccgagaugcugcagaaagaauauauggagcgccaggggaagaccccucuuggacugguugaucucuuuguguucucuaccagcuuuuaccugaucuccaucuuccugcaucuugugaaaauuccgacacacagacauaucgucggcaagucuugccccaagccucaccggcucaaucacaugggcauuuguagcugcgggcuguauaaacagcccggagugccuguucgcuggaagagaugaggacuaguuauaagacugacuagcccgaugggccucccaacgggcccuccuccccuccuugcaccgagauuaauaaaaaaaaaaaaaaaaaaaaaaaaaaaaaaaaaaaaaaaaaaaaaaaaaaaaaaaaaaaaaaaaaaaaaaaaaaaaaaaaaaaaaaaaaaaaaaaaaaaa

SEQ ID NO: 15206 - RNA, 1665 nt, Artificial Sequence
  mRNA product Design i-3 (A100) comprising derived and/or modified sequence from LASV(Mad39;Clade IV)__ANH09722__GPC (opt5)
aggagaaagcuuaccaugggccagaucgugaccuucuuucaagaggucccccacguuauugaagaggugaugaacaucgugcugauugcccucagcauccuggcuguccuuaaggggcuguacaauguggccacaugcggacucauuggccugguuacguuccuucugcucugugggagauccugcaccacaacccuguauaaaggaguguacgaacugcaggcgcucgagcugaacauggaaacacuuaauaugaccaugccucugucuuguacaaagaacaauagccaucacuauauccgggucggcaacgagaccgggcucgagcugacgcuuaccaauacaucccugaucaaccauaaauuuugcaaucucucugacgcucacaagaaaaaccuguacgaucaugcccugaugagcauuaucuccaccuuccaccucucuauuccgaauuuuaaccaguaugaagccaugagcugugacuucaaugauggaaagaucuccgugcaguacaaccugagccacacauaugcuggcgacaccgccaaucauugcggcacgguugcuaacggggugcuucaaacauuuaugcgcauggccuggggaggcucuuacauugcgcuggauuccgggagaggaggcugggacuguaucaugaccagcuaccaguaucucauuauccagaacacaaccugggaggaucacugccaguucucucggcccuccccuaucggguaccugggacuucugagccaacgcaccagagacauuuauaucucucggcgccuccugggcacauuuacguggacccuguccgauagcgaaggcaaggacacacccgggggauacugucucaccagauggaugcugauugaggccgagcuuaaaugcuucggcaauacagcugucgccaaguguaacgaaaaacaugaugaggaauuuugcgacaugcugcgccucuucgauuuuaauaagcaggcuauccagcggcugaaagccgaggcgcagauguccauucaacuuaucaacaaggccgugaaugcucugaucaacgaccagcucauuaugaagaaucaccugagagacaucauggggauuccuuauugcaacuacucuaaauauugguaccugaaucacaccgugacgggaaagacaagccuccccaaauguuggcuggucuccaacggcagcuaccuuaaugaaacccauuucucugaugacaucgagcagcaagccgauaacaugauuaccgagaugcugcagaaggaauauauggagcggcaggggaaaacaccucucggacugguugaccuguucguguuuuccaccagcuucuaccuuaucucuaucuuucuccaccuggugaagauuccgacacaucgccacgucgugggcaaacccugcccuaagccccauagacugaaucacaugggcaucuguagcugcggguucuauaagcagccuggaguucccgugcgguggaaacgcugaggacuaguuauaagacugacuagcccgaugggccucccaacgggcccuccuccccuccuugcaccgagauuaauaaaaaaaaaaaaaaaaaaaaaaaaaaaaaaaaaaaaaaaaaaaaaaaaaaaaaaaaaaaaaaaaaaaaaaaaaaaaaaaaaaaaaaaaaaaaaaaaaaaa

SEQ ID NO: 15207 - RNA, 1665 nt, Artificial Sequence
  mRNA product Design i-3 (A100) comprising derived and/or modified sequence from LASV(Z0947-SLE-2011;Clade IV)__AIT17840__GPC (opt5)
aggagaaagcuuaccaugggccagaucgugaccuucuuucaagaggucccccacguuauugaagaggugaugaacaucgugcugauugcccucagcauccuggcuguccuuaaggggcuguacaauuucgccacaugcggacucgugggccugguuacguuucuucugcucugugggagauccugcaccauuucucuguauaaaggaguguacgaacugcagacacucgagcugaacauggaaacccuuaauaugacaaugccucugagcuguaccaagaacaauucccaucacuauaucauggucggcaacgagacagggcucgagcugacccuuacgaauaccucuaucauuaaccauaaauucugcaaucugagcgacgcgcacaagaaaaaccucuacgaucaugcucugauguccaucauuucuacauuucaccugagcaucccgaauuucaaccaguaugaagccauguccugugacuuuaauggaggcaagauuagcgugcaguacaaccucucucacuccuaugccggcgaugcugccaaucauugcgggaccguugcuaacggagugcugcaaacauucaugcggauggccuggggcgggagcuacaucgcgcuugacucuggacgcgauagaugggacuguauuaugaccuccuaccaguaucugaucauccagaacacgacaugggaggaucacugccaguuuagccggcccucuccuauuggcuaccucgggcugcuuucccaacgcaccagagacaucuauauuagccggcgccugcucggaacauucaccuggacccuguccgauucugaaggcaaggacacacccggcggguacugucugacgagauggaugcucaucgaggccgagcugaaaugcuuuggaaauaccgcugucgccaaguguaacgaaaaacaugaugaggaguucugcgacaugcuucggcuguuugauuucaauaagcaggcuauucagcgccucaaagccgaagcgcagaugagcauccaacugaucaacaaggccgugaaugcucuuauuaacgaccagcugaucaugaagaaucaccucagagacauuaugggcaucccuuauugcaacuacuccaaauauugguaccugaaucacacaaccacagggaagaccagccugcccaaauguuggcucgugucuaacggauccuaccugaaugaaacgcauuucagcgaugacauugagcagcaagccgauaacaugaucacagagaugcuucagaaggaauauauggagcggcagggcaaaaccccucuggggcucgucgaccuguuuguuuucucuaccagcuuuuaccugaucuccauuuuccuucaccucgugaagaucccgacacaucgccacauugugggaaaacccugcccuaagccccauagacugaaucacaugggcaucuguucuugcggccuguauaagcagccugggguccccgugaaauggaagcggugaggacuaguuauaagacugacuagcccgaugggccucccaacgggcccuccuccccuccuugcaccgagauuaauaaaaaaaaaaaaaaaaaaaaaaaaaaaaaaaaaaaaaaaaaaaaaaaaaaaaaaaaaaaaaaaaaaaaaaaaaaaaaaaaaaaaaaaaaaaaaaaaaaaa

SEQ ID NO: 15208 - RNA, 1717 nt, Artificial Sequence
  mRNA product Design a-1 (hSL-A64-N5) comprising derived and/or modified sequence from LASV(Josiah;Clade IV)__NP_694870__GPCmut1 (opt1)
aggagagucccgcagucggcguccagcggcucugcuuguucgugugugugucguugcaggccuuauucaagcuuaccaugggccagaucgugaccuucuuccaggaggucccccacgugaucgaggaggugaugaacaucguccugaucgcccucagcgugcuggccgugcugaaggggcucuacaacuucgcgaccugcggccuggucgggcuggugacguuccuccugcugugcggccgcuccugcaccaccagccucuacaaggggguguacgagcugcagacccuggagcucaacauggagacgcugaacaugaccaugccgcuguccugcaccaagaacaacagccaccacuacaucauggucggcaacgagaccggccucgagcugacgcugaccaacaccuccaucaucaaccacaaguucugcaaccucagcgacgcccacaagaagaaccuguacgaccacgcccugauguccaucaucagcaccuuccaccucuccauccccaacuucaaccaguacgaggccaugagcugcgacuucaacgggggcaagaucuccgugcaguacaaccugagccacuccuacgccggggacgcggccaaccacugcggcacgguggccaacgggguccugcagaccuucaugcggauggccuggggcggcagcuacaucgcgcucgacuccgggugcggcaacugggacugcaucaugaccagcuaccaguaccugaucauccagaacaccacgugggaggaccacugccaguucucccggcccagccccaucggguaccugggccuccugucccagcgcacccgggacaucuacaucagccgccggcgccggggcaccuucaccuggacgcugagcgacuccgaggggaaggacaccccgggcggguacugccugacccgcuggaugcucaucgaggccgagcugaagugcuucggcaacaccgccguggccaagugcaacgagaagcacgacgaggaguucugcgacaugcugcggcuguucgacuucaacaagcaggccauccagcgccugaaggcgcccgcccagaugagcauccagcugaucaacaaggccgugaacgcccucaucaacgaccagcugaucaugaagaaccaccuccgggacaucaugugcauccccuacugcaacuacuccaaguacugguaccucaaccacacgaccaccggccgcaccagccugcccaagugcuggcuggucuccaacggcagcuaccucaacgagacgcacuucuccgacgacaucgagcagcaggccgacaacaugaucaccgagaugcugcagaaggaguacauggagcggcaggggaagacgccccugggccucguggaccuguucguguucagcaccuccuucuaccugaucagcaucuuccugcaccucgucaagaucccgacccaccgccacaucguggggaaguccugccccaagccccaccggcugaaccacaugggcaucugcagcugcgggcuguacaagcagcccggcgugccggucaaguggaagcgcugaggacuagucccuguucccagagcccacuuuuuuuucuuuuuuugaaauaaaauagccugucuuucagaucucaaaggcucuuuucagagccaccaaaaaaaaaaaaaaaaaaaaaaaaaaaaaaaaaaaaaaaaaaaaaaaaaaaaaaaaaaaaaaaaagaauu

SEQ ID NO: 15209 - RNA, 1714 nt, Artificial Sequence
  mRNA product Design a-1 (hSL-A64-N5) comprising derived and/or modified sequence from LASV(LP;Clade I)__AAF86701__GPCmut1 (opt1)
aggagagucccgcagucggcguccagcggcucugcuuguucgugugugugucguugcaggccuuauucaagcuuaccaugggccagaucaucaccuucuuccaggaggugccccacgucaucgaggaggugaugaacaucgugcugaucgcccucagccugcuggccauccucaaggggcuguacaacaucgcgaccugcggcaucaucgggcuggucgccuuccucuuccugugcggcaaguccugcagccugacgcucaagggcggguacgagcugcagacccuggagcucaacauggagacccugaacaugaccaugccgcuguccugcacgaagaacagcucccaccacuacauccgcgugggcaacgagaccgggcucgagcugacccugaccaacacgagcaucaucaaccacaaguucugcaaccucuccgacgcccacaagaagaaccuguacgaccacgcccugaugagcaucaucuccaccuuccaccucagcauccccaacuucaaccaguacgaggccauguccugcgacuucaacggcgggaagaucagcgugcaguacaaccugucccacagcuacgcgggcgacgccgccgagcacugcgggaccgucgccaacggcgugcugcagaccuucaugcggauggcguggggcgggcgcuacaucgcccucgacuccggcugcgggaacugggacugcaucaugacgagcuaccaguaccugaucauccagaacaccaccugggaggaccacugccaguucucccggcccagccccaucggcuaccugggccuccugucccagcgcacccgggacaucuacaucagccgccggcgccgggggacguucaccuggacccugagcgacuccgagggcaacgagacccccgggggcuacugccugacgcgcuggaugcucaucgaggccgagcugaagugcuucgggaacaccgccguggccaagugcaacgagaagcacgacgaggaguucugcgacaugcugcggcuguucgacuucaacaagcaggcgauccgccggcugaaggcccccgcccagaugagcauccagcugaucaacaaggccgucaacgcccucaucaacgaccagcugaucaugaagaaccaccuccgcgacaucaugugcauccccuacugcaacuacuccaaguacugguaccucaaccacaccagcuccggccggaccagccugcccaagugcuggcugaucuccaacgggagcuaccucaacgagacgcaguucuccgacgacaucgagcagcaggcggacaacaugaucaccgagaugcugcagaaggaguacaucgagcgccagggcaagaccccgcuggggcucguggacaucuucaucuucagcaccuccuucuaccugaucagcaucuuccugcaccugaucaagaucccgacgcaccggcacaucgugggcaagcccugccccaagccccaccgccucaaccacaugggggucugcuccugcggccuguacaagcacccgggcgugcccaccaaguggaagcggugaggacuagucccuguucccagagcccacuuuuuuuucuuuuuuugaaauaaaauagccugucuuucagaucucaaaggcucuuuucagagccaccaaaaaaaaaaaaaaaaaaaaaaaaaaaaaaaaaaaaaaaaaaaaaaaaaaaaaaaaaaaaaaaaagaauu

SEQ ID NO: 15210 - RNA, 1714 nt, Artificial Sequence
  mRNA product Design a-1 (hSL-A64-N5) comprising derived and/or modified sequence from LASV(803213;Clade II)__AAF86703__GPCmut1 (opt1)
aggagagucccgcagucggcguccagcggcucugcuuguucgugugugugucguugcaggccuuauucaagcuuaccaugggccagaucaucaccuucuuccaggaggugccccacgucaucgaggaggugaugaacaucgugcugaucgcccucagccugcuggccauccucaaggggaucuacaacgucgcgaccugcggccuguucgggcugaucuccuuccuccugcugugcggccgcagcugcuccgugacguacaaggggguguacgagcuccagacccuggagcugaacauggccaaccucaacaugaccaugccgcugagcugcaccaagaacaacucccaccacuacaucauggucggcaacgagacgggccuggagcucacccugaccaacaccagcaucaucaaccacaaguucugcaaccuguccgacgcccacaagaagaaccucuacgaccacgcccugaugagcaucaucuccacguuccaccugagcauccccaacuucaaccaguacgaggccauguccugcgacuucaacgggggcaagaucagcgugcaguacaaccucucccacagcuucgcgguggacgccgccaaccacugcgggaccaucgccaacggcguccugcagaccuucaugcggauggcguggggcggguccuacaucgcccuggacagcggcugcgggaacugggacugcaucaugaccuccuaccaguaccucaucauccagaacacgaccugggaggaccacugccaguucagccgccccucccccaucggcuaccuggggcugcucagccagcggacccgcgacaucuacaucagccggcgccgccggggcaccuucacguggacccucuccgacagcgagggcaacgaggcccccgggggcuacugccugacccgguggaugcugaucgaggccgagcucaagugcuucgggaacaccgccguggcgaagugcaacgagaagcacgacgaggaguucugcgacaugcugcgccuguucgacuucaacaagcaggccaucaagcggcucaagacgcccgcccagauguccauccagcugaucaacaaggccgugaacgcccugaucaacgaccagcucaucaugaagaaccaccuccgcgacaucaugugcauccccuacugcaacuacagccgguacugguaccugaaccacaccgucaccgggaagaccucccugccccgcugcuggcuggugagcaacggcuccuaccugaacgagacgcacuucagcgacgacaucgagcagcaggcggacaacaugaucaccgagaugcuccagaaggaguacauggaccggcagggcaagaccccgcuggggcugguggaccucuucgucuucuccaccagcuucuaccugaucuccaucuuccugcaccuggugaagaucccgacgcaccgccacaucgugggcaagcccugccccaagccccaccggcucaaccacauggggaucugcagcugcggccuguacaagcacccggggguccccgugaaguggaagcgcugaggacuagucccuguucccagagcccacuuuuuuuucuuuuuuugaaauaaaauagccugucuuucagaucucaaaggcucuuuucagagccaccaaaaaaaaaaaaaaaaaaaaaaaaaaaaaaaaaaaaaaaaaaaaaaaaaaaaaaaaaaaaaaaaagaauu

SEQ ID NO: 15211 - RNA, 1714 nt, Artificial Sequence
  mRNA product Design a-1 (hSL-A64-N5) comprising derived and/or modified sequence from LASV(GA391;Clade III)__CAA36645__GPCmut1 (opt1)
aggagagucccgcagucggcguccagcggcucugcuuguucgugugugugucguugcaggccuuauucaagcuuaccaugggccagaucgugaccuucuuccaggaggucccccacgugaucgaggaggugaugaacaucguccugaucgcccucagcauccuggccauccugaaggggcucuacaacguggcgaccugcggccugaucgggcuggugacguuccuccugcuguccggccgcagcugcucccucaucuacaaggggaccuacgagcugcagacccuggagcucaacauggagacccugaacaugacgaugccgcugagcugcaccaagaacaacucccaccacuacauccgggucggcaacgagaccggccucgagcugacccugacgaacaccagcauccucaaccacaaguucugcaaccuguccgacgcccacaagcgcaaccuguacgaccacagccucauguccaucaucagcaccuuccaccuguccauccccaacuucaaccaguacgaggccaugagcugcgacuucaacgggggcaagaucaccgugcaguacaaccugucccacagcuucgccguggacgccgcggggcacugcggcacgcucgccaacgggguccugcagaccuucaugcggauggccuggggcggcuccuacaucgcccuggacagcgggugcggcaacugggacugcaucaugaccuccuaccaguaccucaucauccagaacaccacgugggacgaccacugccaguucagccggcccucccccaucggguaccugggccugcucagccagcgcacccgggacaucuacaucagccgccggcgccggggcaccuucaccuggacgcucuccgacagcgaggggaacgagaccccgggcggguacugccugacccgcuggaugcugaucgaggcggagcucaagugcuucggcaacaccgccguggccaagugcaacgagaagcacgacgaggaguucugcgacaugcugcggcuguucgacuucaacaagcaggccauccgccggcucaagacgcccgcccagauguccauccagcugaucaacaaggcggugaacgcccugaucaacgaccagcucaucaugaagaaccaccuccgcgacaucaugugcauccccuacugcaacuacagccgguacugguaccugaaccacaccuccaccggcaagaccagccugccccgcugcuggcugaucuccaacggcagcuaccugaacgagacgaaguucuccgacgacaucgagcagcaggccgacaacaugaucaccgagaugcuccagaaggaguacaucgaccggcaggggaagacgccccugggccuggucgaccuguucguguucagcaccuccuucuaccucaucagcaucuuccugcaccuggugaagaucccgacccaccgccacaucgucgggaagcccugccccaagccccaccggcucaaccacaugggcaucugcuccugcgggcuguacaagcagccgggcgugcccgugcgcuggaagcggugaggacuagucccuguucccagagcccacuuuuuuuucuuuuuuugaaauaaaauagccugucuuucagaucucaaaggcucuuuucagagccaccaaaaaaaaaaaaaaaaaaaaaaaaaaaaaaaaaaaaaaaaaaaaaaaaaaaaaaaaaaaaaaaaagaauu

SEQ ID NO: 15212 - RNA, 1717 nt, Artificial Sequence
  mRNA product Design a-1 (hSL-A64-N5) comprising derived and/or modified sequence from LASV(AV;Clade V)__CCA30314__GPCmut1 (opt1)
aggagagucccgcagucggcguccagcggcucugcuuguucgugugugugucguugcaggccuuauucaagcuuaccaugggccagaucgugaccuucuuccaggaggucccccacgugaucgaggaggugaugaacaucguccugaucgcccucagcauccuggccgugcugaaggggcucuacaacaucgcgaccugcggccugaucgggcugaucacguuccuccugcugugcggccgcuccugcagcuccaaccucuacaaggggguguacgagcugcagagccuggaccucaacauggagacccugaacaugaccaugccgcuguccugcaccaagaacaacagccaccacuacauccgggucggcaacgacacgggccucgagcugacccugaccaacaccuccauccucaaccacaaguucugcaaccugagcgacgcccacaagaaggaccuguacgaccacgcccucauguccaucaucagcacguuccaccuguccauccccaacuucaaccaguacgaggccaugagcugcgacuucaacgggggcaagaucuccgugcaguacaaccugagccacuccuacgccaucgacgcggccaaccacugcgggaccguggccaacggcauccuccagaccuucaugcgcauggccuggggcgggagcuacaucgcgcuggacuccggcugcgggaacugggacugcaucaugaccagcuaccaguaccugaucauccagaacacgaccugggagaaccacugccaguucucccgccccagccccaucggcuaccucgggcugcugagccagcggacccgcgacaucuacaucucccggcgccgccggggcaccuucacguggacccugagcgacuccgagggcaacgccacccccgggggcuacugccucacccgguggaugcugaucgaggccgagcugaagugcuucgggaacacggccgucgccaagugcaacgagaagcacgacgaggaguucugcgacaugcuccgccuguucgacuucaacaagcaggcgaucagccggcugaagucccccgcccagaugagcauccagcucaucaacaaggccgugaacgcccugaucaacgaccagcugaucaugaagaaccaccuccgcgacaucaugugcauccccuacugcaacuacuccaaguacugguaccugaaccacaccaucaccgggaagaccagccugcccaagugcuggcucguguccaacggcagcuaccugaacgagacgcacuucuccgacgacaucgagcagcaggccgacaacaugaucaccgagaugcugcagaaggaguacauggagcggcagggcaagaccccgcucgggcuggucgaccuguucguguucagcaccuccuucuaccugaucagcaucuuccuccgccuggugaagaucccgacgcaccggcacaucgucggcaagcccugccccaagccccaccgccugaaccacauggggaucugcuccugcggccucuacaagcagccgggggugcccgugcgguggaagcgcugaggacuagucccuguucccagagcccacuuuuuuuucuuuuuuugaaauaaaauagccugucuuucagaucucaaaggcucuuuucagagccaccaaaaaaaaaaaaaaaaaaaaaaaaaaaaaaaaaaaaaaaaaaaaaaaaaaaaaaaaaaaaaaaaagaauu

SEQ ID NO: 15213 - RNA, 1714 nt, Artificial Sequence
  mRNA product Design a-1 (hSL-A64-N5) comprising derived and/or modified sequence from LASV(Togo/2016/7082;Clade VI)__AMR44577__GPCmut1 (opt1)
aggagagucccgcagucggcguccagcggcucugcuuguucgugugugugucguugcaggccuuauucaagcuuaccaugggccagaucaucaccuucuuccaggaggugccccacgucaucgaggaggugaugaacaucgugcugaucgcccucagccugcuggccauccucaagggggucuacaacguggcgaccugcggcaucaucgggcuggugacguuccuguuccucugcggccgcuccugcagccugaucuacaagggguccuacgagcugcagacccucgagcugaacauggagacccugaacaugaccaugccgcucagcugcacgaagaacuccagccaccacuacauccgggucggcaacgagaccggccuggagcugacccucaccaacacguccaucaucaaccacaaguucugcaaccugagcgacgcccacaagcgcaaccuguacgaccacgcccucauguccauccugagcaccuuccaccuguccauccccaacuucaaccaguacgaggccaugagcugcgacuucaacgggggcaagaucuccgugcaguacaaccucagccacgccuacgcgguggacgccgccgagcacugcgggaccgucgccaacggcgugcugcagaccuucaugcggauggcguggggcggguccuacaucgcccuggacagcggcugcgggaacugggacugcaucaugacguccuaccaguaccucaucauccagaacaccaccugggaggaccacugccaguucagccggcccucccccaucggcuaccuggggcugcucagccagcgcacccgggacaucuacaucagccgccggcgccggggcacguucaccuggacccucuccgacagcgagggcaacgagacccccgggggcuacugccugacgcgcuggaugcugaucgaggccgagcucaagugcuucgggaacaccgccguggccaagugcaacgagaagcacgacgaggaguucugcgacaugcugcggcuguucgacuucaacaagcaggcgauccagcgccucaagucccccgcccagaugagcauccagcugaucaacaaggccgucaacgcccugaucaacgaccagcucaucaugaagaaccaccuccgggacaugaugugcauccccuacugcaacuacuccaaguacugguaccugaaccacaccagcuccgggcgcaccagccugcccaagugcuggcugguguccaacggcagcuaccugaacgagacgcacuucuccgacgacaucgagcagcaggccgacaacaugaucaccgagaugcuccagaaggaguacaucgaccggcagggcaagaccccgcuggggcugguggaccucuucgucuucagcaccuccuucuaccugaucagcaucuuccugcaccugaucaagaucccgacgcaccgccacaucgugggcaagcccugccccaagccccaccggcucaaccacauggggaucugcuccugcggccuguacaagcagccgggggugcccacccgcuggaagcggugaggacuagucccuguucccagagcccacuuuuuuuucuuuuuuugaaauaaaauagccugucuuucagaucucaaaggcucuuuucagagccaccaaaaaaaaaaaaaaaaaaaaaaaaaaaaaaaaaaaaaaaaaaaaaaaaaaaaaaaaaaaaaaaaagaauu

SEQ ID NO: 15214 - RNA, 1714 nt, Artificial Sequence
  mRNA product Design a-1 (hSL-A64-N5) comprising derived and/or modified sequence from LASV(KAK-428;Clade n.d. (VII))__ANH09740__GPCmut1 (opt1)
aggagagucccgcagucggcguccagcggcucugcuuguucgugugugugucguugcaggccuuauucaagcuuaccaugggccagaucgugaccuucuuccaggaggucccccacgugaucgaggaggugaugaacaucguccugaucgcccucagccugcuggccauccucaaggggcuguacaacuucgcgaccugcggcgugaucgggcugaucacguuccuccugcugugcggccgcuccugcagcgccaccuacaaggggcaguacgagcuccagacccuggagcugaacauggagucccucaacaugaccaugccgcugagcugcacgaagaacaacucccaccacuacauccgggccggcaacaacaccggccuggagcucacccugaccaacacgagcaucaucucccacaaguucugcaaccugagcgacgcccacaagaagaaccucuacgaccacacccugauguccaucaucaccaccuuccaccugagcauccccaacuucaaccaguacgaggccauguccugcgacuucaacgggggcaagaucagcauccaguacaaccucucccacagcuacgcgggggacgccgcccagcacugcggcacgguggccaacgggguccugcagaccuucaugcgcauggcguggggcggcuccuaccuggcccucgacagcgggugccgcggcugggacugcaucaucuccagcuaccaguaccugaucauccagaacaccaccugggacgaccacugccaguucucccggcccagccccaucggguaccugggcuucgugagccagaagacgcgcgacaucuacaucucccggcgccgccggggcaccuucaccuggacccugagcgacuccgaggggcacgacaugccgggcggguacugccucacgcgguggaugcugaucgaggccgaccugaagugcuucggcaacaccgccguggccaagugcaacgagaagcacgacgaggaguucugcgacauguggcgccucuucgacuucaacaagcaggcgauccagcggcugaaggcccccgcccagaugaacauccagcugaucaacaaggccgucaacgcccucaucaacgaccagcugaugaugaagaaccaccuccgcgacaucaugugcauccccuacugcaacuacagcaaguucugguaccugaacaacaccaccacgggccggaccucccugccccgcugcuggcugaucagcaacggcuccuaccucaacgagacccacuucagcgacgacaucgagcagcaggcggacaacaugaucaccgagaugcugcagaaggaguacauggaccggcaggggaagacgccccugggccucguggaccuguucguguucuccaccagcuucuaccugaucaccaucuuccuccaccuggucaagaucccgacccaccgccacaucguggggaagcccugccccaagccccaccggcugaaccacaugggcaucugcuccugcgggcuguacaagcagccgggcgugcccguccgcuggaagcggugaggacuagucccuguucccagagcccacuuuuuuuucuuuuuuugaaauaaaauagccugucuuucagaucucaaaggcucuuuucagagccaccaaaaaaaaaaaaaaaaaaaaaaaaaaaaaaaaaaaaaaaaaaaaaaaaaaaaaaaaaaaaaaaaagaauu

SEQ ID NO: 15215 - RNA, 1714 nt, Artificial Sequence; identical to SEQ ID NO: 15209
  mRNA product Design a-1 (hSL-A64-N5) comprising derived and/or modified sequence from LASV(Pinneo-NIG-1969;Clade I)__AIT17836__GPCmut1 (opt1)

SEQ ID NO: 15216 - RNA, 1714 nt, Artificial Sequence
  mRNA product Design a-1 (hSL-A64-N5) comprising derived and/or modified sequence from LASV(ISTH0009-NIG-2011;Clade II)__AIT17404__GPCmut1 (opt1)
aggagagucccgcagucggcguccagcggcucugcuuguucgugugugugucguugcaggccuuauucaagcuuaccaugggccagaucaucaccuucuuccaggaggugccccacgucaucgaggaggugaugaacaucgugcugaucgcccucagccugcuggccauccucaaggggaucuacaacgucgcgaccugcggccuguucgggcugguguccuuccuccugcugugcggccgcagcugcuccacgaccuacaaggggguguacgagcuccagacccuggagcuggacauggccagccucaacaugaccaugccgcuguccugcacgaagaacaacagccaccacuacaucauggucggcaacgagaccggccuggagcucacccugaccaacacguccaucaucaaccacaaguucugcaaccugagcgacgcccacaagaagaaccucuacgaccacgcccugauguccaucaucagcaccuuccaccuguccauccccaacuucaaccaguacgaggccaugagcugcgacuucaacgggggcaagaucuccgugcaguacaaccucagccacgcguacgccguggacgccgccaaccacugcgggaccaucgcgaacggcguccugcagaccuucaugcggauggccuggggcggguccuacaucgcccuggacagcggcugcggguccugggacugcaucaugacgagcuaccaguaccucaucauccagaacaccaccugggaggaccacugccaguucucccgccccagccccaucggcuaccuggggcugcucagccagcggacccgcgacaucuacaucucccggcgccgccggggcacguucaccuggacccucagcgacuccgagggcaacgagacccccgggggcuacugccugacgcgguggaugcugaucgaggccgagcucaagugcuucgggaacaccgccguggcgaagugcaacgagaagcacgacgaggaguucugcgacaugcugcgccuguucgacuucaacaagcaggccauccggcgccucaagacccccgcccagaugagcauccagcugaucaacaaggccgugaacgcccugaucaacgaccagcucaucaugaagaaccaccuccgggacaucaugugcaucccguacugcaacuacuccaaguacugguaccugaaccacaccgucacggggaagaccagccugccccgcugcuggcugguguccaacggcagcuaccugaacgagacccacuucuccgacgacaucgagcagcaggcggacaacaugaucaccgagcuccugcagaaggaguacauggaccggcagggcaagacgccccuggggcucguggaccuguucgucuucagcaccuccuucuaccugaucagcaucuuccugcaccucaucaagaucccgacccaccgccacaucaccggcaagcccugccccaagccccaccggcugaaccacauggggaucugcuccugcggccuguacaagcacccgggggugcccgugaaguggaagcgcugaggacuagucccuguucccagagcccacuuuuuuuucuuuuuuugaaauaaaauagccugucuuucagaucucaaaggcucuuuucagagccaccaaaaaaaaaaaaaaaaaaaaaaaaaaaaaaaaaaaaaaaaaaaaaaaaaaaaaaaaaaaaaaaaagaauu

SEQ ID NO: 15217 - RNA, 1714 nt, Artificial Sequence
  mRNA product Design a-1 (hSL-A64-N5) comprising derived and/or modified sequence from LASV(ISTH2010-NIG-2012;Clade II)__AIT17482__GPCmut1 (opt1)
aggagagucccgcagucggcguccagcggcucugcuuguucgugugugugucguugcaggccuuauucaagcuuaccaugggccagaucaucaccuucuuccaggaggugccccacgucaucgaggaggugaugaacaucgugcugaucgcccucagccugcuggccauccucaaggggaucuacaacgucgcgaccugcggccuguucgggcugguguccuuccuccugcugugcggccgcagcugcuccacgaccuacaaggggguguacgagcuccagacccuggagcuggacauggccagccucaacaugaccaugccgcuguccugcacgaagaacaacagccaccacuacaucauggucggcaacgagaccggccuggagcucacccugaccaacacguccaucaucaaccacaaguucugcaaccugagcgacgcccacaagaagaaccucuacgaccacgcccugauguccaucaucagcaccuuccaccuguccauccccaacuucaaccaguacgaggccaugagcugcgacuucaacgggggcaagaucuccgugcaguacaaccucagccacgcguacgccguggacgccgccaaccacugcgggaccaucgcgaacggcguccugcagaccuucaugcggauggccuggggcggguccuacaucgcccuggacagcggcugcggguccugggacugcaucaugacgagcuaccaguaccucaucauccagaacaucaccugggaggaccacugccaguucucccgccccagccccaucggcuaccuggggcugcucagccagcggacccgcgacaucuacaucucccggcgccgccggggcaccuucacguggacccucagcgacuccgagggcaacgagacccccgggggcuacugccugacccgguggaugcugaucgaggccgagcucaagugcuucgggaacacggccguggcgaagugcaacgagaagcacgacgaggaguucugcgacaugcugcgccuguucgacuucaacaagcaggccauccggcgccucaagacccccgcccagaugagcauccagcugaucaacaaggccgugaacgcccugaucaacgaccagcucaucaugaagaaccaccuccgggacaucaugugcauccccuacugcaacuacuccaaguacugguaccugaaccacaccgucaccgggaagacgagccugccccgcugcuggcugguguccaacggcagcuaccugaacgagacccacuucuccgacgacaucgagcagcaggcggacaacaugaucaccgagcuccugcagaaggaguacaucgaccggcagggcaagaccccgcuggggcucguggaccuguucgucuucagcacguccuucuaccugaucagcaucuuccugcaccucgugaagaucccgacccaccgccacguggucggcaagcccugccccaagccccaccggcugaaccacauggggaucugcuccugcggccuguacaagcacccgggggugcccgugaaguggaagcgcugaggacuagucccuguucccagagcccacuuuuuuuucuuuuuuugaaauaaaauagccugucuuucagaucucaaaggcucuuuucagagccaccaaaaaaaaaaaaaaaaaaaaaaaaaaaaaaaaaaaaaaaaaaaaaaaaaaaaaaaaaaaaaaaaagaauu

SEQ ID NO: 15218 - RNA, 1714 nt, Artificial Sequence
  mRNA product Design a-1 (hSL-A64-N5) comprising derived and/or modified sequence from LASV(Lassa virus/H.sapiens-wt/NGA/2015/ISTH_0543;Clade II)__AVO03639__GPCmut1 (opt1)
aggagagucccgcagucggcguccagcggcucugcuuguucgugugugugucguugcaggccuuauucaagcuuaccaugggccagaucaucaccuucuuccaggaggugccccacgucaucgaggaggugaugaacaucgugcugaucgcccucagccugcuggccauccucaaggggaucuacaacgucgcgaccugcggccuguucgggcugguguccuuccuccugcugugcggccgcagcugcuccacgaccuacaaggggguguacgagcuccagacccuggagcuggacauggccaaccucaacaugaccaugccgcugagcugcacgaagaacaacucccaccacuacaucauggucggcaacgagaccggccuggagcucacccugaccaacacgagcaucaucaaccacaaguucugcaaccuguccgacgcccacaagaagaaccucuacgaccacgcccugaugagcaucaucuccaccuuccaccugagcauccccaacuucaaccaguacgaggccauguccugcgacuucaacgggggcaagaucagcgugcaguacaaccucucccacaccuacgcgguggacgccgccaaccacugcgggaccaucgccaacggcguccugcagacguucaugcggauggcguggggcgggagcuacaucgcccuggacuccggcugcgggagcugggacugcaucaugaccuccuaccaguaccucgugauccagaacaccaccugggaggaccacugccaguucagccgccccucccccaucggcuaccuggggcugcucagccagcggacgcgcgacaucuacaucagccggcgccgccggggcaccuucaccuggacccucuccgacagcgagggcaacgagacgcccgggggcuacugccugacccgguggaugcugaucgaggccgagcucaagugcuucgggaacaccgccguggccaagugcaacgagaagcacgacgaggaguucugcgacaugcugcgccuguucgacuucaacaagcaggcgauccggcgccucaagacccccgcccagauguccauccagcugaucaacaaggccgucaacgcccugaucaacgaccagcucaucaugaagaaccaccuccgggacaucaugugcauccccuacugcaacuacagcaaguacugguaccugaaccacacggugaccgggaagaccucccugccccgcugcuggcuggugagcaacggcuccuaccugaacgagacccacuucagcgacgacaucgagcagcaggccgacaacaugaucacggagcuccugcagaaggaguacaucgaccggcagggcaagaccccgcuggggcucgucgaccuguucguguucuccaccagcuucuaccugaucuccaucuuccugcaccucgugaagaucccgacccaccgccacaucacgggcaagcccugccccaagccccaccggcugaaccacauggggaucugcagcugcggccuguacaagcacccggggguccccgugaaguggaagcgcugaggacuagucccuguucccagagcccacuuuuuuuucuuuuuuugaaauaaaauagccugucuuucagaucucaaaggcucuuuucagagccaccaaaaaaaaaaaaaaaaaaaaaaaaaaaaaaaaaaaaaaaaaaaaaaaaaaaaaaaaaaaaaaaaagaauu

SEQ ID NO: 15219 - RNA, 1714 nt, Artificial Sequence
  mRNA product Design a-1 (hSL-A64-N5) comprising derived and/or modified sequence from LASV(Lassa virus/H.sapiens-wt/NGA/2016/ISTH_0009;Clade II)__AVO03571__GPCmut1 (opt1)
aggagagucccgcagucggcguccagcggcucugcuuguucgugugugugucguugcaggccuuauucaagcuuaccaugggccagaucaucaccuucuuccaggaggugccccacgucaucgaggaggugaugaacaucgugcugaucgcccucagccugcuggccauccucaaggggaucuacaacgucgcgaccugcggccugcuggggcucguguccuuccugcugcucugcggccgcagcugcuccacgaccuacaaggggguguacgagcugcagacccuggagcucgacauggccagccugaacaugaccaugccgcuguccugcacgaagaacaacagccaccacuacaucauggucggcaacgagaccggccucgagcugacccugaccaacacguccaucaucaaccacaaguucugcaaccucagcgacgcccacaagaagaaccuguacgaccacgcccugauguccaucaucagcaccuuccaccucuccauccccaacuucaaccaguacgaggccaugagcugcgacuucaacgggggccggaucuccgugcaguacaaccugagccacuccuacgcgguggacgccgccaaccacugcgggaccaucgccaacggcguccugcagaccuucaugcgcauggcguggggcgggagcuacaucgcccucgacuccggcugcgggagcugggacugcaucaugacguccuaccaguaccugaucauccagaacaccaccugggaggaccacugccaguucagccggcccagccccaucggcuaccuggggcuccugucccagcgcacccgggacaucuacaucagccgccggcgccggggcacguucaccuggacccuguccgacagcgagggcaacgagacccccgggggcuacugccugacgcgcuggaugcucaucgaggccgagcugaagugcuucgggaacaccgccguggccaagugcaacgagaagcacgacgaggaguucugcgacaugcugcggcuguucgacuucaacaagcaggcgauccgccggcugaagacccccgcccagauguccauccagcugaucaacaaggccgugaacgcccucaucaacgaccagcugaucaugaagaaccaccuccgcgacaucaugugcaucccguacugcaacuacagcaaguacugguaccucaaccacaccgucacggggaagaccucccugccccggugcuggcuggugagcaacggcuccuaccucaacgagacccacuucagcgacgacaucgagcagcaggccgacaacaugaucaccgagcugcugcagaaggaguacaucgaccgccagggcaagacgccccucgggcugguggaccuguucgucuucuccaccagcuucuaccugaucuccaucuuccuccaccuggugaagaucccgacccaccggcacaucaccggcaagcccugccccaagccccaccgccugaaccacauggggaucugcagcugcggccucuacaaccacccgggggugcccgucaaguggaagcggugaggacuagucccuguucccagagcccacuuuuuuuucuuuuuuugaaauaaaauagccugucuuucagaucucaaaggcucuuuucagagccaccaaaaaaaaaaaaaaaaaaaaaaaaaaaaaaaaaaaaaaaaaaaaaaaaaaaaaaaaaaaaaaaaagaauu

SEQ ID NO: 15220 - RNA, 1714 nt, Artificial Sequence
  mRNA product Design a-1 (hSL-A64-N5) comprising derived and/or modified sequence from LASV(Lassa virus/H.sapiens-wt/NGA/2016/ISTH_0017;Clade II)__AVO03567__GPCmut1 (opt1)
aggagagucccgcagucggcguccagcggcucugcuuguucgugugugugucguugcaggccuuauucaagcuuaccaugggccagaucaucaccuucuuccaggaggugccccacgucaucgaggaggugaugaacaucgugcugaucgcccucagccugcuggccauccucaaggggaucuacaacgucgcgaccugcggccuguucgggcugguguccuuccuccugcugugcggccgcagcugcuccacgaccuacaaggggguguacgagcuccagacccuggagcuggacauggccagccucaacaugaccaugccgcuguccugcacgaagaacaacagccaccacuacaucauggucggcaacgagaccggccuggagcucacccugaccaacacguccaucaucaaccacaaguucugcaaccugagcgacgcccacaagaagaaccucuacgaccacgcccugauguccaucaucagcaccuuccaccuguccauccccaacuucaaccaguacgaggccaugagcugcgacuucaacgggggcaagaucuccgugcaguacaaccucagccacaccuacgcgaucgacgccgccaaccacugcgggaccaucgccaacggcgugcugcagacguucaugcggauggcguggggcggguccuacaucgcccuggacagcggcugcggguccugggacugcaucaugaccagcuaccaguaccucaucauccagaacaccaccugggaggaccacugccaguucucccgccccagccccaucggcuaccuggggcugcucagccagcggacgcgcgacaucuacaucucccggcgccgccggggcaccuucaccuggacccucagcgacuccgagggcaacgagacgcccgggggcuacugccugacccgguggaugcugaucgaggccgagcucaagugcuucgggaacaccgccgucgccaagugcaacgagaagcacgacgaggaguucugcgacaugcugcgccuguucgacuucaacaagcaggcgauccggcgccucaagacccccgcccagaugagcauccagcugaucaacaaggccgugaacgcccugaucaacgaccagcucaucaugaagaaccaccuccgggacaucaugugcauccccuacugcaacuacuccaaguacugguaccugaaccacacggugaccgggaagaccagccugccccgcugcuggcuggucuccaacggcagcuaccugaacgagacccacuucuccgacgacaucgagcagcaggccgacaacaugaucacggagcuccugcagaaggaguacauggaccggcagggcaagaccccgcuggggcucguggaccuguucguguucagcaccuccuucuaccugaucagcaucuuccugcaccucguccgcaucccgacccaccggcacgugaucggcaagcccugccccaagccccaccgccugaaccacauggggaucugcuccugcggccuguacaagcacccgggggugcccgucaaguggaagcggugaggacuagucccuguucccagagcccacuuuuuuuucuuuuuuugaaauaaaauagccugucuuucagaucucaaaggcucuuuucagagccaccaaaaaaaaaaaaaaaaaaaaaaaaaaaaaaaaaaaaaaaaaaaaaaaaaaaaaaaaaaaaaaaaagaauu

SEQ ID NO: 15221 - RNA, 1714 nt, Artificial Sequence
  mRNA product Design a-1 (hSL-A64-N5) comprising derived and/or modified sequence from LASV(Lassa virus/H.sapiens-wt/NGA/2018/ISTH_0959;Clade II)__AVV65099__GPCmut1 (opt1)
aggagagucccgcagucggcguccagcggcucugcuuguucgugugugugucguugcaggccuuauucaagcuuaccaugggccagaucaucaccuucuuccaggaggugccccacgucaucgaggaggugaugaacaucgugcugaucgcccucagccugcuggccauccucaaggggaucuacaacgucgugaccugcggccuguucgggcugguguccuuccuccugcugugcggccgcagcugcuccacgaccuacaagggggucuacgagcuccagacccuggagcuggacauggcgagccucaacaugaccaugccgcuguccugcacgaagaacaacagccaccacuacaucauggugggcaacgagaccggccuggagcucacccugaccaacacguccaucaucaaccacaaguucugcaaccugagcgacgcccacaagaagaaccucuacgaccacgcccugauguccaucaucagcaccuuccaccuguccauccccaacuucaaccaguacgaggccaugagcugcgacuucaacgggggcaagaucuccgugcaguacaaccucagccacgccuacgcgaucgacgccgccaaccacugcgggaccaucgccaacggcguccugcagaccuucaugcggauggcguggggcggguccuacaucgcccuggacagcggcugcggguccugggacugcaucaugacgagcuaccaguaccucaucauccagaacaccaccugggaggaccacugccaguucucccgccccagccccaucggcuaccuggggcugcucagccagcggacccgcgacaucuacaucucccggcgccgccggggcacguucaccuggacccucagcgacuccgagggcaacgagacccccgggggcuacugccugacgcgguggaugcugaucgaggccgagcucaagugcuucgggaacaccgccguggccaagugcaacgagaagcacgacgaggaguucugcgacaugcugcgccuguucgacuucaacaagcaggcgauccggcgccucaagacccccgcccagaugagcauccagcugaucaacaaggccgugaacgcccugaucaacgaccagcucaucaugaagaaccaccuccgggacaucaugugcaucccguacugcaacuacuccaaguacugguaccugaaccacaccgucacggggaagaccagccugccccgcugcuggcugguguccaacggcagcuaccugaacgagacccacuucuccgacgacaucgagcagcaggccgacaacaugaucaccgagcuccugcagaaggaguacaucgaccggcagggcaagacgccccuggggcucguggaccuguucgucuucagcaccuccuucuaccugaucagcaucuuccugcaccucgugaagaucccgacccaccgccacgugaucggcaagcccugccccaagccccaccggcugaaccacauggggaucugcuccugcggccuguacaagcacccggggguccccgugaaguggaagcgcugaggacuagucccuguucccagagcccacuuuuuuuucuuuuuuugaaauaaaauagccugucuuucagaucucaaaggcucuuuucagagccaccaaaaaaaaaaaaaaaaaaaaaaaaaaaaaaaaaaaaaaaaaaaaaaaaaaaaaaaaaaaaaaaaagaauu

SEQ ID NO: 15222 - RNA, 1714 nt, Artificial Sequence
  mRNA product Design a-1 (hSL-A64-N5) comprising derived and/or modified sequence from LASV(LASV003-NIG-2008;Clade II)__AIT17580__GPCmut1 (opt1)
aggagagucccgcagucggcguccagcggcucugcuuguucgugugugugucguugcaggccuuauucaagcuuaccaugggccagaucaucaccuucuuccaggaggugccccacgucaucgaggaggugaugaacaucgugcugaucgcccucagccugcuggccauccucaaggggaucuacaacgucgcgaccugcggccuguucgggcugguguccuuccuccugcugugcggccgcagcugcuccacgaccuacaaggggguguacgagcuccagacccuggagcuggacauggccagccucaacaugaccaugccgcuguccugcacgaagaacaacagccaccacuacaucauggucggcaacgagaccggccuggagcucacccugaccaacacguccaucaucaaccacaaguucugcaaccugagcgacgcccacaagaagaaccucuacgaccacgcccugauguccaucaucagcaccuuccaccuguccauccccaacuucaaccaguacgaggccaugagcugcgacuucaacgggggcaagaucuccgugcaguacaaccucagccacaccuacgcgguggacgccgccaaccacugcgggaccaucgccaacggcguccugcagacguucaugcggauggcguggggcggguccuacaucgcccuggacagcggcugcggguccugggacugcaucaugaccagcuaccaguaccucaucauccagaacaccaccugggaggaccacugccaguucucccgccccagccccaucggcuaccuggggcugcucagccagcggacgcgcgacaucuacaucucccggcgccgccggggcaccuucaccuggacccucagcgacuccgagagcaacgagacgccgggcggguacugccugacccgguggaugcugaucgaggccgagcucaagugcuucggcaacaccgccguggccaagugcaacgagaagcacgacgaggaguucugcgacaugcugcgccuguucgacuucaacaagcaggcgauccggcgccucaaggcccccgcccagauguccauccagcugaucaacaaggccgugaacgcccugaucaacgaccagcucaucaugaagaaccaccuccgggacaucaugugcauccccuacugcaacuacagcaaguacugguaccugaaccacaccgucacgggccgcaccucccugccccggugcuggcuggugagcaacggguccuaccugaacgagacccacuucagcgacgacaucgagcagcaggcggacaacaugaucaccgagcuccugcagaaggaguacauggaccgccagggcaagacgccccugggccucguggaccuguucgucuucuccaccagcuucuaccugaucuccaucuuccugcaccucgugaagaucccgacccaccggcacgugaucgggaagcccugccccaagccccaccgccugaaccacaugggcaucugcagcugcgggcuguacaagcacccgggcguccccgugaaguggaagcggugaggacuagucccuguucccagagcccacuuuuuuuucuuuuuuugaaauaaaauagccugucuuucagaucucaaaggcucuuuucagagccaccaaaaaaaaaaaaaaaaaaaaaaaaaaaaaaaaaaaaaaaaaaaaaaaaaaaaaaaaaaaaaaaaagaauu

SEQ ID NO: 15223 - RNA, 1714 nt, Artificial Sequence
  mRNA product Design a-1 (hSL-A64-N5) comprising derived and/or modified sequence from LASV(LASV035-NIG-2009;Clade II)__AIT17588__GPCmut1 (opt1)
aggagagucccgcagucggcguccagcggcucugcuuguucgugugugugucguugcaggccuuauucaagcuuaccaugggccagaucaucaccuucuuccaggaggugccccacgucaucgaggaggugaugaacaucgugcugaucgcccucagccugcuggccauccucaaggggaucuacaacgucgcgaccugcggccuguucgggcugguguccuuccuccugcugugcggccgcagcugcuccacgaccuacaaggggguguacgagcuccagacccuggagcuggacauggccagccucaacaugaccaugccgcuguccugcacgaagaacaacagccaccacuacaucauggucggcaacgagaccggccuggagcucacccugaccaacacguccaucaucaaccacaaguucugcaaccugagcgacgcccacaagaagaaccucuacgaccacgcccugauguccaucaucagcaccuuccaccuguccauccccaacuucaaccaguacgaggccaugagcugcgacuucaacgggggcaagaucuccgugcaguacaaccucagccacgcguacgccguggacgccgccaaccacugcgggaccaucgcgaacggcguccugcagaccuucaugcggauggccuggggcggguccuacaucgcccuggacagcggcugcggguccugggacugcaucaugacgagcuaccaguaccucaucauccagaacaccaccugggaggaccacugccaguucucccgccccagccccaucggcuaccuggggcugcucagccagcggacccgcgacaucuacaucucccggcgccgccggggcacguucaccuggacccucagcgacuccgagggcaacgagacccccgggggcuacugccugacgcgguggaugcugaucgaggccgagcucaagugcuucgggaacaccgccguggcgaagugcaacgagaagcacgacgaggaguucugcgacaugcugcgccuguucgacuucaacaagcaggccauccggcgccucaaggcccccgcccagaugagcauccagcugaucaacaaggccgugaacgcgcugaucaacgaccagcucaucaugaagaaccaccuccgggacaucaugugcauccccuacugcaacuacuccaaguacugguaccugaaccacaccgucaccgggaagacgagccugccccgcugcuggcugguguccaacggcagcuaccugaacgagacccacuucuccgacgacaucgagcagcaggccgacaacaugaucaccgagcuccugcagaaggaguacaucgaccggcagggcaagaccccgcuggggcucguggaccuguucgucuucagcacguccuucuaccugaucagcaucuuccugcaccucgugaagaucccgacccaccgccacgugaucggcaagcccugccccaagccccaccggcugaaccacauggggaucugcuccugcggccuguacaagcacccggggguccccgugaaguggaagcgcugaggacuagucccuguucccagagcccacuuuuuuuucuuuuuuugaaauaaaauagccugucuuucagaucucaaaggcucuuuucagagccaccaaaaaaaaaaaaaaaaaaaaaaaaaaaaaaaaaaaaaaaaaaaaaaaaaaaaaaaaaaaaaaaaagaauu

SEQ ID NO: 15224 - RNA, 1714 nt, Artificial Sequence
  mRNA product Design a-1 (hSL-A64-N5) comprising derived and/or modified sequence from LASV(LASV1000-NIG-2009;Clade II)__AIT17782__GPCmut1 (opt1)
aggagagucccgcagucggcguccagcggcucugcuuguucgugugugugucguugcaggccuuauucaagcuuaccaugggccagaucaucaccuucuuccaggaggugccccacgucaucgaggaggugaugaacaucgugcugaucgcccucagccugcuggccauccucaaggggaucuacaacgucgcgaccugcggccuguucgggcugguguccuuccuccugcugugcggccgcagcugcuccacgaccuacaaggggguguacgagcuccagacccuggagcuggacauggccagccucaacaugaccaugccgcuguccugcacgaagaacaacagccaccacuacaucauggucggcaacgagaccggccuggagcucacccugaccaacacguccaucaucaaccacaaguucugcaaccugagcgacgcccacaagaagaaccucuacgaccacgcccugauguccaucaucagcaccuuccaccuguccauccccaacuucaaccaguacgaggccaugagcugcgacuucaacgggggcaagaucuccgugcaguacaaccucagccacaccuacgcgguggacgccgccaaccacugcgggaccaucgccaacggcguccugcagacguucaugcggauggcguggggcggguccuacaucgcccuggacagcggcugcggguccugggacugcaucaugaccagcuaccaguaccucaucauccagaacaccaccugggaggaccacugccaguucucccgccccagccccaucggcuaccuggggcugcucagccagcggacgcgcgacaucuacaucucccggcgccgccggggcaccuucaccuggacccucagcgacuccgagggcaacgagacgcccgggggcuacugccugacccgguggaugcugaucgaggccgagcucaagugcuucgggaacaccgccguggccaagugcaacgagaagcacgacgaggaguucugcgacaugcugcgccuguucgacuucaacaagcaggcgaucaagcggcucaagacccccgcccagaugagcauccagcugaucaacaaggccgugaacgcccugaucaacgaccagcucaucaugaagaaccaccuccgcgacaucaugugcauccccuacugcaacuacuccaaguacugguaccugaaccacacggucaccgggaagaccagccugccccggugcuggcugguguccaacggcagcuaccugaacgagacccacuucuccgacgacaucgagcagcaggccgacaacaugaucacggagcuccugcagaaggaguacaucgaccgccagggcaagaccccgcuggggcucguggaccuguucgucuucagcaccuccuucuaccugaucagcaucuuccugcaccucgugaagaucccgacccaccggcacguggucggcaagcccugccccaagccccaccgccugaaccacauggggaucugcuccugcggccuguacaagcacccgggggugcccgugaaguggaagcggugaggacuagucccuguucccagagcccacuuuuuuuucuuuuuuugaaauaaaauagccugucuuucagaucucaaaggcucuuuucagagccaccaaaaaaaaaaaaaaaaaaaaaaaaaaaaaaaaaaaaaaaaaaaaaaaaaaaaaaaaaaaaaaaaagaauu

SEQ ID NO: 15225 - RNA, 1714 nt, Artificial Sequence
  mRNA product Design a-1 (hSL-A64-N5) comprising derived and/or modified sequence from LASV(LASV221-NIG-2010;Clade II)__AIT17624__GPCmut1 (opt1)
aggagagucccgcagucggcguccagcggcucugcuuguucgugugugugucguugcaggccuuauucaagcuuaccaugggccagaucaucaccuucuuccaggaggugccccacgucaucgaggaggugaugaacaucgugcugaucgcccucagccugcuggccauccucaaggggaucuacaacgucgcgaccugcggccuguucgggcugguguccuuccuccugcugugcggccgcagcugcuccacgaccuacaaggggguguacgagcuccagacccuggagcuggacauggccagccucaacaugaccaugccgcuguccugcacgaagaacaacagccaccacuacaucauggucggcaacgagaccggccuggagcucacccugaccaacacguccaucaucaaccacaaguucugcaaccugagcgacgcccacaagaagaaccucuacgaccacgcccugauguccaucaucagcaccuuccaccuguccauccccaacuucaaccaguacgaggccaugagcugcgacuucaacgggggcaagaucuccgugcaguacaaccucagccacaccuacgcgaucgacgccgccaaccacugcgggaccaucgccaacggcgugcugcagacguucaugcggauggcguggggcggguccuacaucgcccuggacagcggcugcggguccugggacugcaucaugaccagcuaccaguaccucaucauccagaacaccaccugggaggaccacugccaguucucccgccccagccccaucggcuaccuggggcugcucagccagcggacgcgcgacaucuacaucucccggcgccgccggggcaccuucaccuggacccucagcgacuccgagggcaacgagacgcccgggggcuacugccugacccgguggaugcugaucgaggccgagcucaagugcuucgggaacaccgccgucgccaagugcaacgagaagcacgacgaggaguucugcgacaugcugcgccuguucgacuucaacaagcaggcgauccggcgccucaagacccccgcccagaugagcauccagcugaucaacaaggccgugaacgcccugaucaacgaccagcucaucaugaagaaccaccuccgggacaucaugugcauccccuacugcaacuacuccaaguacugguaccugaaccacacggugaccgggaagaccagccugccccgcugcuggcuggucuccaacggcagcuaccugaacgagacccacuucuccgacgacaucgagcagcaggccgacaacaugaucacggagaugcuccagaaggaguacauggaccggcagggcaagaccccgcuggggcugguggaccucuucguguucagcaccuccuucuaccugaucagcaucuuccugcaccuggucaagaucccgacccaccgccacgugaucggcaagcccugccccaagccccaccggcucaaccacauggggaucugcuccugcggccuguacaagcacccgggggugcccgucaaguggaagcgcugaggacuagucccuguucccagagcccacuuuuuuuucuuuuuuugaaauaaaauagccugucuuucagaucucaaaggcucuuuucagagccaccaaaaaaaaaaaaaaaaaaaaaaaaaaaaaaaaaaaaaaaaaaaaaaaaaaaaaaaaaaaaaaaaagaauu

SEQ ID NO: 15226 - RNA, 1714 nt, Artificial Sequence
  mRNA product Design a-1 (hSL-A64-N5) comprising derived and/or modified sequence from LASV(LASV237-NIG-2010;Clade II)__AIT17638__GPCmut1 (opt1)
aggagagucccgcagucggcguccagcggcucugcuuguucgugugugugucguugcaggccuuauucaagcuuaccaugggccagaucaucaccuucuuccaggaggugccccacgucaucgaggaggugaugaacaucgugcugaucgcccucagccugcuggccauccucaaggggaucuacaacgucgcgaccugcggccuguucgggcugguguccuuccuccugcugugcggccgcagcugcuccacgaccuacaaggggguguacgagcuccagacccuggagcuggacauggccagccucaacaugaccaugccgcuguccugcacgaagaacaacagccaccacuacaucauggucggcaacgagaccggccuggagcucacccugaccaacacguccaucaucaaccacaaguucugcaaccugagcgacgcccacaagaaggaccucuacgaccacgcccugauguccaucaucagcaccuuccaccuguccauccccaacuucaaccaguacgaggccaugagcugcgacuucaacgggggcaagaucuccgugcaguacaaccucagccacaccuacgcgguggacgccgccaaccacugcgggaccaucgccaacggcguccugcagacguucaugcggauggcguggggcggguccuacaucgcccuggacagcggcugcggguccugggacugcaucaugaccagcuaccaguaccucaucauccagaacaccaccugggaggaccacugccaguucucccgccccagccccaucggcuaccuggggcugcucagccagcggacgcgcgacaucuacaucucccggcgccgccggggcaccuucaccuggacccucagcgacuccgagggcaacgagacgcccgggggcuacugccugacccgguggaugcugaucgaggccgagcucaagugcuucgggaacaccgccguggccaagugcaacgagaagcacgacgaggaguucugcgacaugcugcgccuguucgacuucaacaagcaggcgauccggcgccucaagacccccgcccagaugagcauccagcugaucaacaaggccgugaacgcccugaucaacgaccagcucaucaugaagaaccaccuccgggacaucaugugcauccccuacugcaacuacuccaaguacugguaccugaaccacacggucaccgggaagaccagccugccccgcugcuggcugguguccaacggcagcuaccugaacgagacccacuucuccgacgacaucgagcagcaggccgacaacaugaucacggagcuccugcagaaggaguacauggaccggcagggcaagaccccgcuggggcucguggaccuguucgucuucagcaccuccuucuaccugaucagcaucuuccugcaccucaucaagaucccgacccaccgccacaucacgggcaagcccugccccaagccccaccggcugaaccacauggggaucugcuccugcggccuguacaagcacccgggggugcccgugaaguggaagcgcugaggacuagucccuguucccagagcccacuuuuuuuucuuuuuuugaaauaaaauagccugucuuucagaucucaaaggcucuuuucagagccaccaaaaaaaaaaaaaaaaaaaaaaaaaaaaaaaaaaaaaaaaaaaaaaaaaaaaaaaaaaaaaaaaagaauu

SEQ ID NO: 15227 - RNA, 1714 nt, Artificial Sequence
  mRNA product Design a-1 (hSL-A64-N5) comprising derived and/or modified sequence from LASV(LASV253-NIG-2011;Clade II)__AIT17670__GPCmut1 (opt1)
aggagagucccgcagucggcguccagcggcucugcuuguucgugugugugucguugcaggccuuauucaagcuuaccaugggccagaucaucaccuucuuccaggaggugccccacgucaucgaggaggugaugaacaucgugcugaucgcccucagccugcuggccauccucaaggggaucuacaacgucgcgaccugcggccuguucgggcugguguccuuccuccugcugugcggccgcagcugcuccacgaccuacaaggggguguacgagcuccagacccuggagcuggacauggccagccucaacaugaccaugccgcuguccugcacgaagaacaacagccaccacuacaucauggucggcaacgagaccggccuggagcucacccugaccaacacguccaucaucaaccacaaguucugcaaccugagcgacgcccacaagaagaaccucuacgaccacgcccugauguccaucaucagcaccuuccaccuguccauccccaacuucaaccaguacgaggccaugagcugcgacuucaacgggggcaagaucuccgugcaguacaaccucagccacaccuacgcgguggacgccgccaaccacugcgggaccaucgccaacggcguccugcagacguucaugcggauggcguggggcggguccuacaucgcccuggacagcggcugcggguccugggacugcaucaugaccagcuaccaguaccucaucauccagaacaccaccugggaggaccacugccaguucucccgccccagccccaucggcuaccuggggcugcucagccagcggacgcgcgacaucuacaucucccggcgccgccggggcaccuucaccuggacccucagcgacuccgagggcaacgagacgcccgggggcuacugccugacccgguggaugcugaucgaggccgagcucaagugcuucgggaacaccgccguggccaagugcaacgagaagcacgacgaggaguucugcgacaugcugcgccuguucgacuucaacaagcaggcgauccggcgccucaaggcccccgcccagaugagcauccagcugaucaacaaggccgugaacgcccugaucaacgaccagcucaucaugaagaaccaccuccgggacaucaugugcaucccguacugcaacuacuccaaguacugguaccugaaccacaccgucacggggcgcaccagccugccccggugcuggcugguguccaacggcagcuaccugaacgagacccacuucuccgacgacaucgagcagcaggcggacaacaugaucaccgagcuccugcagaaggaguacaucgaccgccagggcaagacgccccuggggcucguggaccuguucgucuucagcaccuccuucuaccugaucagcaucuuccugcaccucgugaagaucccgacccaccggcacaucaucggcaagcccugccccaagccccaccgccugaaccacauggggaucugcuccugcggccuguacaagcacccgggggugcccgucaaguggaagcggugaggacuagucccuguucccagagcccacuuuuuuuucuuuuuuugaaauaaaauagccugucuuucagaucucaaaggcucuuuucagagccaccaaaaaaaaaaaaaaaaaaaaaaaaaaaaaaaaaaaaaaaaaaaaaaaaaaaaaaaaaaaaaaaaagaauu

SEQ ID NO: 15228 - RNA, 1714 nt, Artificial Sequence
  mRNA product Design a-1 (hSL-A64-N5) comprising derived and/or modified sequence from LASV(LASV254-NIG-2011;Clade II)__AIT17674__GPCmut1 (opt1)
aggagagucccgcagucggcguccagcggcucugcuuguucgugugugugucguugcaggccuuauucaagcuuaccaugggccagaucaucaccuucuuccaggaggugccccacgucaucgaggaggugaugaacaucgugcugaucgcccucagccugcuggccauccucaaggggaucuacaacgucgcgaccugcggccuguucgggcugguguccuuccuccugcugugcggccgcagcugcuccacgaccuacaaggggguguacgagcuccagacccuggagcuggacaugaccaaccucaacaugacgaugccgcugagcugcaccaagaacaacucccaccacuacaucauggucggcaacgagaccggccuggagcucacccugacgaacaccagcaucaucaaccacaaguucugcaaccuguccgacgcccacaagaagaaccucuacaaccacgcccugaugagcaucaucuccaccuuccaccugagcauccccaacuucaaccaguacgaggccauguccugcgacuucaacgggggcaagaucagcgugcaguacaaccucucccacagcuacgccguggacgcggccaaccacugcgggaccaucgccaacggcguccugcagacguucaugcggauggccuggggcggguccuacaucgcgcuggacagcggcugcgggaacugggacugcaucaugaccuccuaccaguaccucaucauccagaacaccaccugggaggaccacugccaguucagccgccccucccccaucggcuaccuggggcugcucagccagcggacgcgcgacaucuacaucagccggcgccgccggggcaccuucaccuggacccucuccgacagcgagggcaacgagacgcccgggggcuacugccugacccgguggaugcugaucgaggccgagcucaagugcuucgggaacaccgccguggccaagugcaacgagaagcacgacgaggaguucugcgacaugcugcgccuguucgacuucaacaagcaggccauccggcgccucaagacccccgcgcaggccaacauccagcugaucaacaaggccgugaacgcccugaucaacgaccagcucaucaugaagaaccaccuccgggacaucaugugcauccccuacugcaacuacuccaaguacugguaccugaaccacacggucaccgggaagaccagccugccccgcugcuggcugguguccaacggcagcuaccugaacgagacccacuucuccgacgacaucgagcagcaggccgacaacaugaucacggagcuccugcagaaggaguacauggaccggcagggcaagaccccgcuggggcucguggaccuguucgucuucagcaccuccuucuaccugaucagcaucuuccugcaccucgugaagaucccgacccaccgccacgugaucggcaagcccugccccaagccccaccggcugaaccacauggggaucugcuccugcggccuguacaagcacccggggguccccgugaaguggaagcgcugaggacuagucccuguucccagagcccacuuuuuuuucuuuuuuugaaauaaaauagccugucuuucagaucucaaaggcucuuuucagagccaccaaaaaaaaaaaaaaaaaaaaaaaaaaaaaaaaaaaaaaaaaaaaaaaaaaaaaaaaaaaaaaaaagaauu

SEQ ID NO: 15229 - RNA, 1714 nt, Artificial Sequence
  mRNA product Design a-1 (hSL-A64-N5) comprising derived and/or modified sequence from LASV(Nig08-A19;Clade III)__ADU56618__GPCmut1 (opt1)
aggagagucccgcagucggcguccagcggcucugcuuguucgugugugugucguugcaggccuuauucaagcuuaccaugggccagaucgugaccuucuuccaggaggucccccacgugaucgaggaggugaugaacaucguccugaucgcccucagcauccuggccauccugaaggggcucuacaacaucgcgaccugcggccugaucgggcuggugacguuccuccugcuguccggccgcagcugcuccaugaccuacaaggggguguacgagcuccagacccuggagcugaacaugaacacccucaacaugacgaugccgcugagcugcaccaagaacaacucccaccacuacaucauggucggcaacgagaccggccuggagcucacccugacgaacaccagccugcuccaccacaaguucugcaaccuguccgacgcccacaagaagaaccuguacgaccacacccucaugagcaucaucuccaccuuccaccugagcauccccaacuucaaccaguacgaggccauguccugcgacuucaacgggggcaagaucacggugcaguacaaccugagccacuccuacgccaucgacgccgcgaaccacugcgggaccguggccaacggcguccuccagaccuucaugcggauggccuggggcgggagcuacaucgcccuggacuccggcugcgggaagugggacugcaucaugaccagcuaccaguaccugaucauccagaacacgaccugggaggaccacugccaguucucccggcccagccccaucggcuaccucgggcugcugucccagcgcacccgggacaucuacaucagccgccggcgccggggcaccuucacguggacccugagcgacuccgagggcaacgagacccccgggggcuacugccucacccgcuggaugcugaucgaggcggagcugaagugcuucgggaacacggccguggccaagugcaacgagaagcacgacgaggaguucugcgacaugcuccggcuguucgacuucaacaagcaggccauccgccggcugaaggcccccgcgcagaugagcauccagcucaucaacaaggccgugaacgcccugaucaacgaccagcugaucaugaagaaccaccuccgcgacaucaugugcauccccuacugcaacuacuccaaguacugguaccugaaccacaccagcaccgggcggaccucccugccccgcugcuggcucgucagcaacggcuccuaccugaacgagacgcacuucagcgacgacaucgagcagcaggccgacaacaugaucaccgagaugcugcagaaggaguaccucgaccggcagggcaagaccccgcuggggcugguggaccuguucguguucuccaccagcuucuaccucaucuccaucuuccugcaccuggucaagaucccgacgcaccgccacaucgugggcaagcccugccccaagccccaccggcucaaccacauggggaucugcagcugcggccuguacaagcagccgggggugcccguccgcuggaagcggugaggacuagucccuguucccagagcccacuuuuuuuucuuuuuuugaaauaaaauagccugucuuucagaucucaaaggcucuuuucagagccaccaaaaaaaaaaaaaaaaaaaaaaaaaaaaaaaaaaaaaaaaaaaaaaaaaaaaaaaaaaaaaaaaagaauu

SEQ ID NO: 15230 - RNA, 1717 nt, Artificial Sequence
  mRNA product Design a-1 (hSL-A64-N5) comprising derived and/or modified sequence from LASV(G1180-SLE-2010;Clade IV)__AIT17168__GPCmut1 (opt1)
aggagagucccgcagucggcguccagcggcucugcuuguucgugugugugucguugcaggccuuauucaagcuuaccaugggccagaucgugaccuucuuccaggaggucccccacgugaucgaggaggugaugaacaucguccugaucgcccucagcauccuggccgugcugaaggggcucuacaacuucgcgaccugcggccugguggggcugcucaccuuccugcugcucugcggccgcuccugcaccgccagccgguacaagggggucuacgagcugcagacccuggagcucaacauggagacccugaacaugacgaugccgcuguccugcaccaagaacaacagccaccacuacaucauggugggcaacgagaccggccucgagcugacccugacgaacaccuccaucaucaaccacaaguucugcaaccucagcgacgcccacaagaagaaccuguacgaccacgcccugauguccaucaucagcaccuuccaccucuccauccccaacuucaaccaguacgaggccaugagcugcgacuucaacgggggcaagaucuccgugcaguacaaccugagccacuccuacgcgggggacgccgccaaccacugcggcaccgucgccaacggggugcugcagacguucaugcgcauggcguggggcggcagcuacaucgcccucgacuccgggugcggcagcugggacugcaucaugaccuccuaccaguaccugaucauccagaacaccaccugggaggaccacugccaguucagccggcccucccccaucggguaccugggccuccugagccagcgcacgcgggacaucuacaucagccgccggcgccggggcaccuucaccuggacccuguccgacagcgaggggaaggacacgccgggcggguacugccugacccgcuggaugcucaucgaggccgagcugaagugcuucggcaacaccgccguggccaagugcaacgagaagcacgacgaggaguucugcgacaugcugcggcuguucgacuucaacaagcaggcgauccagcgccugaaggcccccgcccagauguccauccagcugaucaacaaggccgucaacgcccucaucaacgaccagcugaucaugaagaaccaccuccgggacaucaugugcauccccuacugcaacuacagcaaguacugguaccucaaccacaccacgaccggcaagaccucccugcccaagugcuggcuggugagcaacggcuccuaccucaacgagacccacuucagcgacgacaucgagcagcaggcggacaacaugaucacggagaugcugcagaaggaguacauggagcgccaggggaagacgccccugggccucguggaccuguucgucuucuccaccagcuucuaccugaucuccaucuuccugcaccucgugaagaucccgacccaccggcacaucgugggcaagagcugccccaagccccaccgccugaaccacauggggaucugcuccugcgggcuguacaagcagcccggcgucccggugaaguggaagcggugaggacuagucccuguucccagagcccacuuuuuuuucuuuuuuugaaauaaaauagccugucuuucagaucucaaaggcucuuuucagagccaccaaaaaaaaaaaaaaaaaaaaaaaaaaaaaaaaaaaaaaaaaaaaaaaaaaaaaaaaaaaaaaaaagaauu

SEQ ID NO: 15231 - RNA, 1717 nt, Artificial Sequence
  mRNA product Design a-1 (hSL-A64-N5) comprising derived and/or modified sequence from LASV(G1442-SLE-2011;Clade IV)__AIT17180__GPCmut1 (opt1)
aggagagucccgcagucggcguccagcggcucugcuuguucgugugugugucguugcaggccuuauucaagcuuaccaugggccagaucgugaccuucuuccaggaggucccccacgugaucgaggaggugaugaacaucguccugaucgcccucagcauccuggccgugcugaaggggcucuacaacguggcgaccugcggccugaucgggcuggucacguuccuccugcugugcggccgcuccugcaccaccacccucuacaaggggguguacgagcugcagacgcuggagcucaacauggagacccugaacaugaccaugccgcugagcugcaccaagaacaacucccaccacuacauccgggugggcaacgagacgggccucgagcugacccugaccaacaccagcaucaucaaccacaaguucugcaaccucuccgacgcccacaagaagaaccuguacgaccacgcccugaugagcaucaucuccacguuccaccucagcauccccaacuucaaccaguacgaggccauguccugcgacuucaacgggggcaagaucagcguccaguacaaccugucccacagcuacgccggggacgcggccaaccacugcggcaccguggccaacggggugcugcagaccuucaugcgcauggccuggggcggcuccuacaucgcgcucgacagcgggugcggcaacugggacugcaucaugaccuccuaccaguaccugaucauccagaacacgaccugggacgaccacugccaguucagccgccccucccccaucggguaccugggccuccugagccagcggacccgcgacgucuacaucucccggcgccgccggggcaccuucacguggacccugagcgacagcgaggggaaggacaccccgggcggguacugccugacccgguggaugcucaucgaggccgagcugaagugcuucggcaacacggccguggccaagugcaacgagaagcacgacgaggaguucugcgacaugcugcgccucuucgacuucaacaagcaggccauccagcggcugaaggcgcccgcccagauguccauccagcugaucaacaaggccgugaacgcccucaucaacgaccagcugaucaugaagaaccaccuccgcgacaucaugugcauccccuacugcaacuacagcaaguacugguaccugaacaacaccgccaccggcaagaccucccugcccaagugcuggcugaucagcaacggcuccuaccucaacgagacgcacuucagcgacgacaucgagcaggaggcggacaacaugaucaccgagaugcugcagaaggaguacauggagcggcaggggaagacgccccugggccucgucgaccuguucguguucuccaccagcuucuaccugaucuccaucuuccugcaccucgugaagaucccgacccaccgccacaucgucggcaagagcugccccaagccccaccggcugaaccacauggggaucugcuccugcgggcuguacaagcagcccggcgugccggugcgcuggaagcggugaggacuagucccuguucccagagcccacuuuuuuuucuuuuuuugaaauaaaauagccugucuuucagaucucaaaggcucuuuucagagccaccaaaaaaaaaaaaaaaaaaaaaaaaaaaaaaaaaaaaaaaaaaaaaaaaaaaaaaaaaaaaaaaaagaauu

SEQ ID NO: 15232 - RNA, 1717 nt, Artificial Sequence
  mRNA product Design a-1 (hSL-A64-N5) comprising derived and/or modified sequence from LASV(G3010-SLE-2013;Clade IV)__AIT17344__GPCmut1 (opt1)
aggagagucccgcagucggcguccagcggcucugcuuguucgugugugugucguugcaggccuuauucaagcuuaccaugggccagaucgugaccuucuuccaggaggucccccacgugaucgaggaggugaugaacaucguccugaucgcccucagcauccuggccgugcugaaggggcucuacaacuucgcgaccugcggccugguggggcuggucacguuccuccugcugugcggccgcuccugcaccaccagccucuacaaggggguguacgagcugcagacccuggagcucaacauggagacgcugaacaugaccaugccgcuguccugcaccaagaacaacagccaccacuacaucauggugggcaacgagaccggccucgagcugacgcugaccaacaccuccaucaucaaccacaaguucugcaaccucagcgacgcccacaagaagaaccuguacaaccacgcccugauguccaucaucagcaccuuccaccucuccauccccaacuucaaccaguacgaggccaugagcugcgacuucaacgggggcaagaucuccguccaguacaaccugagccacuccuacgccggggacgcggccagccacugcggcacgguggccaacggggugcugcagaccuucaugcggauggccuggggcggcuccuacaucgcgcucgacagcgggugcggcaagugggacugcaucaugaccuccuaccaguaccugaucauccagaacaccacgugggaggaccacugccaguucagccgccccucccccaucggguaccugggccuccugagccagcggacccgcgacaucuacaucagccggcgccgccggggcaccuucaccuggacgcuguccgacagcgaggggaaggacaccccgggcggguacugccugacccgguggaugcucaucgaggccgagcugaagugcuucggcaacaccgccgucgccaagugcaacgagaagcacgacgaggaguucugcgacaugcugcgccucuucgacuucaacaagcaggccauccagcggcugaagacgcccgcgcagauguccauccagcugaucaacaaggccgugaacgcccucaucaacgaccagcugaucaugaagaaccaccuccgcgacaucaugugcauccccuacugcaacuacagcaaguacugguaccugaaccacaccaccaccggcaagacgucccugcccaagugcuggcuggugagcaacggcuccuaccucaacgagacccacuucagcgacgacaucgagcagcaggccgacaacaugaucaccgagaugcugcagaaggaguacauggagcggcaggggaagacgccccugggccucgucgaccuguucguguucuccaccagcuucuaccugaucuccaucuuccugcaccucgugaagaucccgacccaccgccacaucgucggcaagagcugccccaagccccaccggcugaaccacauggggaucugcuccugcgggcuguacaagcagcccggcgugccggugcgcuggaagcggugaggacuagucccuguucccagagcccacuuuuuuuucuuuuuuugaaauaaaauagccugucuuucagaucucaaaggcucuuuucagagccaccaaaaaaaaaaaaaaaaaaaaaaaaaaaaaaaaaaaaaaaaaaaaaaaaaaaaaaaaaaaaaaaaagaauu

SEQ ID NO: 15233 - RNA, 1717 nt, Artificial Sequence
  mRNA product Design a-1 (hSL-A64-N5) comprising derived and/or modified sequence from LASV(G502-SLE-2009;Clade IV)__AIT17126__GPCmut1 (opt1)
aggagagucccgcagucggcguccagcggcucugcuuguucgugugugugucguugcaggccuuauucaagcuuaccaugggccagaucgugaccuucuuccaggaggucccccacgugaucgaggaggugaugaacaucguccugaucgcccucagcauccuggccgugcugaaggggcucuacaacuucgcgaccugcggccugguggggcugcucacguuccugcugcucugcggccgcuccugcaccaccgggcuguacaagggcgucuacgagcugcagacccucgagcugaacauggagacgcugaacaugaccaugccgcucagcugcaccaagaacaacucccaccacuacaucauggugggcaacgagaccgggcuggagcugacgcucaccaacaccagcaucaucaaccacaaguucugcaaccuguccgacgcccacaagaagaaccuguacgaccacgcccucaugagcaucaucuccaccuuccaccugagcauccccaacuucaaccaguacgaggccauguccugcgacuucaacggcgggaagaucagcgugcaguacaaccugucccacagcuacgccggcgacgcggccgaccacugcgggacggucgccaacggcgugcuccagaccuucaugcggauggccuggggcggguccuacaucgcgcuggacagcggcugcgggcggugggacugcaucaugaccuccuaccaguaccugaucauccagaacaccacgugggaggaccacugccaguucagccgccccucccccaucggcuaccucggccugcugagccagcggacccgcgacaucuacaucucccggcgccgccgggggaccuucaccuggacgcugagcgacagcgagggcaaggacacccccgggggcuacugccucacccgguggaugcugaucgaggccgagcugaagugcuucgggaacaccgccguggccaagugcaacgagaagcacgacgaggaguucugcgacaugcuccgccuguucgacuucaacaagcaggccauccagcggcugaaggcgcccgcccagauguccauccagcucaucaacaaggccgucaacgcccugaucaacgaccagcuggugaugaagaaccaccuccgcgacaucaugugcauccccuacugcaacuacagccgguacugguaccugaaccacacgaccaccggccgcaccucccugcccaagugcuggcucgugagcaacggguccuaccugaacgagacgcacuucagcgacgacaucgagcagcaggccgacaacaugaucaccgagaugcugcagaaggaguacauggagcggcagggcaagaccccgcucgggcuggucgaccuguucguguucuccaccagcuucuaccugaucuccaucuuccuccaccuggugaagaucccgacgcaccgccacaucgucggcaagagcugccccaagccccaccggcugaaccacauggggaucugcuccugcggccucuacaagcagcccggcgugccggugaaguggaagcgcugaggacuagucccuguucccagagcccacuuuuuuuucuuuuuuugaaauaaaauagccugucuuucagaucucaaaggcucuuuucagagccaccaaaaaaaaaaaaaaaaaaaaaaaaaaaaaaaaaaaaaaaaaaaaaaaaaaaaaaaaaaaaaaaaagaauu

SEQ ID NO: 15234 - RNA, 1717 nt, Artificial Sequence
  mRNA product Design a-1 (hSL-A64-N5) comprising derived and/or modified sequence from LASV(G733-SLE-2010;Clade IV)__AIT17154__GPCmut1 (opt1)
aggagagucccgcagucggcguccagcggcucugcuuguucgugugugugucguugcaggccuuauucaagcuuaccaugggccagaucgugaccuucuuccaggaggucccccacgugaucgaggaggugaugaacaucguccugaucgcccucagcauccuggccgugcugaaggggcucuacaacuucgcgaccugcggcaucguggggcuggucuccuuccugcuccugugcggccgcagcugcacgaccucccuguacaaggggguguacgagcuccagacccuggagcugaacauggagacccucaacaugacgaugccgcugagcugcaccaagaacaacucccaccacuacaucauggugggcaacgagaccggccuggagcucacccugacgaacaccagcaucaucaaccacaaguucugcaaccuguccgacgcccacaagaagaaccucuacgaccacgcccugaugagcaucaucuccaccuuccaccugagcauccccaacuucaaccaguacgaggccauguccugcgacuucaacgggggcaagaucagcguccaguacaaccucucccacagcuacgccggggacgcggccaaccacugcggcaccaucgccaacggggugcugcagacguucaugcggauggccuggggcggcuccuacaucgcgcuggacagcgggugcgaccggugggacugcaucaugaccuccuaccaguaccucaucauccagaacaccaccugggaggaccacugccaguucagccgccccucccccaucggcuaccuggggcugcucagccagcggacgcgcgacaucuacaucagccggcgccgccggggcaccuucaccuggacccucuccgacagcgagggcaaggacacgcccgggggcuacugccugacccgguggaugcugaucgaggccgagcucaagugcuucgggaacaccgccguggccaagugcaacgagaagcacgacgaggaguucugcgacaugcugcgccuguucgacuucaacaagcaggccauccagcggcucaaggcgcccgcccagauguccauccagcugaucaacaaggccgucaacgcccugaucaacgaccagcucaucaugaagaaccaccuccgcgacaucaugugcauccccuacugcaacuacagcaaguacugguaccugaaccacaccacgaccgggaagaccucccugcccaagugcuggcuggugagcaacggcuccuaccugaacgagacccacuucagcgacgacaucgagcagcaggccgacaacaugaucacggagaugcuccagaaggaguacauggagcggcagggcaagaccccgcuggggcugguggaccucuucgucuucuccaccagcuucuaccugaucuccaucuuccugcaccuggugaagaucccgacccaccgccacguggucggcaagagcugccccaagccccaccggcucaaccacauggggaucugcuccugcggccuguacgggcagcccggcgugccggugaaguggaagcgcugaggacuagucccuguucccagagcccacuuuuuuuucuuuuuuugaaauaaaauagccugucuuucagaucucaaaggcucuuuucagagccaccaaaaaaaaaaaaaaaaaaaaaaaaaaaaaaaaaaaaaaaaaaaaaaaaaaaaaaaaaaaaaaaaagaauu

SEQ ID NO: 15235 - RNA, 1717 nt, Artificial Sequence
  mRNA product Design a-1 (hSL-A64-N5) comprising derived and/or modified sequence from MOPV/LASV reassortant(IGS-1;Clade IV)__AFY05576__GPCmut1 (opt1)
aggagagucccgcagucggcguccagcggcucugcuuguucgugugugugucguugcaggccuuauucaagcuuaccaugggccagaucgugaccuucuuccaggaggucccccacgugaucgaggaggugaugaacaucguccugaucgcccucagcgugcuggccgugcugaaggggcucuacaacuucgcgaccugcggccuggucgggcuggugacguuccuccugcugugcggccgcuccugcaccaccagccucuacaaggggguguacgagcugcagacccuggagcucaacauggagacgcugaacaugaccaugccgcuguccugcaccaagaacaacagccaccacuacaucauggucggcaacgagaccggccucgagcugacgcugaccaacaccuccaucaucaaccacaaguucugcaaccucagcgacgcccacaagaagaaccuguacgaccacgcccugauguccaucaucagcaccuuccaccucuccauccccaacuucaaccaguacgaggccaugagcugcgacuucaacgggggcaagaucuccgugcaguacaaccugagccacuccuacgccggggacgcggccaaccacugcggcacgguggccaacgggguccugcagaccuucaugcggauggccuggggcggcagcuacaucgcgcucgacuccgggugcggcaacugggacugcaucaugaccagcuaccaguaccugaucauccagaacaccacgugggaggaccacugccaguucucccggcccagccccaucggguaccugggccuccugucccagcgcacccgggacaucuacaucagccgccggcgccggggcaccuucaccuggacgcugagcgacuccgagggggaggacaccccgggcggguacugccugacccgcuggaugcucaucgaggccgagcugaagugcuucggcaacaccgccguggccaagugcaacgagaagcacgacgaggaguucugcgacaugcugcggcuguucgacuucaacaagcaggccauccagcgccugaaggcgcccgcccagaugagcauccagcugaucaacaaggccgugaacgcccucaucaacgaccagcugaucaugaagaaccaccuccgggacaucaugugcauccccuacugcaacuacuccaaguacugguaccucaaccacacgaccaccggccgcaccagccugcccaagugcuggcuggucuccaacggcagcuaccucaacgagacgcacuucuccgacgacaucgagcagcaggccgacaacaugaucaccgagaugcugcagaaggaguacauggagcggcaggggaagacgccccugggccucguggaccuguucguguucagcaccuccuucuaccugaucagcaucuuccugcaccucgucaagaucccgacccaccgccacaucguggggaaguccugccccaagccccaccggcugaaccacaugggcaucugcagcugcgggcuguacaagcagcccggcgugccggucaaguggaagcgcugaggacuagucccuguucccagagcccacuuuuuuuucuuuuuuugaaauaaaauagccugucuuucagaucucaaaggcucuuuucagagccaccaaaaaaaaaaaaaaaaaaaaaaaaaaaaaaaaaaaaaaaaaaaaaaaaaaaaaaaaaaaaaaaaagaauu

SEQ ID NO: 15236 - RNA, 1717 nt, Artificial Sequence
  mRNA product Design a-1 (hSL-A64-N5) comprising derived and/or modified sequence from LASV(LM765-SLE-2012;Clade IV)__AIT17814__GPCmut1 (opt1)
aggagagucccgcagucggcguccagcggcucugcuuguucgugugugugucguugcaggccuuauucaagcuuaccaugggccagaucgugaccuucuuccaggaggucccccacgugaucgaggaggugaugaacaucguccugaucgcccucagcauccuggccgugcugaaggggcucuacaacuucgcgaccugcggccugguggggcuggucacguuccuccugcugugcggccgcuccugcaccaccagccucuacaaggggguguacgagcugcagacccuggagcucaacauggagacgcugaacaugaccaugccgcuguccugcaccaagaacaacagccaccacuacaucauggugggcaacgagaccggccucgagcugacgcugaccaacaccuccaucaucgaccacaaguucugcaaccucagcgacgcccaccggaagaaccuguacgaccacgcccugauguccaucaucagcaccuuccaccucuccauccccaacuucaaccaguacgaggccaugagcugcgacuucaacgggggcaagaucuccguccaguacaaccugagccacuccuacgccaaggacgcggccgaccacugcgggacgguggccaacggcgugcugcagaccuucaugcgcauggccuggggcgggagcuacaucgcgcucgacuccggcugcgggcgcugggacugcaucaugaccagcuaccaguaccugaucauccagaacaccacgugggaggaccacugccaguucucccggcccagccccaucggcuaccuggggcuccugucccagcgcacccgggacaucuacaucagccgccggcgccggggcaccuucaccuggacgcugagcgacuccgagggcaaggacacccccgggggcuacugccugacccgcuggaugcucaucgaggccgagcugaagugcuucgggaacaccgccgucgccaagugcaacgagaagcacgacgaggaguucugcgacaugcugcggcuguucgacuucaacaagcaggccauccagcgccugaaggcgcccgcccagaugagcauccagcugaucaacaaggccgugaacgcccucaucaacgaccagcugaucaugaagaaccaccuccgggacaucaugugcauccccuacugcaacuacuccaaguacugguaccucaaccacacgaccaccgggaagaccagccugcccaagugcuggcugguguccaacggcagcuaccucaacgagacgcacuucuccgacgacaucgagcagcaggccgacaacaugaucaccgagaugcugcagaaggaguacauggagcgccagggcaagaccccgcuggggcucgucgaccuguucguguucagcaccuccuucuaccugaucagcaucuuccugcaccucgugaagaucccgacgcaccggcacaucgucggcaagcccugccccaagccccaccgccugaaccacauggggaucugcuccugcggccuguacaagcagccgggggugcccgugaaguggaagcggugaggacuagucccuguucccagagcccacuuuuuuuucuuuuuuugaaauaaaauagccugucuuucagaucucaaaggcucuuuucagagccaccaaaaaaaaaaaaaaaaaaaaaaaaaaaaaaaaaaaaaaaaaaaaaaaaaaaaaaaaaaaaaaaaagaauu

SEQ ID NO: 15237 - RNA, 1717 nt, Artificial Sequence
  mRNA product Design a-1 (hSL-A64-N5) comprising derived and/or modified sequence from LASV(LM776-SLE-2012;Clade IV)__AIT17824__GPCmut1 (opt1)
aggagagucccgcagucggcguccagcggcucugcuuguucgugugugugucguugcaggccuuauucaagcuuaccaugggccagaucgugaccuucuuccaggaggucccccacgugaucgaggaggugaugaacaucguccugaucgcccucagcauccuggccgugcugaaggggcucuacaacuucgcgaccugcggccugguggggcuggucacguuccuccugcugugcggccgcuccugcaccaccagcguguacaaggggguguacgagcuccagacccuggagcugaacauggagacgcucaacaugaccaugccgcuguccugcaccaagaacaacagccaccacuacaucauggucggcaacgagaccggccuggagcucacgcugaccaacaccuccaucaucaaccacaaguucugcaaccugagcgacgcccacaagaagaaccucuacgaccacgcccugauguccaucaucagcaccuuccaccuguccauccccaacuucaaccaguacgaggccaugagcugcgacuucaacgggggcaagaucuccgugcaguacaaccucagccacuccuacgccggggacgcggccaaccacugcggcacgguggccaacgggguccugcagaccuucaugcggauggccuggggcggcagcuacaucgcgcuggacuccgggugcggcaagugggacugcaucaugaccagcuaccaguaccucaucauccagaacaccacgugggaggaccacugccaguucucccgccccagccccaucggguaccugggccugcucucccagcggacccgcgacaucuacaucagccggcgccgccggggcaccuucaccuggacgcucagcgacuccgaggggaaggacaccccgggcggguacugccugacccgguggaugcugaucgaggccgagcucaagugcuucggcaacaccgccguggccaagugcaacgagaagcacgacgaggaguucugcgacaugcugcgccuguucgacuucaacaagcaggccauccagcggcucaaggcgcccgcccagaugagcauccagcugaucaacaaggccgugaacgcccugaucaacgaccagcucaucaugaagaaccaccuccgcgacaucaugugcauccccuacugcaacuacuccaaguacugguaccugaaccacacgaccaccggcaagaccagccugcccaagugcuggcuggucuccaacggcagcuaccugaacgagacgcacuucuccgacgacaucgagcagcaggccgacaacaugaucaccgagaugcuccagaaggaguacauggagcggcaggggaagacgccccugggccugguggaccucuucguguucagcaccuccuucuaccugaucagcaucuuccugcaccuggucaagaucccgacccaccgccacaucguggggaaguccugccccaagccccaccggcucaaccacaugggcaucugcagcugcgggcuguacaagcagcccggcgugccgguccgcuggaagcggugaggacuagucccuguucccagagcccacuuuuuuuucuuuuuuugaaauaaaauagccugucuuucagaucucaaaggcucuuuucagagccaccaaaaaaaaaaaaaaaaaaaaaaaaaaaaaaaaaaaaaaaaaaaaaaaaaaaaaaaaaaaaaaaaagaauu

SEQ ID NO: 15238 - RNA, 1717 nt, Artificial Sequence
  mRNA product Design a-1 (hSL-A64-N5) comprising derived and/or modified sequence from LASV(Mad39;Clade IV)__ANH09722__GPCmut1 (opt1)
aggagagucccgcagucggcguccagcggcucugcuuguucgugugugugucguugcaggccuuauucaagcuuaccaugggccagaucgugaccuucuuccaggaggucccccacgugaucgaggaggugaugaacaucguccugaucgcccucagcauccuggccgugcugaaggggcucuacaacguggcgaccugcggccugaucgggcuggucacguuccuccugcugugcggccgcuccugcaccaccacccucuacaaggggguguacgagcugcaggcccuggagcucaacauggagacgcugaacaugaccaugccgcugagcugcaccaagaacaacucccaccacuacauccgggugggcaacgagaccggccucgagcugacgcugaccaacaccagccucaucaaccacaaguucugcaaccuguccgacgcccacaagaagaaccuguacgaccacgcccucaugagcaucaucuccaccuuccaccugagcauccccaacuucaaccaguacgaggccauguccugcgacuucaacgacgggaagaucagcguccaguacaaccugucccacacguacgcgggcgacaccgccaaccacugcgggaccguggccaacggcgugcuccagaccuucaugcgcauggccuggggcgggagcuacaucgcgcuggacuccggcugcgggggcugggacugcaucaugacgagcuaccaguaccugaucauccagaacaccaccugggaggaccacugccaguucucccggcccagccccaucggguaccucggccugcugucccagcggacccgcgacaucuacaucagccggcgccgccggggcacguucaccuggacccuguccgacagcgaggggaaggacaccccgggcggguacugccucacgcgguggaugcugaucgaggccgagcugaagugcuucggcaacaccgccgucgccaagugcaacgagaagcacgacgaggaguucugcgacaugcuccgccuguucgacuucaacaagcaggccauccagcggcugaaggcgcccgcccagaugagcauccagcucaucaacaaggccgugaacgcccugaucaacgaccagcugaucaugaagaaccaccuccgcgacaucaugugcauccccuacugcaacuacuccaaguacugguaccugaaccacaccgugaccggcaagacgagccugcccaagugcuggcucgucuccaacggcagcuaccugaacgagacccacuucuccgacgacaucgagcagcaggccgacaacaugaucaccgagaugcugcagaaggaguacauggagcggcaggggaagacgccccucggccugguggaccuguucguguucagcaccuccuucuaccugaucagcaucuuccuccaccuggucaagaucccgacccaccgccacgugguggggaagcccugccccaagccccaccggcugaaccacaugggcaucugcuccugcggguucuacaagcagccgggcguccccgugcgcuggaagcggugaggacuagucccuguucccagagcccacuuuuuuuucuuuuuuugaaauaaaauagccugucuuucagaucucaaaggcucuuuucagagccaccaaaaaaaaaaaaaaaaaaaaaaaaaaaaaaaaaaaaaaaaaaaaaaaaaaaaaaaaaaaaaaaaagaauu

SEQ ID NO: 15239 - RNA, 1717 nt, Artificial Sequence
  mRNA product Design a-1 (hSL-A64-N5) comprising derived and/or modified sequence from LASV(Z0947-SLE-2011;Clade IV)__AIT17840__GPCmut1 (opt1)
aggagagucccgcagucggcguccagcggcucugcuuguucgugugugugucguugcaggccuuauucaagcuuaccaugggccagaucgugaccuucuuccaggaggucccccacgugaucgaggaggugaugaacaucguccugaucgcccucagcauccuggccgugcugaaggggcucuacaacuucgcgaccugcggccugguggggcuggucacguuccuccugcugugcggccgcuccugcaccaucagccucuacaaggggguguacgagcugcagacccuggagcucaacauggagacccugaacaugacgaugccgcuguccugcaccaagaacaacagccaccacuacaucauggugggcaacgagaccggccucgagcugacccugacgaacaccuccaucaucaaccacaaguucugcaaccucagcgacgcccacaagaagaaccuguacgaccacgcccugauguccaucaucagcaccuuccaccucuccauccccaacuucaaccaguacgaggccaugagcugcgacuucaacgggggcaagaucuccguccaguacaaccugagccacuccuacgccggggacgcggccaaccacugcggcaccguggccaacggggugcugcagacguucaugcggauggccuggggcggcagcuacaucgcgcucgacuccgggugcgaccggugggacugcaucaugaccagcuaccaguaccugaucauccagaacaccaccugggaggaccacugccaguucucccgccccagccccaucggcuaccuggggcuccugucccagcggacgcgcgacaucuacaucagccggcgccgccggggcaccuucaccuggacccugagcgacuccgagggcaaggacacgcccgggggcuacugccugacccgguggaugcucaucgaggccgagcugaagugcuucgggaacaccgccgucgccaagugcaacgagaagcacgacgaggaguucugcgacaugcugcgccucuucgacuucaacaagcaggccauccagcggcugaaggcgcccgcccagaugagcauccagcugaucaacaaggccgugaacgcccucaucaacgaccagcugaucaugaagaaccaccuccgcgacaucaugugcauccccuacugcaacuacuccaaguacugguaccugaaccacaccacgaccgggaagaccagccugcccaagugcuggcugguguccaacggcagcuaccucaacgagacccacuucuccgacgacaucgagcagcaggccgacaacaugaucacggagaugcugcagaaggaguacauggagcggcagggcaagaccccgcuggggcucgucgaccuguucguguucagcaccuccuucuaccugaucagcaucuuccugcaccucgugaagaucccgacccaccgccacaucgucggcaagcccugccccaagccccaccggcugaaccacauggggaucugcuccugcggccuguacaagcagccgggggugcccgugaaguggaagcgcugaggacuagucccuguucccagagcccacuuuuuuuucuuuuuuugaaauaaaauagccugucuuucagaucucaaaggcucuuuucagagccaccaaaaaaaaaaaaaaaaaaaaaaaaaaaaaaaaaaaaaaaaaaaaaaaaaaaaaaaaaaaaaaaaagaauu

SEQ ID NO: 15240 - RNA, 1717 nt, Artificial Sequence
  mRNA product Design a-1 (hSL-A64-N5) comprising derived and/or modified sequence from LASV(Josiah;Clade IV)__NP_694870__GPCmut1 (opt1)
aggagagucccgcagucggcguccagcggcucugcuuguucgugugugugucguugcaggccuuauucaagcuuaccaugggccagaucgugaccuucuuccaggaggucccccacgugaucgaggaggugaugaacaucguccugaucgcccucagcgugcuggccgugcugaaggggcucuacaacuucgcgaccugcggccuggucgggcuggugacguuccuccugcugugcggccgcuccugcaccaccagccucuacaaggggguguacgagcugcagacccuggagcucaacauggagacgcugaacaugaccaugccgcuguccugcaccaagaacaacagccaccacuacaucauggucggcaacgagaccggccucgagcugacgcugaccaacaccuccaucaucaaccacaaguucugcaaccucagcgacgcccacaagaagaaccuguacgaccacgcccugauguccaucaucagcaccuuccaccucuccauccccaacuucaaccaguacgaggccaugagcugcgacuucaacgggggcaagaucuccgugcaguacaaccugagccacuccuacgccggggacgcggccaaccacugcggcacgguggccaacgggguccugcagaccuucaugcggauggccuggggcggcagcuacaucgcgcucgacuccgggugcggcaacugggacugcaucaugaccagcuaccaguaccugaucauccagaacaccacgugggaggaccacugccaguucucccgccccagccccaucggguaccugggccuccugucccagcggacccgcgacaucuacaucagccggcgccggcgcggcaccuucaccuggacgcugagcgacuccgaggggaaggacaccccgggcggguacugccucacccgguggaugcugaucgaggccgagcugaagugcuucggcaacaccgccguggccaagugcaacgagaagcacgacgaggaguucugcgacaugcuccgccuguucgacuucaacaagcaggccauccagcggcugaaggcgcccgcccagaugagcauccagcucaucaacaaggccgugaacgcccugaucaacgaccagcugaucaugaagaaccaccuccgcgacaucaugugcauccccuacugcaacuacuccaaguacugguaccugaaccacacgaccaccgggcggaccagccugcccaagugcuggcucgucuccaacggcagcuaccugaacgagacgcacuucuccgacgacaucgagcagcaggccgacaacaugaucaccgagaugcugcagaaggaguacauggagcgccagggcaagaccccgcucgggcugguggaccuguucguguucagcaccuccuucuaccucaucagcaucuuccugcaccuggucaagauccccacgcaccggcacaucgugggcaaguccugccccaagccccaccgccugaaccacauggggaucugcagcugcggccucuacaagcagccgggggugcccgucaaguggaagcggugaggacuagucccuguucccagagcccacuuuuuuuucuuuuuuugaaauaaaauagccugucuuucagaucucaaaggcucuuuucagagccaccaaaaaaaaaaaaaaaaaaaaaaaaaaaaaaaaaaaaaaaaaaaaaaaaaaaaaaaaaaaaaaaaagaauu

SEQ ID NO: 15241 - RNA, 1714 nt, Artificial Sequence
  mRNA product Design a-1 (hSL-A64-N5) comprising derived and/or modified sequence from LASV(LP;Clade I)__AAF86701__GPCmut1 (opt1)
aggagagucccgcagucggcguccagcggcucugcuuguucgugugugugucguugcaggccuuauucaagcuuaccaugggccagaucaucaccuucuuccaggaggugccccacgucaucgaggaggugaugaacaucgugcugaucgcccucagccugcuggccauccucaaggggcuguacaacaucgcgaccugcggcaucaucgggcuggucgccuuccucuuccugugcggcaaguccugcagccugacgcucaagggcggguacgagcugcagacccuggagcucaacauggagacccugaacaugaccaugccgcuguccugcacgaagaacagcucccaccacuacauccgcgugggcaacgagaccgggcucgagcugacccugaccaacacgagcaucaucaaccacaaguucugcaaccucuccgacgcccacaagaagaaccuguacgaccacgcccugaugagcaucaucuccaccuuccaccucagcauccccaacuucaaccaguacgaggccauguccugcgacuucaacggcgggaagaucagcgugcaguacaaccugucccacagcuacgcgggcgacgccgccgagcacugcgggaccgucgccaacggcgugcugcagaccuucaugcggauggcguggggcgggcgcuacaucgcccucgacuccggcugcgggaacugggacugcaucaugacgagcuaccaguaccugaucauccagaacaccaccugggaggaccacugccaguucucccggcccagccccaucggcuaccugggccuccugucccagcgcacccgggacaucuacaucagccgccggcgccgggggacguucaccuggacccugagcgacuccgagggcaacgagacccccgggggcuacugccucacgcgcuggaugcugaucgaggccgagcugaagugcuucgggaacaccgccguggccaagugcaacgagaagcacgacgaggaguucugcgacaugcuccggcuguucgacuucaacaagcaggcgauccgccggcugaaggccccggcccagaugagcauccagcucaucaacaaggccgucaacgcccugaucaacgaccagcugaucaugaagaaccaccuccgcgacaucaugugcauccccuacugcaacuacuccaaguacugguaccugaaccacaccagcuccggccggaccagccugcccaagugcuggcucaucuccaacggcagcuaccugaacgagacgcaguucuccgacgacaucgagcagcaggcggacaacaugaucaccgagaugcugcagaaggaguacaucgagcgccaggggaagaccccgcucggccugguggacaucuucaucuucagcaccuccuucuaccugaucagcaucuuccuccaccugaucaagauccccacgcaccggcacaucguggggaagcccugccccaagccgcaccgccugaaccacaugggcgucugcuccugcgggcuguacaagcaccccggcgugcccaccaaguggaagcggugaggacuagucccuguucccagagcccacuuuuuuuucuuuuuuugaaauaaaauagccugucuuucagaucucaaaggcucuuuucagagccaccaaaaaaaaaaaaaaaaaaaaaaaaaaaaaaaaaaaaaaaaaaaaaaaaaaaaaaaaaaaaaaaaagaauu

SEQ ID NO: 15242 - RNA, 1714 nt, Artificial Sequence
  mRNA product Design a-1 (hSL-A64-N5) comprising derived and/or modified sequence from LASV(803213;Clade II)__AAF86703__GPCmut1 (opt1)
aggagagucccgcagucggcguccagcggcucugcuuguucgugugugugucguugcaggccuuauucaagcuuaccaugggccagaucaucaccuucuuccaggaggugccccacgucaucgaggaggugaugaacaucgugcugaucgcccucagccugcuggccauccucaaggggaucuacaacgucgcgaccugcggccuguucgggcugaucuccuuccuccugcugugcggccgcagcugcuccgugacguacaaggggguguacgagcuccagacccuggagcugaacauggccaaccucaacaugaccaugccgcugagcugcaccaagaacaacucccaccacuacaucauggucggcaacgagacgggccuggagcucacccugaccaacaccagcaucaucaaccacaaguucugcaaccuguccgacgcccacaagaagaaccucuacgaccacgcccugaugagcaucaucuccacguuccaccugagcauccccaacuucaaccaguacgaggccauguccugcgacuucaacgggggcaagaucagcgugcaguacaaccucucccacagcuucgcgguggacgccgccaaccacugcgggaccaucgccaacggcguccugcagaccuucaugcggauggcguggggcggguccuacaucgcccuggacagcggcugcgggaacugggacugcaucaugaccuccuaccaguaccucaucauccagaacacgaccugggaggaccacugccaguucagccgccccucccccaucggcuaccuggggcugcucagccagcggacccgcgacaucuacaucagccggcgccggcgcggcaccuucacguggacccuguccgacagcgagggcaacgaggcccccgggggcuacugccugacccgguggaugcucaucgaggccgagcugaagugcuucgggaacaccgccguggcgaagugcaacgagaagcacgacgaggaguucugcgacaugcugcgccucuucgacuucaacaagcaggccaucaagcggcugaagacgccggcccagauguccauccagcugaucaacaaggccgugaacgcccucaucaacgaccagcugaucaugaagaaccaccuccgcgacaucaugugcauccccuacugcaacuacagccgguacugguaccugaaccacaccgucaccggcaagaccucccugccccgcugcuggcuggugagcaacggguccuaccucaacgagacgcacuucagcgacgacaucgagcagcaggcggacaacaugaucaccgagaugcugcagaaggaguacauggaccggcagggcaagaccccgcugggccucguggaccuguucgucuucuccaccagcuucuaccugaucuccaucuuccuccaccuggugaagauccccacgcaccgccacaucguggggaagcccugccccaagccgcaccggcugaaccacaugggcaucugcagcugcgggcuguacaagcaccccggcguccccgugaaguggaagcgcugaggacuagucccuguucccagagcccacuuuuuuuucuuuuuuugaaauaaaauagccugucuuucagaucucaaaggcucuuuucagagccaccaaaaaaaaaaaaaaaaaaaaaaaaaaaaaaaaaaaaaaaaaaaaaaaaaaaaaaaaaaaaaaaaagaauu

SEQ ID NO: 15243 - RNA, 1714 nt, Artificial Sequence
  mRNA product Design a-1 (hSL-A64-N5) comprising derived and/or modified sequence from LASV(GA391;Clade III)__CAA36645__GPCmut1 (opt1)
aggagagucccgcagucggcguccagcggcucugcuuguucgugugugugucguugcaggccuuauucaagcuuaccaugggccagaucgugaccuucuuccaggaggucccccacgugaucgaggaggugaugaacaucguccugaucgcccucagcauccuggccauccugaaggggcucuacaacguggcgaccugcggccugaucgggcuggugacguuccuccugcuguccggccgcagcugcucccucaucuacaaggggaccuacgagcugcagacccuggagcucaacauggagacccugaacaugacgaugccgcugagcugcaccaagaacaacucccaccacuacauccgggucggcaacgagaccggccucgagcugacccugacgaacaccagcauccucaaccacaaguucugcaaccuguccgacgcccacaagcgcaaccuguacgaccacagccucauguccaucaucagcaccuuccaccuguccauccccaacuucaaccaguacgaggccaugagcugcgacuucaacgggggcaagaucaccgugcaguacaaccugucccacagcuucgccguggacgccgcggggcacugcggcacgcucgccaacgggguccugcagaccuucaugcggauggccuggggcggcuccuacaucgcccuggacagcgggugcggcaacugggacugcaucaugaccuccuaccaguaccucaucauccagaacaccacgugggacgaccacugccaguucagccgccccucccccaucggguaccugggccugcucagccagcggacccgcgacaucuacaucagccggcgccggcgcggcaccuucaccuggacgcuguccgacagcgaggggaacgagaccccgggcggguacugccugacccgguggaugcucaucgaggcggagcugaagugcuucggcaacaccgccguggccaagugcaacgagaagcacgacgaggaguucugcgacaugcugcgccucuucgacuucaacaagcaggccauccggcgccugaagacgcccgcccagauguccauccagcugaucaacaaggcggugaacgcccucaucaacgaccagcugaucaugaagaaccaccuccgggacaucaugugcauccccuacugcaacuacagccgcuacugguaccugaaccacaccuccaccgggaagaccagccugccccggugcuggcugaucuccaacggcagcuaccucaacgagacgaaguucuccgacgacaucgagcagcaggccgacaacaugaucaccgagaugcugcagaaggaguacaucgaccgccagggcaagaccccgcuggggcucgucgaccuguucguguucagcaccuccuucuaccugaucagcaucuuccugcaccucgugaagauccccacgcaccggcacaucgucggcaagcccugccccaagccgcaccgccugaaccacauggggaucugcuccugcggccuguacaagcagcccggggugcccgugcgguggaagcgcugaggacuagucccuguucccagagcccacuuuuuuuucuuuuuuugaaauaaaauagccugucuuucagaucucaaaggcucuuuucagagccaccaaaaaaaaaaaaaaaaaaaaaaaaaaaaaaaaaaaaaaaaaaaaaaaaaaaaaaaaaaaaaaaaagaauu

SEQ ID NO: 15244 - RNA, 1717 nt, Artificial Sequence
  mRNA product Design a-1 (hSL-A64-N5) comprising derived and/or modified sequence from LASV(AV;Clade V)__CCA30314__GPCmut1 (opt1)
aggagagucccgcagucggcguccagcggcucugcuuguucgugugugugucguugcaggccuuauucaagcuuaccaugggccagaucgugaccuucuuccaggaggucccccacgugaucgaggaggugaugaacaucguccugaucgcccucagcauccuggccgugcugaaggggcucuacaacaucgcgaccugcggccugaucgggcugaucacguuccuccugcugugcggccgcuccugcagcuccaaccucuacaaggggguguacgagcugcagagccuggaccucaacauggagacccugaacaugaccaugccgcuguccugcaccaagaacaacagccaccacuacauccgggucggcaacgacacgggccucgagcugacccugaccaacaccuccauccucaaccacaaguucugcaaccugagcgacgcccacaagaaggaccuguacgaccacgcccucauguccaucaucagcacguuccaccuguccauccccaacuucaaccaguacgaggccaugagcugcgacuucaacgggggcaagaucuccgugcaguacaaccugagccacuccuacgccaucgacgcggccaaccacugcgggaccguggccaacggcauccuccagaccuucaugcgcauggccuggggcgggagcuacaucgcgcuggacuccggcugcgggaacugggacugcaucaugaccagcuaccaguaccugaucauccagaacacgaccugggagaaccacugccaguucucccggcccagccccaucggcuaccucgggcugcugagccagcgcacccgggacaucuacaucucccgccggcgccggggcaccuucacguggacccucagcgacuccgagggcaacgccacccccgggggcuacugccugacccgcuggaugcugaucgaggccgagcucaagugcuucgggaacacggccgucgccaagugcaacgagaagcacgacgaggaguucugcgacaugcugcggcuguucgacuucaacaagcaggcgaucagccgccucaaguccccggcccagaugagcauccagcugaucaacaaggccgugaacgcccugaucaacgaccagcucaucaugaagaaccaccuccgggacaucaugugcauccccuacugcaacuacuccaaguacugguaccugaaccacaccaucaccggcaagaccagccugcccaagugcuggcugguguccaacgggagcuaccugaacgagacgcacuucuccgacgacaucgagcagcaggccgacaacaugaucaccgagaugcuccagaaggaguacauggagcgccagggcaagaccccgcugggccuggucgaccucuucguguucagcaccuccuucuaccugaucagcaucuuccugcggcuggugaagauccccacgcaccgccacaucgucgggaagcccugccccaagccgcaccggcucaaccacaugggcaucugcuccugcgggcuguacaagcagcccggcgugcccgugcgcuggaagcggugaggacuagucccuguucccagagcccacuuuuuuuucuuuuuuugaaauaaaauagccugucuuucagaucucaaaggcucuuuucagagccaccaaaaaaaaaaaaaaaaaaaaaaaaaaaaaaaaaaaaaaaaaaaaaaaaaaaaaaaaaaaaaaaaagaauu

SEQ ID NO: 15245 - RNA, 1714 nt, Artificial Sequence
  mRNA product Design a-1 (hSL-A64-N5) comprising derived and/or modified sequence from LASV(Togo/2016/7082;Clade VI)__AMR44577__GPCmut1 (opt1)
aggagagucccgcagucggcguccagcggcucugcuuguucgugugugugucguugcaggccuuauucaagcuuaccaugggccagaucaucaccuucuuccaggaggugccccacgucaucgaggaggugaugaacaucgugcugaucgcccucagccugcuggccauccucaagggggucuacaacguggcgaccugcggcaucaucgggcuggugacguuccuguuccucugcggccgcuccugcagccugaucuacaagggguccuacgagcugcagacccucgagcugaacauggagacccugaacaugaccaugccgcucagcugcacgaagaacuccagccaccacuacauccgggucggcaacgagaccggccuggagcugacccucaccaacacguccaucaucaaccacaaguucugcaaccugagcgacgcccacaagcgcaaccuguacgaccacgcccucauguccauccugagcaccuuccaccuguccauccccaacuucaaccaguacgaggccaugagcugcgacuucaacgggggcaagaucuccgugcaguacaaccucagccacgccuacgcgguggacgccgccgagcacugcgggaccgucgccaacggcgugcugcagaccuucaugcggauggcguggggcggguccuacaucgcccuggacagcggcugcgggaacugggacugcaucaugacguccuaccaguaccucaucauccagaacaccaccugggaggaccacugccaguucagccgccccucccccaucggcuaccuggggcugcucagccagcggacccgcgacaucuacaucagccggcgccggcgcggcacguucaccuggacccuguccgacagcgagggcaacgagacccccgggggcuacugccugacgcgguggaugcucaucgaggccgagcugaagugcuucgggaacaccgccguggccaagugcaacgagaagcacgacgaggaguucugcgacaugcugcgccucuucgacuucaacaagcaggcgauccagcggcugaaguccccggcccagaugagcauccagcugaucaacaaggccgucaacgcccucaucaacgaccagcugaucaugaagaaccaccuccgcgacaugaugugcauccccuacugcaacuacuccaaguacugguaccugaaccacaccagcuccggccggaccagccugcccaagugcuggcugguguccaacgggagcuaccucaacgagacgcacuucuccgacgacaucgagcagcaggccgacaacaugaucaccgagaugcugcagaaggaguacaucgaccgccagggcaagaccccgcugggccucguggaccuguucgucuucagcaccuccuucuaccugaucagcaucuuccuccaccugaucaagauccccacgcaccggcacaucguggggaagcccugccccaagccgcaccgccugaaccacaugggcaucugcuccugcgggcuguacaagcagcccggcgugcccacccgguggaagcgcugaggacuagucccuguucccagagcccacuuuuuuuucuuuuuuugaaauaaaauagccugucuuucagaucucaaaggcucuuuucagagccaccaaaaaaaaaaaaaaaaaaaaaaaaaaaaaaaaaaaaaaaaaaaaaaaaaaaaaaaaaaaaaaaaagaauu

SEQ ID NO: 15246 - RNA, 1714 nt, Artificial Sequence
  mRNA product Design a-1 (hSL-A64-N5) comprising derived and/or modified sequence from LASV(KAK-428;Clade n.d. (VII))__ANH09740__GPCmut1 (opt1)
aggagagucccgcagucggcguccagcggcucugcuuguucgugugugugucguugcaggccuuauucaagcuuaccaugggccagaucgugaccuucuuccaggaggucccccacgugaucgaggaggugaugaacaucguccugaucgcccucagccugcuggccauccucaaggggcuguacaacuucgcgaccugcggcgugaucgggcugaucacguuccuccugcugugcggccgcuccugcagcgccaccuacaaggggcaguacgagcuccagacccuggagcugaacauggagucccucaacaugaccaugccgcugagcugcacgaagaacaacucccaccacuacauccgggccggcaacaacaccggccuggagcucacccugaccaacacgagcaucaucucccacaaguucugcaaccugagcgacgcccacaagaagaaccucuacgaccacacccugauguccaucaucaccaccuuccaccugagcauccccaacuucaaccaguacgaggccauguccugcgacuucaacgggggcaagaucagcauccaguacaaccucucccacagcuacgcgggggacgccgcccagcacugcggcacgguggccaacgggguccugcagaccuucaugcgcauggcguggggcggcuccuaccuggcccucgacagcgggugccggggcugggacugcaucaucuccagcuaccaguaccugaucauccagaacaccaccugggacgaccacugccaguucucccgccccagccccaucggguaccugggcuucgugagccagaagacgcgggacaucuacaucucccgccggcgccggggcaccuucaccuggacccucagcgacuccgaggggcacgacaugccgggcggguacugccugacgcgcuggaugcugaucgaggccgaccucaagugcuucggcaacaccgccguggccaagugcaacgagaagcacgacgaggaguucugcgacauguggcggcuguucgacuucaacaagcaggcgauccagcgccugaaggcccccgcccagaugaacauccagcucaucaacaaggccgucaacgcccugaucaacgaccagcugaugaugaagaaccaccuccgggacaucaugugcauccccuacugcaacuacagcaaguucugguaccugaacaacaccaccacggggcgcaccucccugccccggugcuggcucaucagcaacggcuccuaccugaacgagacccacuucagcgacgacaucgagcagcaggcggacaacaugaucaccgagaugcugcagaaggaguacauggaccgccagggcaagacgccgcucgggcugguggaccuguucguguucuccaccagcuucuaccucaucaccaucuuccugcaccuggucaagauccccacccaccggcacaucgugggcaagcccugccccaagccgcaccgccucaaccacauggggaucugcuccugcggccuguacaagcagcccggggugcccguccgguggaagcgcugaggacuagucccuguucccagagcccacuuuuuuuucuuuuuuugaaauaaaauagccugucuuucagaucucaaaggcucuuuucagagccaccaaaaaaaaaaaaaaaaaaaaaaaaaaaaaaaaaaaaaaaaaaaaaaaaaaaaaaaaaaaaaaaaagaauu

SEQ ID NO: 15247 - RNA, 1714 nt, Artificial Sequence; identical to SEQ ID NO: 15241
  mRNA product Design a-1 (hSL-A64-N5) comprising derived and/or modified sequence from LASV(Pinneo-NIG-1969;Clade I)__AIT17836__GPCmut1 (opt1)

SEQ ID NO: 15248 - RNA, 1714 nt, Artificial Sequence
  mRNA product Design a-1 (hSL-A64-N5) comprising derived and/or modified sequence from LASV(ISTH0009-NIG-2011;Clade II)__AIT17404__GPCmut1 (opt1)
aggagagucccgcagucggcguccagcggcucugcuuguucgugugugugucguugcaggccuuauucaagcuuaccaugggccagaucaucaccuucuuccaggaggugccccacgucaucgaggaggugaugaacaucgugcugaucgcccucagccugcuggccauccucaaggggaucuacaacgucgcgaccugcggccuguucgggcugguguccuuccuccugcugugcggccgcagcugcuccacgaccuacaaggggguguacgagcuccagacccuggagcuggacauggccagccucaacaugaccaugccgcuguccugcacgaagaacaacagccaccacuacaucauggucggcaacgagaccggccuggagcucacccugaccaacacguccaucaucaaccacaaguucugcaaccugagcgacgcccacaagaagaaccucuacgaccacgcccugauguccaucaucagcaccuuccaccuguccauccccaacuucaaccaguacgaggccaugagcugcgacuucaacgggggcaagaucuccgugcaguacaaccucagccacgcguacgccguggacgccgccaaccacugcgggaccaucgcgaacggcguccugcagaccuucaugcggauggccuggggcggguccuacaucgcccuggacagcggcugcggguccugggacugcaucaugacgagcuaccaguaccucaucauccagaacaccaccugggaggaccacugccaguucucccgccccagccccaucggcuaccuggggcugcucagccagcggacccgcgacaucuacaucucccggcgccggcgcggcacguucaccuggacccugagcgacuccgagggcaacgagacccccgggggcuacugccugacgcgguggaugcucaucgaggccgagcugaagugcuucgggaacaccgccguggcgaagugcaacgagaagcacgacgaggaguucugcgacaugcugcgccucuucgacuucaacaagcaggccauccggcgccugaagaccccggcccagaugagcauccagcugaucaacaaggccgugaacgcccucaucaacgaccagcugaucaugaagaaccaccuccgggacaucaugugcauccccuacugcaacuacuccaaguacugguaccugaaccacaccgucacgggcaagaccagccugccccgcugcuggcugguguccaacgggagcuaccucaacgagacccacuucuccgacgacaucgagcagcaggcggacaacaugaucaccgagcugcugcagaaggaguacauggaccggcagggcaagacgccgcucggccugguggaccuguucgucuucagcaccuccuucuaccucaucagcaucuuccugcaccugaucaagauccccacccaccgccacaucaccgggaagcccugccccaagccgcaccggcugaaccacaugggcaucugcuccugcgggcucuacaagcaccccggcgugcccgugaaguggaagcgcugaggacuagucccuguucccagagcccacuuuuuuuucuuuuuuugaaauaaaauagccugucuuucagaucucaaaggcucuuuucagagccaccaaaaaaaaaaaaaaaaaaaaaaaaaaaaaaaaaaaaaaaaaaaaaaaaaaaaaaaaaaaaaaaaagaauu

SEQ ID NO: 15249 - RNA, 1714 nt, Artificial Sequence
  mRNA product Design a-1 (hSL-A64-N5) comprising derived and/or modified sequence from LASV(ISTH2010-NIG-2012;Clade II)__AIT17482__GPCmut1 (opt1)
aggagagucccgcagucggcguccagcggcucugcuuguucgugugugugucguugcaggccuuauucaagcuuaccaugggccagaucaucaccuucuuccaggaggugccccacgucaucgaggaggugaugaacaucgugcugaucgcccucagccugcuggccauccucaaggggaucuacaacgucgcgaccugcggccuguucgggcugguguccuuccuccugcugugcggccgcagcugcuccacgaccuacaaggggguguacgagcuccagacccuggagcuggacauggccagccucaacaugaccaugccgcuguccugcacgaagaacaacagccaccacuacaucauggucggcaacgagaccggccuggagcucacccugaccaacacguccaucaucaaccacaaguucugcaaccugagcgacgcccacaagaagaaccucuacgaccacgcccugauguccaucaucagcaccuuccaccuguccauccccaacuucaaccaguacgaggccaugagcugcgacuucaacgggggcaagaucuccgugcaguacaaccucagccacgcguacgccguggacgccgccaaccacugcgggaccaucgcgaacggcguccugcagaccuucaugcggauggccuggggcggguccuacaucgcccuggacagcggcugcggguccugggacugcaucaugacgagcuaccaguaccucaucauccagaacaucaccugggaggaccacugccaguucucccgccccagccccaucggcuaccuggggcugcucagccagcggacccgcgacaucuacaucucccggcgccggcgcggcaccuucacguggacccugagcgacuccgagggcaacgagacccccgggggcuacugccugacccgguggaugcucaucgaggccgagcugaagugcuucgggaacacggccguggcgaagugcaacgagaagcacgacgaggaguucugcgacaugcugcgccucuucgacuucaacaagcaggccauccggcgccugaagaccccggcccagaugagcauccagcugaucaacaaggccgugaacgcccucaucaacgaccagcugaucaugaagaaccaccuccgggacaucaugugcauccccuacugcaacuacuccaaguacugguaccugaaccacaccgucaccggcaagacgagccugccccgcugcuggcugguguccaacgggagcuaccucaacgagacccacuucuccgacgacaucgagcagcaggcggacaacaugaucaccgagcugcugcagaaggaguacaucgaccggcagggcaagaccccgcucggccugguggaccuguucgucuucagcacguccuucuaccucaucagcaucuuccugcaccuggugaagauccccacccaccgccacguggucgggaagcccugccccaagccgcaccggcugaaccacaugggcaucugcuccugcgggcucuacaagcaccccggcgugcccgugaaguggaagcgcugaggacuagucccuguucccagagcccacuuuuuuuucuuuuuuugaaauaaaauagccugucuuucagaucucaaaggcucuuuucagagccaccaaaaaaaaaaaaaaaaaaaaaaaaaaaaaaaaaaaaaaaaaaaaaaaaaaaaaaaaaaaaaaaaagaauu

SEQ ID NO: 15250 - RNA, 1714 nt, Artificial Sequence
  mRNA product Design a-1 (hSL-A64-N5) comprising derived and/or modified sequence from LASV(Lassa virus/H.sapiens-wt/NGA/2015/ISTH_0543;Clade II)__AVO03639__GPCmut1 (opt1)
aggagagucccgcagucggcguccagcggcucugcuuguucgugugugugucguugcaggccuuauucaagcuuaccaugggccagaucaucaccuucuuccaggaggugccccacgucaucgaggaggugaugaacaucgugcugaucgcccucagccugcuggccauccucaaggggaucuacaacgucgcgaccugcggccuguucgggcugguguccuuccuccugcugugcggccgcagcugcuccacgaccuacaaggggguguacgagcuccagacccuggagcuggacauggccaaccucaacaugaccaugccgcugagcugcacgaagaacaacucccaccacuacaucauggucggcaacgagaccggccuggagcucacccugaccaacacgagcaucaucaaccacaaguucugcaaccuguccgacgcccacaagaagaaccucuacgaccacgcccugaugagcaucaucuccaccuuccaccugagcauccccaacuucaaccaguacgaggccauguccugcgacuucaacgggggcaagaucagcgugcaguacaaccucucccacaccuacgcgguggacgccgccaaccacugcgggaccaucgccaacggcguccugcagacguucaugcggauggcguggggcgggagcuacaucgcccuggacuccggcugcgggagcugggacugcaucaugaccuccuaccaguaccucgugauccagaacaccaccugggaggaccacugccaguucagccgccccucccccaucggcuaccuggggcugcucagccagcggacgcgcgacaucuacaucagccggcgccggcgcggcaccuucaccuggacccuguccgacagcgagggcaacgagacgcccgggggcuacugccugacccgguggaugcucaucgaggccgagcugaagugcuucgggaacaccgccguggccaagugcaacgagaagcacgacgaggaguucugcgacaugcugcgccucuucgacuucaacaagcaggcgauccggcgccugaagaccccggcccagauguccauccagcugaucaacaaggccgucaacgcccucaucaacgaccagcugaucaugaagaaccaccuccgggacaucaugugcauccccuacugcaacuacagcaaguacugguaccugaaccacacggugaccggcaagaccucccugccccgcugcuggcuggugagcaacggguccuaccucaacgagacccacuucagcgacgacaucgagcagcaggccgacaacaugaucacggagcugcugcagaaggaguacaucgaccggcagggcaagaccccgcucggccuggucgaccuguucguguucuccaccagcuucuaccucaucuccaucuuccugcaccuggugaagauccccacccaccgccacaucacggggaagcccugccccaagccgcaccggcugaaccacaugggcaucugcagcugcgggcucuacaagcaccccggcguccccgugaaguggaagcgcugaggacuagucccuguucccagagcccacuuuuuuuucuuuuuuugaaauaaaauagccugucuuucagaucucaaaggcucuuuucagagccaccaaaaaaaaaaaaaaaaaaaaaaaaaaaaaaaaaaaaaaaaaaaaaaaaaaaaaaaaaaaaaaaaagaauu

SEQ ID NO: 15251 - RNA, 1714 nt, Artificial Sequence
  mRNA product Design a-1 (hSL-A64-N5) comprising derived and/or modified sequence from LASV(Lassa virus/H.sapiens-wt/NGA/2016/ISTH_0009;Clade II)__AVO03571__GPCmut1 (opt1)
aggagagucccgcagucggcguccagcggcucugcuuguucgugugugugucguugcaggccuuauucaagcuuaccaugggccagaucaucaccuucuuccaggaggugccccacgucaucgaggaggugaugaacaucgugcugaucgcccucagccugcuggccauccucaaggggaucuacaacgucgcgaccugcggccugcuggggcucguguccuuccugcugcucugcggccgcagcugcuccacgaccuacaaggggguguacgagcugcagacccuggagcucgacauggccagccugaacaugaccaugccgcuguccugcacgaagaacaacagccaccacuacaucauggucggcaacgagaccggccucgagcugacccugaccaacacguccaucaucaaccacaaguucugcaaccucagcgacgcccacaagaagaaccuguacgaccacgcccugauguccaucaucagcaccuuccaccucuccauccccaacuucaaccaguacgaggccaugagcugcgacuucaacgggggccggaucuccgugcaguacaaccugagccacuccuacgcgguggacgccgccaaccacugcgggaccaucgccaacggcguccugcagaccuucaugcgcauggcguggggcgggagcuacaucgcccucgacuccggcugcgggagcugggacugcaucaugacguccuaccaguaccugaucauccagaacaccaccugggaggaccacugccaguucagccggcccagccccaucggcuaccuggggcuccugucccagcgcacccgggacaucuacaucagccgccggcgccggggcacguucaccuggacccuguccgacagcgagggcaacgagacccccgggggcuacugccucacgcgcuggaugcugaucgaggccgagcugaagugcuucgggaacaccgccguggccaagugcaacgagaagcacgacgaggaguucugcgacaugcuccggcuguucgacuucaacaagcaggcgauccgccggcugaagaccccggcccagauguccauccagcucaucaacaaggccgugaacgcccugaucaacgaccagcugaucaugaagaaccaccuccgcgacaucaugugcauccccuacugcaacuacagcaaguacugguaccugaaccacaccgucacgggcaagaccucccugccccggugcuggcucgugagcaacggguccuaccugaacgagacccacuucagcgacgacaucgagcagcaggccgacaacaugaucaccgagcugcuccagaaggaguacaucgaccgccagggcaagacgccgcugggccugguggaccucuucgucuucuccaccagcuucuaccugaucuccaucuuccugcaccuggugaagauccccacccaccggcacaucaccgggaagcccugccccaagccgcaccgccucaaccacaugggcaucugcagcugcgggcuguacaaccaccccggcgugcccgucaaguggaagcggugaggacuagucccuguucccagagcccacuuuuuuuucuuuuuuugaaauaaaauagccugucuuucagaucucaaaggcucuuuucagagccaccaaaaaaaaaaaaaaaaaaaaaaaaaaaaaaaaaaaaaaaaaaaaaaaaaaaaaaaaaaaaaaaaagaauu

SEQ ID NO: 15252 - RNA, 1714 nt, Artificial Sequence
  mRNA product Design a-1 (hSL-A64-N5) comprising derived and/or modified sequence from LASV(Lassa virus/H.sapiens-wt/NGA/2016/ISTH_0017;Clade II)__AVO03567__GPCmut1 (opt1)
aggagagucccgcagucggcguccagcggcucugcuuguucgugugugugucguugcaggccuuauucaagcuuaccaugggccagaucaucaccuucuuccaggaggugccccacgucaucgaggaggugaugaacaucgugcugaucgcccucagccugcuggccauccucaaggggaucuacaacgucgcgaccugcggccuguucgggcugguguccuuccuccugcugugcggccgcagcugcuccacgaccuacaaggggguguacgagcuccagacccuggagcuggacauggccagccucaacaugaccaugccgcuguccugcacgaagaacaacagccaccacuacaucauggucggcaacgagaccggccuggagcucacccugaccaacacguccaucaucaaccacaaguucugcaaccugagcgacgcccacaagaagaaccucuacgaccacgcccugauguccaucaucagcaccuuccaccuguccauccccaacuucaaccaguacgaggccaugagcugcgacuucaacgggggcaagaucuccgugcaguacaaccucagccacaccuacgcgaucgacgccgccaaccacugcgggaccaucgccaacggcgugcugcagacguucaugcggauggcguggggcggguccuacaucgcccuggacagcggcugcggguccugggacugcaucaugaccagcuaccaguaccucaucauccagaacaccaccugggaggaccacugccaguucucccgccccagccccaucggcuaccuggggcugcucagccagcggacgcgcgacaucuacaucucccggcgccggcgcggcaccuucaccuggacccugagcgacuccgagggcaacgagacgcccgggggcuacugccugacccgguggaugcucaucgaggccgagcugaagugcuucgggaacaccgccgucgccaagugcaacgagaagcacgacgaggaguucugcgacaugcugcgccucuucgacuucaacaagcaggcgauccggcgccugaagaccccggcccagaugagcauccagcugaucaacaaggccgugaacgcccucaucaacgaccagcugaucaugaagaaccaccuccgggacaucaugugcauccccuacugcaacuacuccaaguacugguaccugaaccacacggugaccggcaagaccagccugccccgcugcuggcuggucuccaacgggagcuaccucaacgagacccacuucuccgacgacaucgagcagcaggccgacaacaugaucacggagcugcugcagaaggaguacauggaccggcagggcaagaccccgcucggccugguggaccuguucguguucagcaccuccuucuaccucaucagcaucuuccugcaccugguccgcauccccacccaccggcacgugaucgggaagcccugccccaagccgcaccgccugaaccacaugggcaucugcuccugcgggcucuacaagcaccccggcgugcccgucaaguggaagcggugaggacuagucccuguucccagagcccacuuuuuuuucuuuuuuugaaauaaaauagccugucuuucagaucucaaaggcucuuuucagagccaccaaaaaaaaaaaaaaaaaaaaaaaaaaaaaaaaaaaaaaaaaaaaaaaaaaaaaaaaaaaaaaaaagaauu

SEQ ID NO: 15253 - RNA, 1714 nt, Artificial Sequence
  mRNA product Design a-1 (hSL-A64-N5) comprising derived and/or modified sequence from LASV(Lassa virus/H.sapiens-wt/NGA/2018/ISTH_0959;Clade II)__AVV65099__GPCmut1 (opt1)
aggagagucccgcagucggcguccagcggcucugcuuguucgugugugugucguugcaggccuuauucaagcuuaccaugggccagaucaucaccuucuuccaggaggugccccacgucaucgaggaggugaugaacaucgugcugaucgcccucagccugcuggccauccucaaggggaucuacaacgucgugaccugcggccuguucgggcugguguccuuccuccugcugugcggccgcagcugcuccacgaccuacaagggggucuacgagcuccagacccuggagcuggacauggcgagccucaacaugaccaugccgcuguccugcacgaagaacaacagccaccacuacaucauggugggcaacgagaccggccuggagcucacccugaccaacacguccaucaucaaccacaaguucugcaaccugagcgacgcccacaagaagaaccucuacgaccacgcccugauguccaucaucagcaccuuccaccuguccauccccaacuucaaccaguacgaggccaugagcugcgacuucaacgggggcaagaucuccgugcaguacaaccucagccacgccuacgcgaucgacgccgccaaccacugcgggaccaucgccaacggcguccugcagaccuucaugcggauggcguggggcggguccuacaucgcccuggacagcggcugcggguccugggacugcaucaugacgagcuaccaguaccucaucauccagaacaccaccugggaggaccacugccaguucucccgccccagccccaucggcuaccuggggcugcucagccagcggacccgcgacaucuacaucucccggcgccggcgcggcacguucaccuggacccugagcgacuccgagggcaacgagacccccgggggcuacugccugacgcgguggaugcucaucgaggccgagcugaagugcuucgggaacaccgccguggccaagugcaacgagaagcacgacgaggaguucugcgacaugcugcgccucuucgacuucaacaagcaggcgauccggcgccugaagaccccggcccagaugagcauccagcugaucaacaaggccgugaacgcccucaucaacgaccagcugaucaugaagaaccaccuccgggacaucaugugcauccccuacugcaacuacuccaaguacugguaccugaaccacaccgucacgggcaagaccagccugccccgcugcuggcugguguccaacgggagcuaccucaacgagacccacuucuccgacgacaucgagcagcaggccgacaacaugaucaccgagcugcugcagaaggaguacaucgaccggcagggcaagacgccgcucggccugguggaccuguucgucuucagcaccuccuucuaccucaucagcaucuuccugcaccuggugaagauccccacccaccgccacgugaucgggaagcccugccccaagccgcaccggcugaaccacaugggcaucugcuccugcgggcucuacaagcaccccggcguccccgugaaguggaagcgcugaggacuagucccuguucccagagcccacuuuuuuuucuuuuuuugaaauaaaauagccugucuuucagaucucaaaggcucuuuucagagccaccaaaaaaaaaaaaaaaaaaaaaaaaaaaaaaaaaaaaaaaaaaaaaaaaaaaaaaaaaaaaaaaaagaauu

SEQ ID NO: 15254 - RNA, 1714 nt, Artificial Sequence
  mRNA product Design a-1 (hSL-A64-N5) comprising derived and/or modified sequence from LASV(LASV003-NIG-2008;Clade II)__AIT17580__GPCmut1 (opt1)
aggagagucccgcagucggcguccagcggcucugcuuguucgugugugugucguugcaggccuuauucaagcuuaccaugggccagaucaucaccuucuuccaggaggugccccacgucaucgaggaggugaugaacaucgugcugaucgcccucagccugcuggccauccucaaggggaucuacaacgucgcgaccugcggccuguucgggcugguguccuuccuccugcugugcggccgcagcugcuccacgaccuacaaggggguguacgagcuccagacccuggagcuggacauggccagccucaacaugaccaugccgcuguccugcacgaagaacaacagccaccacuacaucauggucggcaacgagaccggccuggagcucacccugaccaacacguccaucaucaaccacaaguucugcaaccugagcgacgcccacaagaagaaccucuacgaccacgcccugauguccaucaucagcaccuuccaccuguccauccccaacuucaaccaguacgaggccaugagcugcgacuucaacgggggcaagaucuccgugcaguacaaccucagccacaccuacgcgguggacgccgccaaccacugcgggaccaucgccaacggcguccugcagacguucaugcggauggcguggggcggguccuacaucgcccuggacagcggcugcggguccugggacugcaucaugaccagcuaccaguaccucaucauccagaacaccaccugggaggaccacugccaguucucccgccccagccccaucggcuaccuggggcugcucagccagcggacgcgcgacaucuacaucucccggcgccggcgcggcaccuucaccuggacccugagcgacuccgagagcaacgagacgccgggcggguacugccugacccgguggaugcucaucgaggccgagcugaagugcuucggcaacaccgccguggccaagugcaacgagaagcacgacgaggaguucugcgacaugcugcgccucuucgacuucaacaagcaggcgauccggcgccugaaggcccccgcccagauguccauccagcugaucaacaaggccgugaacgcccucaucaacgaccagcugaucaugaagaaccaccuccgggacaucaugugcauccccuacugcaacuacagcaaguacugguaccugaaccacaccgucacggggcgcaccucccugccccggugcuggcuggugagcaacggcuccuaccucaacgagacccacuucagcgacgacaucgagcagcaggcggacaacaugaucaccgagcugcugcagaaggaguacauggaccgccaggggaagacgccgcucggccugguggaccuguucgucuucuccaccagcuucuaccucaucuccaucuuccugcaccuggugaagauccccacccaccggcacgugaucggcaagcccugccccaagccgcaccgccugaaccacauggggaucugcagcugcggccucuacaagcaccccgggguccccgugaaguggaagcggugaggacuagucccuguucccagagcccacuuuuuuuucuuuuuuugaaauaaaauagccugucuuucagaucucaaaggcucuuuucagagccaccaaaaaaaaaaaaaaaaaaaaaaaaaaaaaaaaaaaaaaaaaaaaaaaaaaaaaaaaaaaaaaaaagaauu

SEQ ID NO: 15255 - RNA, 1714 nt, Artificial Sequence
  mRNA product Design a-1 (hSL-A64-N5) comprising derived and/or modified sequence from LASV(LASV035-NIG-2009;Clade II)__AIT17588__GPCmut1 (opt1)
aggagagucccgcagucggcguccagcggcucugcuuguucgugugugugucguugcaggccuuauucaagcuuaccaugggccagaucaucaccuucuuccaggaggugccccacgucaucgaggaggugaugaacaucgugcugaucgcccucagccugcuggccauccucaaggggaucuacaacgucgcgaccugcggccuguucgggcugguguccuuccuccugcugugcggccgcagcugcuccacgaccuacaaggggguguacgagcuccagacccuggagcuggacauggccagccucaacaugaccaugccgcuguccugcacgaagaacaacagccaccacuacaucauggucggcaacgagaccggccuggagcucacccugaccaacacguccaucaucaaccacaaguucugcaaccugagcgacgcccacaagaagaaccucuacgaccacgcccugauguccaucaucagcaccuuccaccuguccauccccaacuucaaccaguacgaggccaugagcugcgacuucaacgggggcaagaucuccgugcaguacaaccucagccacgcguacgccguggacgccgccaaccacugcgggaccaucgcgaacggcguccugcagaccuucaugcggauggccuggggcggguccuacaucgcccuggacagcggcugcggguccugggacugcaucaugacgagcuaccaguaccucaucauccagaacaccaccugggaggaccacugccaguucucccgccccagccccaucggcuaccuggggcugcucagccagcggacccgcgacaucuacaucucccggcgccggcgcggcacguucaccuggacccugagcgacuccgagggcaacgagacccccgggggcuacugccugacgcgguggaugcucaucgaggccgagcugaagugcuucgggaacaccgccguggcgaagugcaacgagaagcacgacgaggaguucugcgacaugcugcgccucuucgacuucaacaagcaggccauccggcgccugaaggccccggcccagaugagcauccagcugaucaacaaggccgugaacgcgcucaucaacgaccagcugaucaugaagaaccaccuccgggacaucaugugcauccccuacugcaacuacuccaaguacugguaccugaaccacaccgucaccggcaagacgagccugccccgcugcuggcugguguccaacgggagcuaccucaacgagacccacuucuccgacgacaucgagcagcaggccgacaacaugaucaccgagcugcugcagaaggaguacaucgaccggcagggcaagaccccgcucggccugguggaccuguucgucuucagcacguccuucuaccucaucagcaucuuccugcaccuggugaagauccccacccaccgccacgugaucgggaagcccugccccaagccgcaccggcugaaccacaugggcaucugcuccugcgggcucuacaagcaccccggcguccccgugaaguggaagcgcugaggacuagucccuguucccagagcccacuuuuuuuucuuuuuuugaaauaaaauagccugucuuucagaucucaaaggcucuuuucagagccaccaaaaaaaaaaaaaaaaaaaaaaaaaaaaaaaaaaaaaaaaaaaaaaaaaaaaaaaaaaaaaaaaagaauu

SEQ ID NO: 15256 - RNA, 1714 nt, Artificial Sequence
  mRNA product Design a-1 (hSL-A64-N5) comprising derived and/or modified sequence from LASV(LASV1000-NIG-2009;Clade II)__AIT17782__GPCmut1 (opt1)
aggagagucccgcagucggcguccagcggcucugcuuguucgugugugugucguugcaggccuuauucaagcuuaccaugggccagaucaucaccuucuuccaggaggugccccacgucaucgaggaggugaugaacaucgugcugaucgcccucagccugcuggccauccucaaggggaucuacaacgucgcgaccugcggccuguucgggcugguguccuuccuccugcugugcggccgcagcugcuccacgaccuacaaggggguguacgagcuccagacccuggagcuggacauggccagccucaacaugaccaugccgcuguccugcacgaagaacaacagccaccacuacaucauggucggcaacgagaccggccuggagcucacccugaccaacacguccaucaucaaccacaaguucugcaaccugagcgacgcccacaagaagaaccucuacgaccacgcccugauguccaucaucagcaccuuccaccuguccauccccaacuucaaccaguacgaggccaugagcugcgacuucaacgggggcaagaucuccgugcaguacaaccucagccacaccuacgcgguggacgccgccaaccacugcgggaccaucgccaacggcguccugcagacguucaugcggauggcguggggcggguccuacaucgcccuggacagcggcugcggguccugggacugcaucaugaccagcuaccaguaccucaucauccagaacaccaccugggaggaccacugccaguucucccgccccagccccaucggcuaccuggggcugcucagccagcggacgcgcgacaucuacaucucccggcgccggcgcggcaccuucaccuggacccugagcgacuccgagggcaacgagacgcccgggggcuacugccugacccgguggaugcucaucgaggccgagcugaagugcuucgggaacaccgccguggccaagugcaacgagaagcacgacgaggaguucugcgacaugcugcgccucuucgacuucaacaagcaggcgaucaagcggcugaagaccccggcccagaugagcauccagcugaucaacaaggccgugaacgcccucaucaacgaccagcugaucaugaagaaccaccuccgcgacaucaugugcauccccuacugcaacuacuccaaguacugguaccugaaccacacggucaccggcaagaccagccugccccggugcuggcugguguccaacgggagcuaccucaacgagacccacuucuccgacgacaucgagcagcaggccgacaacaugaucacggagcugcugcagaaggaguacaucgaccgccagggcaagaccccgcucggccugguggaccuguucgucuucagcaccuccuucuaccucaucagcaucuuccugcaccuggugaagauccccacccaccggcacguggucgggaagcccugccccaagccgcaccgccugaaccacaugggcaucugcuccugcgggcucuacaagcaccccggcgugcccgugaaguggaagcggugaggacuagucccuguucccagagcccacuuuuuuuucuuuuuuugaaauaaaauagccugucuuucagaucucaaaggcucuuuucagagccaccaaaaaaaaaaaaaaaaaaaaaaaaaaaaaaaaaaaaaaaaaaaaaaaaaaaaaaaaaaaaaaaaagaauu

SEQ ID NO: 15257 - RNA, 1714 nt, Artificial Sequence
  mRNA product Design a-1 (hSL-A64-N5) comprising derived and/or modified sequence from LASV(LASV221-NIG-2010;Clade II)__AIT17624__GPCmut1 (opt1)
aggagagucccgcagucggcguccagcggcucugcuuguucgugugugugucguugcaggccuuauucaagcuuaccaugggccagaucaucaccuucuuccaggaggugccccacgucaucgaggaggugaugaacaucgugcugaucgcccucagccugcuggccauccucaaggggaucuacaacgucgcgaccugcggccuguucgggcugguguccuuccuccugcugugcggccgcagcugcuccacgaccuacaaggggguguacgagcuccagacccuggagcuggacauggccagccucaacaugaccaugccgcuguccugcacgaagaacaacagccaccacuacaucauggucggcaacgagaccggccuggagcucacccugaccaacacguccaucaucaaccacaaguucugcaaccugagcgacgcccacaagaagaaccucuacgaccacgcccugauguccaucaucagcaccuuccaccuguccauccccaacuucaaccaguacgaggccaugagcugcgacuucaacgggggcaagaucuccgugcaguacaaccucagccacaccuacgcgaucgacgccgccaaccacugcgggaccaucgccaacggcgugcugcagacguucaugcggauggcguggggcggguccuacaucgcccuggacagcggcugcggguccugggacugcaucaugaccagcuaccaguaccucaucauccagaacaccaccugggaggaccacugccaguucucccgccccagccccaucggcuaccuggggcugcucagccagcggacgcgcgacaucuacaucucccggcgccggcgcggcaccuucaccuggacccugagcgacuccgagggcaacgagacgcccgggggcuacugccugacccgguggaugcucaucgaggccgagcugaagugcuucgggaacaccgccgucgccaagugcaacgagaagcacgacgaggaguucugcgacaugcugcgccucuucgacuucaacaagcaggcgauccggcgccugaagaccccggcccagaugagcauccagcugaucaacaaggccgugaacgcccucaucaacgaccagcugaucaugaagaaccaccuccgggacaucaugugcauccccuacugcaacuacuccaaguacugguaccugaaccacacggugaccggcaagaccagccugccccgcugcuggcuggucuccaacgggagcuaccucaacgagacccacuucuccgacgacaucgagcagcaggccgacaacaugaucacggagaugcugcagaaggaguacauggaccggcagggcaagaccccgcugggccucguggaccuguucguguucagcaccuccuucuaccugaucagcaucuuccuccaccuggucaagauccccacccaccgccacgugaucgggaagcccugccccaagccgcaccggcugaaccacaugggcaucugcuccugcgggcuguacaagcaccccggcgugcccgucaaguggaagcgcugaggacuagucccuguucccagagcccacuuuuuuuucuuuuuuugaaauaaaauagccugucuuucagaucucaaaggcucuuuucagagccaccaaaaaaaaaaaaaaaaaaaaaaaaaaaaaaaaaaaaaaaaaaaaaaaaaaaaaaaaaaaaaaaaagaauu

SEQ ID NO: 15258 - RNA, 1714 nt, Artificial Sequence
  mRNA product Design a-1 (hSL-A64-N5) comprising derived and/or modified sequence from LASV(LASV237-NIG-2010;Clade II)__AIT17638__GPCmut1 (opt1)
aggagagucccgcagucggcguccagcggcucugcuuguucgugugugugucguugcaggccuuauucaagcuuaccaugggccagaucaucaccuucuuccaggaggugccccacgucaucgaggaggugaugaacaucgugcugaucgcccucagccugcuggccauccucaaggggaucuacaacgucgcgaccugcggccuguucgggcugguguccuuccuccugcugugcggccgcagcugcuccacgaccuacaaggggguguacgagcuccagacccuggagcuggacauggccagccucaacaugaccaugccgcuguccugcacgaagaacaacagccaccacuacaucauggucggcaacgagaccggccuggagcucacccugaccaacacguccaucaucaaccacaaguucugcaaccugagcgacgcccacaagaaggaccucuacgaccacgcccugauguccaucaucagcaccuuccaccuguccauccccaacuucaaccaguacgaggccaugagcugcgacuucaacgggggcaagaucuccgugcaguacaaccucagccacaccuacgcgguggacgccgccaaccacugcgggaccaucgccaacggcguccugcagacguucaugcggauggcguggggcggguccuacaucgcccuggacagcggcugcggguccugggacugcaucaugaccagcuaccaguaccucaucauccagaacaccaccugggaggaccacugccaguucucccgccccagccccaucggcuaccuggggcugcucagccagcggacgcgcgacaucuacaucucccggcgccggcgcggcaccuucaccuggacccugagcgacuccgagggcaacgagacgcccgggggcuacugccugacccgguggaugcucaucgaggccgagcugaagugcuucgggaacaccgccguggccaagugcaacgagaagcacgacgaggaguucugcgacaugcugcgccucuucgacuucaacaagcaggcgauccggcgccugaagaccccggcccagaugagcauccagcugaucaacaaggccgugaacgcccucaucaacgaccagcugaucaugaagaaccaccuccgggacaucaugugcauccccuacugcaacuacuccaaguacugguaccugaaccacacggucaccggcaagaccagccugccccgcugcuggcugguguccaacgggagcuaccucaacgagacccacuucuccgacgacaucgagcagcaggccgacaacaugaucacggagcugcugcagaaggaguacauggaccggcagggcaagaccccgcucggccugguggaccuguucgucuucagcaccuccuucuaccucaucagcaucuuccugcaccugaucaagauccccacccaccgccacaucacggggaagcccugccccaagccgcaccggcugaaccacaugggcaucugcuccugcgggcucuacaagcaccccggcgugcccgugaaguggaagcgcugaggacuagucccuguucccagagcccacuuuuuuuucuuuuuuugaaauaaaauagccugucuuucagaucucaaaggcucuuuucagagccaccaaaaaaaaaaaaaaaaaaaaaaaaaaaaaaaaaaaaaaaaaaaaaaaaaaaaaaaaaaaaaaaaagaauu

SEQ ID NO: 15259 - RNA, 1714 nt, Artificial Sequence
  mRNA product Design a-1 (hSL-A64-N5) comprising derived and/or modified sequence from LASV(LASV253-NIG-2011;Clade II)__AIT17670__GPCmut1 (opt1)
aggagagucccgcagucggcguccagcggcucugcuuguucgugugugugucguugcaggccuuauucaagcuuaccaugggccagaucaucaccuucuuccaggaggugccccacgucaucgaggaggugaugaacaucgugcugaucgcccucagccugcuggccauccucaaggggaucuacaacgucgcgaccugcggccuguucgggcugguguccuuccuccugcugugcggccgcagcugcuccacgaccuacaaggggguguacgagcuccagacccuggagcuggacauggccagccucaacaugaccaugccgcuguccugcacgaagaacaacagccaccacuacaucauggucggcaacgagaccggccuggagcucacccugaccaacacguccaucaucaaccacaaguucugcaaccugagcgacgcccacaagaagaaccucuacgaccacgcccugauguccaucaucagcaccuuccaccuguccauccccaacuucaaccaguacgaggccaugagcugcgacuucaacgggggcaagaucuccgugcaguacaaccucagccacaccuacgcgguggacgccgccaaccacugcgggaccaucgccaacggcguccugcagacguucaugcggauggcguggggcggguccuacaucgcccuggacagcggcugcggguccugggacugcaucaugaccagcuaccaguaccucaucauccagaacaccaccugggaggaccacugccaguucucccgccccagccccaucggcuaccuggggcugcucagccagcggacgcgcgacaucuacaucucccggcgccggcgcggcaccuucaccuggacccugagcgacuccgagggcaacgagacgcccgggggcuacugccugacccgguggaugcucaucgaggccgagcugaagugcuucgggaacaccgccguggccaagugcaacgagaagcacgacgaggaguucugcgacaugcugcgccucuucgacuucaacaagcaggcgauccggcgccugaaggccccggcccagaugagcauccagcugaucaacaaggccgugaacgcccucaucaacgaccagcugaucaugaagaaccaccuccgggacaucaugugcauccccuacugcaacuacuccaaguacugguaccugaaccacaccgucacgggccgcaccagccugccccggugcuggcugguguccaacgggagcuaccucaacgagacccacuucuccgacgacaucgagcagcaggcggacaacaugaucaccgagcugcugcagaaggaguacaucgaccgccagggcaagacgccgcucggccugguggaccuguucgucuucagcaccuccuucuaccucaucagcaucuuccugcaccuggugaagauccccacccaccggcacaucaucgggaagcccugccccaagccgcaccgccugaaccacaugggcaucugcuccugcgggcucuacaagcaccccggcgugcccgucaaguggaagcggugaggacuagucccuguucccagagcccacuuuuuuuucuuuuuuugaaauaaaauagccugucuuucagaucucaaaggcucuuuucagagccaccaaaaaaaaaaaaaaaaaaaaaaaaaaaaaaaaaaaaaaaaaaaaaaaaaaaaaaaaaaaaaaaaagaauu

SEQ ID NO: 15260 - RNA, 1714 nt, Artificial Sequence
  mRNA product Design a-1 (hSL-A64-N5) comprising derived and/or modified sequence from LASV(LASV254-NIG-2011;Clade II)__AIT17674__GPCmut1 (opt1)
aggagagucccgcagucggcguccagcggcucugcuuguucgugugugugucguugcaggccuuauucaagcuuaccaugggccagaucaucaccuucuuccaggaggugccccacgucaucgaggaggugaugaacaucgugcugaucgcccucagccugcuggccauccucaaggggaucuacaacgucgcgaccugcggccuguucgggcugguguccuuccuccugcugugcggccgcagcugcuccacgaccuacaaggggguguacgagcuccagacccuggagcuggacaugaccaaccucaacaugacgaugccgcugagcugcaccaagaacaacucccaccacuacaucauggucggcaacgagaccggccuggagcucacccugacgaacaccagcaucaucaaccacaaguucugcaaccuguccgacgcccacaagaagaaccucuacaaccacgcccugaugagcaucaucuccaccuuccaccugagcauccccaacuucaaccaguacgaggccauguccugcgacuucaacgggggcaagaucagcgugcaguacaaccucucccacagcuacgccguggacgcggccaaccacugcgggaccaucgccaacggcguccugcagacguucaugcggauggccuggggcggguccuacaucgcgcuggacagcggcugcgggaacugggacugcaucaugaccuccuaccaguaccucaucauccagaacaccaccugggaggaccacugccaguucagccgccccucccccaucggcuaccuggggcugcucagccagcggacgcgcgacaucuacaucagccggcgccggcgcggcaccuucaccuggacccuguccgacagcgagggcaacgagacgcccgggggcuacugccugacccgguggaugcucaucgaggccgagcugaagugcuucgggaacaccgccguggccaagugcaacgagaagcacgacgaggaguucugcgacaugcugcgccucuucgacuucaacaagcaggccauccggcgccugaagaccccggcgcaggccaacauccagcugaucaacaaggccgugaacgcccucaucaacgaccagcugaucaugaagaaccaccuccgggacaucaugugcauccccuacugcaacuacuccaaguacugguaccugaaccacacggucaccggcaagaccagccugccccgcugcuggcugguguccaacgggagcuaccucaacgagacccacuucuccgacgacaucgagcagcaggccgacaacaugaucacggagcugcugcagaaggaguacauggaccggcagggcaagaccccgcucggccugguggaccuguucgucuucagcaccuccuucuaccucaucagcaucuuccugcaccuggugaagauccccacccaccgccacgugaucgggaagcccugccccaagccgcaccggcugaaccacaugggcaucugcuccugcgggcucuacaagcaccccggcguccccgugaaguggaagcgcugaggacuagucccuguucccagagcccacuuuuuuuucuuuuuuugaaauaaaauagccugucuuucagaucucaaaggcucuuuucagagccaccaaaaaaaaaaaaaaaaaaaaaaaaaaaaaaaaaaaaaaaaaaaaaaaaaaaaaaaaaaaaaaaaagaauu

SEQ ID NO: 15261 - RNA, 1714 nt, Artificial Sequence
  mRNA product Design a-1 (hSL-A64-N5) comprising derived and/or modified sequence from LASV(Nig08-A19;Clade III)__ADU56618__GPCmut1 (opt1)
aggagagucccgcagucggcguccagcggcucugcuuguucgugugugugucguugcaggccuuauucaagcuuaccaugggccagaucgugaccuucuuccaggaggucccccacgugaucgaggaggugaugaacaucguccugaucgcccucagcauccuggccauccugaaggggcucuacaacaucgcgaccugcggccugaucgggcuggugacguuccuccugcuguccggccgcagcugcuccaugaccuacaaggggguguacgagcuccagacccuggagcugaacaugaacacccucaacaugacgaugccgcugagcugcaccaagaacaacucccaccacuacaucauggucggcaacgagaccggccuggagcucacccugacgaacaccagccugcuccaccacaaguucugcaaccuguccgacgcccacaagaagaaccuguacgaccacacccucaugagcaucaucuccaccuuccaccugagcauccccaacuucaaccaguacgaggccauguccugcgacuucaacgggggcaagaucacggugcaguacaaccugagccacuccuacgccaucgacgccgcgaaccacugcgggaccguggccaacggcguccuccagaccuucaugcggauggccuggggcgggagcuacaucgcccuggacuccggcugcgggaagugggacugcaucaugaccagcuaccaguaccugaucauccagaacacgaccugggaggaccacugccaguucucccgccccagccccaucggcuaccucgggcugcugucccagcggacccgcgacaucuacaucagccggcgccggcgcggcaccuucacguggacccucagcgacuccgagggcaacgagacccccgggggcuacugccugacccgguggaugcugaucgaggcggagcucaagugcuucgggaacacggccguggccaagugcaacgagaagcacgacgaggaguucugcgacaugcugcgccuguucgacuucaacaagcaggccauccggcgccucaaggccccggcgcagaugagcauccagcugaucaacaaggccgugaacgcccugaucaacgaccagcucaucaugaagaaccaccuccgggacaucaugugcauccccuacugcaacuacuccaaguacugguaccugaaccacaccagcaccggccgcaccucccugccccggugcuggcuggucagcaacggguccuaccugaacgagacgcacuucagcgacgacaucgagcagcaggccgacaacaugaucaccgagaugcuccagaaggaguaccuggaccgccagggcaagaccccgcugggccucguggaccuguucguguucuccaccagcuucuaccugaucuccaucuuccugcaccucgucaagauccccacgcaccggcacaucguggggaagcccugccccaagccgcaccgccugaaccacaugggcaucugcagcugcgggcuguacaagcagcccggcgugcccguccgguggaagcgcugaggacuagucccuguucccagagcccacuuuuuuuucuuuuuuugaaauaaaauagccugucuuucagaucucaaaggcucuuuucagagccaccaaaaaaaaaaaaaaaaaaaaaaaaaaaaaaaaaaaaaaaaaaaaaaaaaaaaaaaaaaaaaaaaagaauu

SEQ ID NO: 15262 - RNA, 1717 nt, Artificial Sequence
  mRNA product Design a-1 (hSL-A64-N5) comprising derived and/or modified sequence from LASV(G1180-SLE-2010;Clade IV)__AIT17168__GPCmut1 (opt1)
aggagagucccgcagucggcguccagcggcucugcuuguucgugugugugucguugcaggccuuauucaagcuuaccaugggccagaucgugaccuucuuccaggaggucccccacgugaucgaggaggugaugaacaucguccugaucgcccucagcauccuggccgugcugaaggggcucuacaacuucgcgaccugcggccugguggggcugcucacguuccugcugcucugcggccgcuccugcaccgccagccgguacaagggggucuacgagcugcagacccuggagcucaacauggagacccugaacaugacgaugccgcuguccugcaccaagaacaacagccaccacuacaucauggugggcaacgagaccggccucgagcugacccugacgaacaccuccaucaucaaccacaaguucugcaaccucagcgacgcccacaagaagaaccuguacgaccacgcccugauguccaucaucagcaccuuccaccucuccauccccaacuucaaccaguacgaggccaugagcugcgacuucaacgggggcaagaucuccgugcaguacaaccugagccacuccuacgcgggggacgccgccaaccacugcggcaccgucgccaacggggugcugcagacguucaugcgcauggcguggggcggcagcuacaucgcccucgacuccgggugcggcagcugggacugcaucaugaccuccuaccaguaccugaucauccagaacaccaccugggaggaccacugccaguucagccggcccucccccaucggguaccugggccuccugagccagcgcacgcgggacaucuacaucagccgccggcgccggggcaccuucaccuggacccuguccgacagcgaggggaaggacacgccgggcggguacugccucacccgcuggaugcugaucgaggccgagcugaagugcuucggcaacaccgccguggccaagugcaacgagaagcacgacgaggaguucugcgacaugcuccggcuguucgacuucaacaagcaggcgauccagcgccugaaggcccccgcccagauguccauccagcucaucaacaaggccgucaacgcccugaucaacgaccagcugaucaugaagaaccaccuccgggacaucaugugcauccccuacugcaacuacagcaaguacugguaccugaaccacaccacgaccgggaagaccucccugcccaagugcuggcucgugagcaacggcuccuaccugaacgagacccacuucagcgacgacaucgagcagcaggcggacaacaugaucacggagaugcugcagaaggaguacauggagcgccagggcaagaccccgcucgggcugguggaccuguucgucuucuccaccagcuucuaccucaucuccaucuuccugcaccuggugaagauccccacccaccggcacaucgugggcaagagcugccccaagccccaccgccugaaccacauggggaucugcuccugcggccucuacaagcagccggggguccccgugaaguggaagcggugaggacuagucccuguucccagagcccacuuuuuuuucuuuuuuugaaauaaaauagccugucuuucagaucucaaaggcucuuuucagagccaccaaaaaaaaaaaaaaaaaaaaaaaaaaaaaaaaaaaaaaaaaaaaaaaaaaaaaaaaaaaaaaaaagaauu

SEQ ID NO: 15263 - RNA, 1717 nt, Artificial Sequence
  mRNA product Design a-1 (hSL-A64-N5) comprising derived and/or modified sequence from LASV(G1442-SLE-2011;Clade IV)__AIT17180__GPCmut1 (opt1)
aggagagucccgcagucggcguccagcggcucugcuuguucgugugugugucguugcaggccuuauucaagcuuaccaugggccagaucgugaccuucuuccaggaggucccccacgugaucgaggaggugaugaacaucguccugaucgcccucagcauccuggccgugcugaaggggcucuacaacguggcgaccugcggccugaucgggcuggucacguuccuccugcugugcggccgcuccugcaccaccacccucuacaaggggguguacgagcugcagacgcuggagcucaacauggagacccugaacaugaccaugccgcugagcugcaccaagaacaacucccaccacuacauccgggugggcaacgagacgggccucgagcugacccugaccaacaccagcaucaucaaccacaaguucugcaaccucuccgacgcccacaagaagaaccuguacgaccacgcccugaugagcaucaucuccacguuccaccucagcauccccaacuucaaccaguacgaggccauguccugcgacuucaacgggggcaagaucagcguccaguacaaccugucccacagcuacgccggggacgcggccaaccacugcggcaccguggccaacggggugcugcagaccuucaugcgcauggccuggggcggcuccuacaucgcgcucgacagcgggugcggcaacugggacugcaucaugaccuccuaccaguaccugaucauccagaacacgaccugggacgaccacugccaguucagccggcccucccccaucggguaccugggccuccugagccagcgcacccgggacgucuacaucucccgccggcgccggggcaccuucacguggacccugagcgacagcgaggggaaggacaccccgggcggguacugccucacccgcuggaugcugaucgaggccgagcugaagugcuucggcaacacggccguggccaagugcaacgagaagcacgacgaggaguucugcgacaugcuccggcuguucgacuucaacaagcaggccauccagcgccugaaggcgcccgcccagauguccauccagcucaucaacaaggccgugaacgcccugaucaacgaccagcugaucaugaagaaccaccuccgggacaucaugugcauccccuacugcaacuacagcaaguacugguaccugaacaacaccgccaccgggaagaccucccugcccaagugcuggcucaucagcaacggcuccuaccugaacgagacgcacuucagcgacgacaucgagcaggaggcggacaacaugaucaccgagaugcugcagaaggaguacauggagcgccagggcaagaccccgcucgggcuggucgaccuguucguguucuccaccagcuucuaccucaucuccaucuuccugcaccuggugaagauccccacgcaccggcacaucgucggcaagagcugccccaagccccaccgccugaaccacauggggaucugcuccugcggccucuacaagcagccgggggugcccgugcgguggaagcgcugaggacuagucccuguucccagagcccacuuuuuuuucuuuuuuugaaauaaaauagccugucuuucagaucucaaaggcucuuuucagagccaccaaaaaaaaaaaaaaaaaaaaaaaaaaaaaaaaaaaaaaaaaaaaaaaaaaaaaaaaaaaaaaaaagaauu

SEQ ID NO: 15264 - RNA, 1717 nt, Artificial Sequence
  mRNA product Design a-1 (hSL-A64-N5) comprising derived and/or modified sequence from LASV(G3010-SLE-2013;Clade IV)__AIT17344__GPCmut1 (opt1)
aggagagucccgcagucggcguccagcggcucugcuuguucgugugugugucguugcaggccuuauucaagcuuaccaugggccagaucgugaccuucuuccaggaggucccccacgugaucgaggaggugaugaacaucguccugaucgcccucagcauccuggccgugcugaaggggcucuacaacuucgcgaccugcggccugguggggcuggucacguuccuccugcugugcggccgcuccugcaccaccagccucuacaaggggguguacgagcugcagacccuggagcucaacauggagacgcugaacaugaccaugccgcuguccugcaccaagaacaacagccaccacuacaucauggugggcaacgagaccggccucgagcugacgcugaccaacaccuccaucaucaaccacaaguucugcaaccucagcgacgcccacaagaagaaccuguacaaccacgcccugauguccaucaucagcaccuuccaccucuccauccccaacuucaaccaguacgaggccaugagcugcgacuucaacgggggcaagaucuccguccaguacaaccugagccacuccuacgccggggacgcggccagccacugcggcacgguggccaacggggugcugcagaccuucaugcggauggccuggggcggcuccuacaucgcgcucgacagcgggugcggcaagugggacugcaucaugaccuccuaccaguaccugaucauccagaacaccacgugggaggaccacugccaguucagccgccccucccccaucggguaccugggccuccugagccagcggacccgcgacaucuacaucagccggcgccggcgcggcaccuucaccuggacgcuguccgacagcgaggggaaggacaccccgggcggguacugccucacccgguggaugcugaucgaggccgagcugaagugcuucggcaacaccgccgucgccaagugcaacgagaagcacgacgaggaguucugcgacaugcuccgccuguucgacuucaacaagcaggccauccagcggcugaagacgcccgcgcagauguccauccagcucaucaacaaggccgugaacgcccugaucaacgaccagcugaucaugaagaaccaccuccgcgacaucaugugcauccccuacugcaacuacagcaaguacugguaccugaaccacaccaccaccgggaagacgucccugcccaagugcuggcucgugagcaacggcuccuaccugaacgagacccacuucagcgacgacaucgagcagcaggccgacaacaugaucaccgagaugcugcagaaggaguacauggagcggcagggcaagaccccgcucgggcuggucgaccuguucguguucuccacgagcuucuaccucaucuccaucuuccugcaccuggugaagauccccacccaccgccacaucgucggcaagagcugccccaagccccaccggcugaaccacauggggaucugcuccugcggccucuacaagcagccgggggugcccgugcgcuggaagcggugaggacuagucccuguucccagagcccacuuuuuuuucuuuuuuugaaauaaaauagccugucuuucagaucucaaaggcucuuuucagagccaccaaaaaaaaaaaaaaaaaaaaaaaaaaaaaaaaaaaaaaaaaaaaaaaaaaaaaaaaaaaaaaaaagaauu

SEQ ID NO: 15265 - RNA, 1717 nt, Artificial Sequence
  mRNA product Design a-1 (hSL-A64-N5) comprising derived and/or modified sequence from LASV(G502-SLE-2009;Clade IV)__AIT17126__GPCmut1 (opt1)
aggagagucccgcagucggcguccagcggcucugcuuguucgugugugugucguugcaggccuuauucaagcuuaccaugggccagaucgugaccuucuuccaggaggucccccacgugaucgaggaggugaugaacaucguccugaucgcccucagcauccuggccgugcugaaggggcucuacaacuucgcgaccugcggccugguggggcugcucacguuccugcugcucugcggccgcuccugcaccaccgggcuguacaagggcgucuacgagcugcagacccucgagcugaacauggagacgcugaacaugaccaugccgcucagcugcaccaagaacaacucccaccacuacaucauggugggcaacgagaccgggcuggagcugacgcucaccaacaccagcaucaucaaccacaaguucugcaaccuguccgacgcccacaagaagaaccuguacgaccacgcccucaugagcaucaucuccaccuuccaccugagcauccccaacuucaaccaguacgaggccauguccugcgacuucaacggcgggaagaucagcgugcaguacaaccugucccacagcuacgccggcgacgcggccgaccacugcgggacggucgccaacggcgugcuccagaccuucaugcggauggccuggggcggguccuacaucgcgcuggacagcggcugcgggcgcugggacugcaucaugaccuccuaccaguaccugaucauccagaacaccacgugggaggaccacugccaguucagccggcccucccccaucggcuaccucggccugcugagccagcgcacccgggacaucuacaucucccgccggcgccgggggaccuucaccuggacgcucagcgacagcgagggcaaggacacccccgggggcuacugccugacccgcuggaugcugaucgaggccgagcucaagugcuucgggaacaccgccguggccaagugcaacgagaagcacgacgaggaguucugcgacaugcugcggcuguucgacuucaacaagcaggccauccagcgccucaaggcgccggcccagauguccauccagcugaucaacaaggccgucaacgcccugaucaacgaccagcucgugaugaagaaccaccuccgggacaucaugugcauccccuacugcaacuacagccgcuacugguaccugaaccacacgaccaccggccggaccucccugcccaagugcuggcuggugagcaacggcuccuaccugaacgagacgcacuucagcgacgacaucgagcagcaggccgacaacaugaucaccgagaugcuccagaaggaguacauggagcgccaggggaagaccccgcugggccuggucgaccucuucguguucuccaccagcuucuaccugaucuccaucuuccugcaccuggugaagauccccacgcaccggcacaucgucggcaagagcugccccaagccccaccgccucaaccacauggggaucugcuccugcgggcuguacaagcagccgggcgugcccgugaaguggaagcggugaggacuagucccuguucccagagcccacuuuuuuuucuuuuuuugaaauaaaauagccugucuuucagaucucaaaggcucuuuucagagccaccaaaaaaaaaaaaaaaaaaaaaaaaaaaaaaaaaaaaaaaaaaaaaaaaaaaaaaaaaaaaaaaaagaauu

SEQ ID NO: 15266 - RNA, 1717 nt, Artificial Sequence
  mRNA product Design a-1 (hSL-A64-N5) comprising derived and/or modified sequence from LASV(G733-SLE-2010;Clade IV)__AIT17154__GPCmut1 (opt1)
aggagagucccgcagucggcguccagcggcucugcuuguucgugugugugucguugcaggccuuauucaagcuuaccaugggccagaucgugaccuucuuccaggaggucccccacgugaucgaggaggugaugaacaucguccugaucgcccucagcauccuggccgugcugaaggggcucuacaacuucgcgaccugcggcaucguggggcuggucuccuuccugcuccugugcggccgcagcugcacgaccucccuguacaaggggguguacgagcuccagacccuggagcugaacauggagacccucaacaugacgaugccgcugagcugcaccaagaacaacucccaccacuacaucauggugggcaacgagaccggccuggagcucacccugacgaacaccagcaucaucaaccacaaguucugcaaccuguccgacgcccacaagaagaaccucuacgaccacgcccugaugagcaucaucuccaccuuccaccugagcauccccaacuucaaccaguacgaggccauguccugcgacuucaacgggggcaagaucagcguccaguacaaccucucccacagcuacgccggggacgcggccaaccacugcggcaccaucgccaacggggugcugcagacguucaugcggauggccuggggcggcuccuacaucgcgcuggacagcgggugcgaccgcugggacugcaucaugaccuccuaccaguaccucaucauccagaacaccaccugggaggaccacugccaguucagccggcccucccccaucggcuaccuggggcugcucagccagcgcacgcgggacaucuacaucagccgccggcgccggggcaccuucaccuggacccuguccgacagcgagggcaaggacacgcccgggggcuacugccugacccgcuggaugcucaucgaggccgagcugaagugcuucgggaacaccgccguggccaagugcaacgagaagcacgacgaggaguucugcgacaugcugcggcuguucgacuucaacaagcaggccauccagcgccugaaggcgccggcccagauguccauccagcugaucaacaaggccgucaacgcccucaucaacgaccagcugaucaugaagaaccaccuccgggacaucaugugcauccccuacugcaacuacagcaaguacugguaccucaaccacaccacgaccggcaagaccucccugcccaagugcuggcuggugagcaacggguccuaccucaacgagacccacuucagcgacgacaucgagcagcaggccgacaacaugaucacggagaugcugcagaaggaguacauggagcgccagggcaagaccccgcugggccucguggaccuguucgucuucuccaccagcuucuaccugaucuccaucuuccuccaccuggugaagauccccacccaccggcacguggucggcaagagcugccccaagccccaccgccugaaccacauggggaucugcuccugcgggcuguacggccagccgggggugcccgugaaguggaagcggugaggacuagucccuguucccagagcccacuuuuuuuucuuuuuuugaaauaaaauagccugucuuucagaucucaaaggcucuuuucagagccaccaaaaaaaaaaaaaaaaaaaaaaaaaaaaaaaaaaaaaaaaaaaaaaaaaaaaaaaaaaaaaaaaagaauu

SEQ ID NO: 15267 - RNA, 1717 nt, Artificial Sequence
  mRNA product Design a-1 (hSL-A64-N5) comprising derived and/or modified sequence from MOPV/LASV reassortant(IGS-1;Clade IV)__AFY05576__GPCmut1 (opt1)
aggagagucccgcagucggcguccagcggcucugcuuguucgugugugugucguugcaggccuuauucaagcuuaccaugggccagaucgugaccuucuuccaggaggucccccacgugaucgaggaggugaugaacaucguccugaucgcccucagcgugcuggccgugcugaaggggcucuacaacuucgcgaccugcggccuggucgggcuggugacguuccuccugcugugcggccgcuccugcaccaccagccucuacaaggggguguacgagcugcagacccuggagcucaacauggagacgcugaacaugaccaugccgcuguccugcaccaagaacaacagccaccacuacaucauggucggcaacgagaccggccucgagcugacgcugaccaacaccuccaucaucaaccacaaguucugcaaccucagcgacgcccacaagaagaaccuguacgaccacgcccugauguccaucaucagcaccuuccaccucuccauccccaacuucaaccaguacgaggccaugagcugcgacuucaacgggggcaagaucuccgugcaguacaaccugagccacuccuacgccggggacgcggccaaccacugcggcacgguggccaacgggguccugcagaccuucaugcggauggccuggggcggcagcuacaucgcgcucgacuccgggugcggcaacugggacugcaucaugaccagcuaccaguaccugaucauccagaacaccacgugggaggaccacugccaguucucccgccccagccccaucggguaccugggccuccugucccagcggacccgcgacaucuacaucagccggcgccggcgcggcaccuucaccuggacgcugagcgacuccgagggggaggacaccccgggcggguacugccucacccgguggaugcugaucgaggccgagcugaagugcuucggcaacaccgccguggccaagugcaacgagaagcacgacgaggaguucugcgacaugcuccgccuguucgacuucaacaagcaggccauccagcggcugaaggcgcccgcccagaugagcauccagcucaucaacaaggccgugaacgcccugaucaacgaccagcugaucaugaagaaccaccuccgcgacaucaugugcauccccuacugcaacuacuccaaguacugguaccugaaccacacgaccaccgggcggaccagccugcccaagugcuggcucgucuccaacggcagcuaccugaacgagacgcacuucuccgacgacaucgagcagcaggccgacaacaugaucaccgagaugcugcagaaggaguacauggagcgccagggcaagaccccgcucgggcugguggaccuguucguguucagcaccuccuucuaccucaucagcaucuuccugcaccuggucaagauccccacgcaccggcacaucgugggcaaguccugccccaagccccaccgccugaaccacauggggaucugcagcugcggccucuacaagcagccgggggugcccgucaaguggaagcggugaggacuagucccuguucccagagcccacuuuuuuuucuuuuuuugaaauaaaauagccugucuuucagaucucaaaggcucuuuucagagccaccaaaaaaaaaaaaaaaaaaaaaaaaaaaaaaaaaaaaaaaaaaaaaaaaaaaaaaaaaaaaaaaaagaauu

SEQ ID NO: 15268 - RNA, 1717 nt, Artificial Sequence
  mRNA product Design a-1 (hSL-A64-N5) comprising derived and/or modified sequence from LASV(LM765-SLE-2012;Clade IV)__AIT17814__GPCmut1 (opt1)
aggagagucccgcagucggcguccagcggcucugcuuguucgugugugugucguugcaggccuuauucaagcuuaccaugggccagaucgugaccuucuuccaggaggucccccacgugaucgaggaggugaugaacaucguccugaucgcccucagcauccuggccgugcugaaggggcucuacaacuucgcgaccugcggccugguggggcuggucacguuccuccugcugugcggccgcuccugcaccaccagccucuacaaggggguguacgagcugcagacccuggagcucaacauggagacgcugaacaugaccaugccgcuguccugcaccaagaacaacagccaccacuacaucauggugggcaacgagaccggccucgagcugacgcugaccaacaccuccaucaucgaccacaaguucugcaaccucagcgacgcccaccggaagaaccuguacgaccacgcccugauguccaucaucagcaccuuccaccucuccauccccaacuucaaccaguacgaggccaugagcugcgacuucaacgggggcaagaucuccguccaguacaaccugagccacuccuacgccaaggacgcggccgaccacugcgggacgguggccaacggcgugcugcagaccuucaugcgcauggccuggggcgggagcuacaucgcgcucgacuccggcugcgggcggugggacugcaucaugaccagcuaccaguaccugaucauccagaacaccacgugggaggaccacugccaguucucccgccccagccccaucggcuaccuggggcuccugucccagcggacccgcgacaucuacaucagccggcgccggcgcggcaccuucaccuggacgcugagcgacuccgagggcaaggacacccccgggggcuacugccucacccgguggaugcugaucgaggccgagcugaagugcuucgggaacaccgccgucgccaagugcaacgagaagcacgacgaggaguucugcgacaugcuccgccuguucgacuucaacaagcaggccauccagcggcugaaggcgccggcccagaugagcauccagcucaucaacaaggccgugaacgcccugaucaacgaccagcugaucaugaagaaccaccuccgcgacaucaugugcauccccuacugcaacuacuccaaguacugguaccugaaccacacgaccaccggcaagaccagccugcccaagugcuggcucguguccaacgggagcuaccugaacgagacgcacuucuccgacgacaucgagcagcaggccgacaacaugaucaccgagaugcugcagaaggaguacauggagcggcagggcaagaccccgcucggccuggucgaccuguucguguucagcaccuccuucuaccucaucagcaucuuccugcaccuggugaagauccccacgcaccgccacaucgucgggaagcccugccccaagccgcaccggcugaaccacaugggcaucugcuccugcgggcucuacaagcagcccggcgugcccgugaaguggaagcgcugaggacuagucccuguucccagagcccacuuuuuuuucuuuuuuugaaauaaaauagccugucuuucagaucucaaaggcucuuuucagagccaccaaaaaaaaaaaaaaaaaaaaaaaaaaaaaaaaaaaaaaaaaaaaaaaaaaaaaaaaaaaaaaaaagaauu

SEQ ID NO: 15269 - RNA, 1717 nt, Artificial Sequence
  mRNA product Design a-1 (hSL-A64-N5) comprising derived and/or modified sequence from LASV(LM776-SLE-2012;Clade IV)__AIT17824__GPCmut1 (opt1)
aggagagucccgcagucggcguccagcggcucugcuuguucgugugugugucguugcaggccuuauucaagcuuaccaugggccagaucgugaccuucuuccaggaggucccccacgugaucgaggaggugaugaacaucguccugaucgcccucagcauccuggccgugcugaaggggcucuacaacuucgcgaccugcggccugguggggcuggucacguuccuccugcugugcggccgcuccugcaccaccagcguguacaaggggguguacgagcuccagacccuggagcugaacauggagacgcucaacaugaccaugccgcuguccugcaccaagaacaacagccaccacuacaucauggucggcaacgagaccggccuggagcucacgcugaccaacaccuccaucaucaaccacaaguucugcaaccugagcgacgcccacaagaagaaccucuacgaccacgcccugauguccaucaucagcaccuuccaccuguccauccccaacuucaaccaguacgaggccaugagcugcgacuucaacgggggcaagaucuccgugcaguacaaccucagccacuccuacgccggggacgcggccaaccacugcggcacgguggccaacgggguccugcagaccuucaugcggauggccuggggcggcagcuacaucgcgcuggacuccgggugcggcaagugggacugcaucaugaccagcuaccaguaccucaucauccagaacaccacgugggaggaccacugccaguucucccgccccagccccaucggguaccugggccugcucucccagcggacccgcgacaucuacaucagccggcgccggcgcggcaccuucaccuggacgcugagcgacuccgaggggaaggacaccccgggcggguacugccugacccgguggaugcucaucgaggccgagcugaagugcuucggcaacaccgccguggccaagugcaacgagaagcacgacgaggaguucugcgacaugcugcgccucuucgacuucaacaagcaggccauccagcggcugaaggcgcccgcccagaugagcauccagcugaucaacaaggccgugaacgcccucaucaacgaccagcugaucaugaagaaccaccuccgcgacaucaugugcauccccuacugcaacuacuccaaguacugguaccugaaccacacgaccaccgggaagaccagccugcccaagugcuggcuggucuccaacggcagcuaccucaacgagacgcacuucuccgacgacaucgagcagcaggccgacaacaugaucaccgagaugcugcagaaggaguacauggagcggcagggcaagaccccgcuggggcucguggaccuguucguguucagcaccuccuucuaccugaucagcaucuuccuccaccuggucaagauccccacgcaccgccacaucgugggcaaguccugccccaagccccaccggcugaaccacauggggaucugcagcugcggccuguacaagcagccgggggugcccguccgcuggaagcggugaggacuagucccuguucccagagcccacuuuuuuuucuuuuuuugaaauaaaauagccugucuuucagaucucaaaggcucuuuucagagccaccaaaaaaaaaaaaaaaaaaaaaaaaaaaaaaaaaaaaaaaaaaaaaaaaaaaaaaaaaaaaaaaaagaauu

SEQ ID NO: 15270 - RNA, 1717 nt, Artificial Sequence
  mRNA product Design a-1 (hSL-A64-N5) comprising derived and/or modified sequence from LASV(Mad39;Clade IV)__ANH09722__GPCmut1 (opt1)
aggagagucccgcagucggcguccagcggcucugcuuguucgugugugugucguugcaggccuuauucaagcuuaccaugggccagaucgugaccuucuuccaggaggucccccacgugaucgaggaggugaugaacaucguccugaucgcccucagcauccuggccgugcugaaggggcucuacaacguggcgaccugcggccugaucgggcuggucacguuccuccugcugugcggccgcuccugcaccaccacccucuacaaggggguguacgagcugcaggcccuggagcucaacauggagacgcugaacaugaccaugccgcugagcugcaccaagaacaacucccaccacuacauccgggugggcaacgagaccggccucgagcugacgcugaccaacaccagccucaucaaccacaaguucugcaaccuguccgacgcccacaagaagaaccuguacgaccacgcccucaugagcaucaucuccaccuuccaccugagcauccccaacuucaaccaguacgaggccauguccugcgacuucaacgacgggaagaucagcguccaguacaaccugucccacacguacgcgggcgacaccgccaaccacugcgggaccguggccaacggcgugcuccagaccuucaugcgcauggccuggggcgggagcuacaucgcgcuggacuccggcugcgggggcugggacugcaucaugacgagcuaccaguaccugaucauccagaacaccaccugggaggaccacugccaguucucccggcccagccccaucggguaccucggccugcugucccagcgcacccgggacaucuacaucagccgccggcgccggggcacguucaccuggacccucuccgacagcgaggggaaggacaccccgggcggguacugccugacgcgcuggaugcugaucgaggccgagcucaagugcuucggcaacaccgccgucgccaagugcaacgagaagcacgacgaggaguucugcgacaugcugcggcuguucgacuucaacaagcaggccauccagcgccucaaggcgcccgcccagaugagcauccagcugaucaacaaggccgugaacgcccugaucaacgaccagcucaucaugaagaaccaccuccgggacaucaugugcauccccuacugcaacuacuccaaguacugguaccugaaccacaccgugaccgggaagacgagccugcccaagugcuggcuggucuccaacggcagcuaccugaacgagacccacuucuccgacgacaucgagcagcaggccgacaacaugaucaccgagaugcuccagaaggaguacauggagcgccagggcaagaccccgcuggggcugguggaccucuucguguucagcacguccuucuaccugaucagcaucuuccugcaccuggucaagauccccacccaccggcacguggugggcaagcccugccccaagccgcaccgccucaaccacauggggaucugcuccugcggcuucuacaagcagcccgggguccccgugcgguggaagcgcugaggacuagucccuguucccagagcccacuuuuuuuucuuuuuuugaaauaaaauagccugucuuucagaucucaaaggcucuuuucagagccaccaaaaaaaaaaaaaaaaaaaaaaaaaaaaaaaaaaaaaaaaaaaaaaaaaaaaaaaaaaaaaaaaagaauu

SEQ ID NO: 15271 - RNA, 1717 nt, Artificial Sequence
  mRNA product Design a-1 (hSL-A64-N5) comprising derived and/or modified sequence from LASV(Z0947-SLE-2011;Clade IV)__AIT17840__GPCmut1 (opt1)
aggagagucccgcagucggcguccagcggcucugcuuguucgugugugugucguugcaggccuuauucaagcuuaccaugggccagaucgugaccuucuuccaggaggucccccacgugaucgaggaggugaugaacaucguccugaucgcccucagcauccuggccgugcugaaggggcucuacaacuucgcgaccugcggccugguggggcuggucacguuccuccugcugugcggccgcuccugcaccaucagccucuacaaggggguguacgagcugcagacccuggagcucaacauggagacccugaacaugacgaugccgcuguccugcaccaagaacaacagccaccacuacaucauggugggcaacgagaccggccucgagcugacccugacgaacaccuccaucaucaaccacaaguucugcaaccucagcgacgcccacaagaagaaccuguacgaccacgcccugauguccaucaucagcaccuuccaccucuccauccccaacuucaaccaguacgaggccaugagcugcgacuucaacgggggcaagaucuccguccaguacaaccugagccacuccuacgccggggacgcggccaaccacugcggcaccguggccaacggggugcugcagacguucaugcggauggccuggggcggcagcuacaucgcgcucgacuccgggugcgaccgcugggacugcaucaugaccagcuaccaguaccugaucauccagaacaccaccugggaggaccacugccaguucucccggcccagccccaucggcuaccuggggcuccugucccagcgcacgcgggacaucuacaucagccgccggcgccggggcaccuucaccuggacccugagcgacuccgagggcaaggacacgcccgggggcuacugccucacccgcuggaugcugaucgaggccgagcugaagugcuucgggaacaccgccgucgccaagugcaacgagaagcacgacgaggaguucugcgacaugcuccggcuguucgacuucaacaagcaggccauccagcgccugaaggcgccggcccagaugagcauccagcucaucaacaaggccgugaacgcccugaucaacgaccagcugaucaugaagaaccaccuccgggacaucaugugcauccccuacugcaacuacuccaaguacugguaccugaaccacaccacgaccggcaagaccagccugcccaagugcuggcucguguccaacgggagcuaccugaacgagacccacuucuccgacgacaucgagcagcaggccgacaacaugaucacggagaugcugcagaaggaguacauggagcgccagggcaagaccccgcucggccuggucgaccuguucguguucagcaccuccuucuaccucaucagcaucuuccugcaccuggugaagauccccacccaccggcacaucgucgggaagcccugccccaagccgcaccgccugaaccacaugggcaucugcuccugcgggcucuacaagcagcccggcgugcccgugaaguggaagcggugaggacuagucccuguucccagagcccacuuuuuuuucuuuuuuugaaauaaaauagccugucuuucagaucucaaaggcucuuuucagagccaccaaaaaaaaaaaaaaaaaaaaaaaaaaaaaaaaaaaaaaaaaaaaaaaaaaaaaaaaaaaaaaaaagaauu

SEQ ID NO: 15272 - RNA, 1717 nt, Artificial Sequence
  mRNA product Design a-1 (hSL-A64-N5) comprising derived and/or modified sequence from LASV(Josiah;Clade IV)__NP_694870__GPCmut1 (opt4)
aggagagucccgcagucggcguccagcggcucugcuuguucgugugugugucguugcaggccuuauucaagcuuaccaugggccagaucgugaccuucuuccaggaggugccccacgugaucgaggaggugaugaacaucgugcugaucgcccugagcgugcuggccgugcugaagggccuguacaacuucgccaccugcggccuggugggccuggugaccuuccugcugcugugcggcagaagcugcaccaccagccuguacaagggcguguacgagcugcagacccuggagcugaacauggagacccugaacaugaccaugccccugagcugcaccaagaacaacagccaccacuacaucauggugggcaacgagaccggccuggagcugacccugaccaacaccagcaucaucaaccacaaguucugcaaccugagcgacgcccacaagaagaaccuguacgaccacgcccugaugagcaucaucagcaccuuccaccugagcauccccaacuucaaccaguacgaggccaugagcugcgacuucaacggcggcaagaucagcgugcaguacaaccugagccacagcuacgccggcgacgccgccaaccacugcggcaccguggccaacggcgugcugcagaccuucaugagaauggccuggggcggcagcuacaucgcccuggacagcggcugcggcaacugggacugcaucaugaccagcuaccaguaccugaucauccagaacaccaccugggaggaccacugccaguucagcagacccagccccaucggcuaccugggccugcugagccagagaaccagagacaucuacaucagcagaagacgccggggcaccuucaccuggacccugagcgacagcgagggcaaggacacccccggcggcuacugccugaccagauggaugcugaucgaggccgagcugaagugcuucggcaacaccgccguggccaagugcaacgagaagcacgacgaggaguucugcgacaugcugagacuguucgacuucaacaagcaggccauccagagacugaaggcccccgcccagaugagcauccagcugaucaacaaggccgugaacgcccugaucaacgaccagcugaucaugaagaaccaccugagagacaucaugugcauccccuacugcaacuacagcaaguacugguaccugaaccacaccaccaccggcagaaccagccugcccaagugcuggcuggugagcaacggcagcuaccugaacgagacccacuucagcgacgacaucgagcagcaggccgacaacaugaucaccgagaugcugcagaaggaguacauggagagacagggcaagaccccccugggccugguggaccuguucguguucagcaccagcuucuaccugaucagcaucuuccugcaccuggugaagauccccacccacagacacaucgugggcaagagcugccccaagccccacagacugaaccacaugggcaucugcagcugcggccuguacaagcagcccggcgugcccgugaaguggaagagaugaggacuagucccuguucccagagcccacuuuuuuuucuuuuuuugaaauaaaauagccugucuuucagaucucaaaggcucuuuucagagccaccaaaaaaaaaaaaaaaaaaaaaaaaaaaaaaaaaaaaaaaaaaaaaaaaaaaaaaaaaaaaaaaaagaauu

SEQ ID NO: 15273 - RNA, 1714 nt, Artificial Sequence
  mRNA product Design a-1 (hSL-A64-N5) comprising derived and/or modified sequence from LASV(LP;Clade I)__AAF86701__GPCmut1 (opt4)
aggagagucccgcagucggcguccagcggcucugcuuguucgugugugugucguugcaggccuuauucaagcuuaccaugggccagaucaucaccuucuuccaggaggugccccacgugaucgaggaggugaugaacaucgugcugaucgcccugagccugcuggccauccugaagggccuguacaacaucgccaccugcggcaucaucggccugguggccuuccuguuccugugcggcaagagcugcagccugacccugaagggcggcuacgagcugcagacccuggagcugaacauggagacccugaacaugaccaugccccugagcugcaccaagaacagcagccaccacuacaucagagugggcaacgagaccggccuggagcugacccugaccaacaccagcaucaucaaccacaaguucugcaaccugagcgacgcccacaagaagaaccuguacgaccacgcccugaugagcaucaucagcaccuuccaccugagcauccccaacuucaaccaguacgaggccaugagcugcgacuucaacggcggcaagaucagcgugcaguacaaccugagccacagcuacgccggcgacgccgccgagcacugcggcaccguggccaacggcgugcugcagaccuucaugagaauggccuggggcggcagauacaucgcccuggacagcggcugcggcaacugggacugcaucaugaccagcuaccaguaccugaucauccagaacaccaccugggaggaccacugccaguucagcagacccagccccaucggcuaccugggccugcugagccagagaaccagagacaucuacaucagcagaagacgccggggcaccuucaccuggacccugagcgacagcgagggcaacgagacccccggcggcuacugccugaccagauggaugcugaucgaggccgagcugaagugcuucggcaacaccgccguggccaagugcaacgagaagcacgacgaggaguucugcgacaugcugagacuguucgacuucaacaagcaggccaucagaagacugaaggcccccgcccagaugagcauccagcugaucaacaaggccgugaacgcccugaucaacgaccagcugaucaugaagaaccaccugagagacaucaugugcauccccuacugcaacuacagcaaguacugguaccugaaccacaccagcagcggcagaaccagccugcccaagugcuggcugaucagcaacggcagcuaccugaacgagacccaguucagcgacgacaucgagcagcaggccgacaacaugaucaccgagaugcugcagaaggaguacaucgagagacagggcaagaccccccugggccugguggacaucuucaucuucagcaccagcuucuaccugaucagcaucuuccugcaccugaucaagauccccacccacagacacaucgugggcaagcccugccccaagccccacagacugaaccacaugggcgugugcagcugcggccuguacaagcaccccggcgugcccaccaaguggaagagaugaggacuagucccuguucccagagcccacuuuuuuuucuuuuuuugaaauaaaauagccugucuuucagaucucaaaggcucuuuucagagccaccaaaaaaaaaaaaaaaaaaaaaaaaaaaaaaaaaaaaaaaaaaaaaaaaaaaaaaaaaaaaaaaaagaauu

SEQ ID NO: 15274 - RNA, 1714 nt, Artificial Sequence
  mRNA product Design a-1 (hSL-A64-N5) comprising derived and/or modified sequence from LASV(803213;Clade II)__AAF86703__GPCmut1 (opt4)
aggagagucccgcagucggcguccagcggcucugcuuguucgugugugugucguugcaggccuuauucaagcuuaccaugggccagaucaucaccuucuuccaggaggugccccacgugaucgaggaggugaugaacaucgugcugaucgcccugagccugcuggccauccugaagggcaucuacaacguggccaccugcggccuguucggccugaucagcuuccugcugcugugcggcagaagcugcagcgugaccuacaagggcguguacgagcugcagacccuggagcugaacauggccaaccugaacaugaccaugccccugagcugcaccaagaacaacagccaccacuacaucauggugggcaacgagaccggccuggagcugacccugaccaacaccagcaucaucaaccacaaguucugcaaccugagcgacgcccacaagaagaaccuguacgaccacgcccugaugagcaucaucagcaccuuccaccugagcauccccaacuucaaccaguacgaggccaugagcugcgacuucaacggcggcaagaucagcgugcaguacaaccugagccacagcuucgccguggacgccgccaaccacugcggcaccaucgccaacggcgugcugcagaccuucaugagaauggccuggggcggcagcuacaucgcccuggacagcggcugcggcaacugggacugcaucaugaccagcuaccaguaccugaucauccagaacaccaccugggaggaccacugccaguucagcagacccagccccaucggcuaccugggccugcugagccagagaaccagagacaucuacaucagcagaagacgccggggcaccuucaccuggacccugagcgacagcgagggcaacgaggcccccggcggcuacugccugaccagauggaugcugaucgaggccgagcugaagugcuucggcaacaccgccguggccaagugcaacgagaagcacgacgaggaguucugcgacaugcugagacuguucgacuucaacaagcaggccaucaagagacugaagacccccgcccagaugagcauccagcugaucaacaaggccgugaacgcccugaucaacgaccagcugaucaugaagaaccaccugagagacaucaugugcauccccuacugcaacuacagcagauacugguaccugaaccacaccgugaccggcaagaccagccugcccagaugcuggcuggugagcaacggcagcuaccugaacgagacccacuucagcgacgacaucgagcagcaggccgacaacaugaucaccgagaugcugcagaaggaguacauggacagacagggcaagaccccccugggccugguggaccuguucguguucagcaccagcuucuaccugaucagcaucuuccugcaccuggugaagauccccacccacagacacaucgugggcaagcccugccccaagccccacagacugaaccacaugggcaucugcagcugcggccuguacaagcaccccggcgugcccgugaaguggaagagaugaggacuagucccuguucccagagcccacuuuuuuuucuuuuuuugaaauaaaauagccugucuuucagaucucaaaggcucuuuucagagccaccaaaaaaaaaaaaaaaaaaaaaaaaaaaaaaaaaaaaaaaaaaaaaaaaaaaaaaaaaaaaaaaaagaauu

SEQ ID NO: 15275 - RNA, 1714 nt, Artificial Sequence
  mRNA product Design a-1 (hSL-A64-N5) comprising derived and/or modified sequence from LASV(GA391;Clade III)__CAA36645__GPCmut1 (opt4)
aggagagucccgcagucggcguccagcggcucugcuuguucgugugugugucguugcaggccuuauucaagcuuaccaugggccagaucgugaccuucuuccaggaggugccccacgugaucgaggaggugaugaacaucgugcugaucgcccugagcauccuggccauccugaagggccuguacaacguggccaccugcggccugaucggccuggugaccuuccugcugcugagcggcagaagcugcagccugaucuacaagggcaccuacgagcugcagacccuggagcugaacauggagacccugaacaugaccaugccccugagcugcaccaagaacaacagccaccacuacaucagagugggcaacgagaccggccuggagcugacccugaccaacaccagcauccugaaccacaaguucugcaaccugagcgacgcccacaagagaaaccuguacgaccacagccugaugagcaucaucagcaccuuccaccugagcauccccaacuucaaccaguacgaggccaugagcugcgacuucaacggcggcaagaucaccgugcaguacaaccugagccacagcuucgccguggacgccgccggccacugcggcacccuggccaacggcgugcugcagaccuucaugagaauggccuggggcggcagcuacaucgcccuggacagcggcugcggcaacugggacugcaucaugaccagcuaccaguaccugaucauccagaacaccaccugggacgaccacugccaguucagcagacccagccccaucggcuaccugggccugcugagccagagaaccagagacaucuacaucagcagaagacgccggggcaccuucaccuggacccugagcgacagcgagggcaacgagacccccggcggcuacugccugaccagauggaugcugaucgaggccgagcugaagugcuucggcaacaccgccguggccaagugcaacgagaagcacgacgaggaguucugcgacaugcugagacuguucgacuucaacaagcaggccaucagaagacugaagacccccgcccagaugagcauccagcugaucaacaaggccgugaacgcccugaucaacgaccagcugaucaugaagaaccaccugagagacaucaugugcauccccuacugcaacuacagcagauacugguaccugaaccacaccagcaccggcaagaccagccugcccagaugcuggcugaucagcaacggcagcuaccugaacgagaccaaguucagcgacgacaucgagcagcaggccgacaacaugaucaccgagaugcugcagaaggaguacaucgacagacagggcaagaccccccugggccugguggaccuguucguguucagcaccagcuucuaccugaucagcaucuuccugcaccuggugaagauccccacccacagacacaucgugggcaagcccugccccaagccccacagacugaaccacaugggcaucugcagcugcggccuguacaagcagcccggcgugcccgugagauggaagagaugaggacuagucccuguucccagagcccacuuuuuuuucuuuuuuugaaauaaaauagccugucuuucagaucucaaaggcucuuuucagagccaccaaaaaaaaaaaaaaaaaaaaaaaaaaaaaaaaaaaaaaaaaaaaaaaaaaaaaaaaaaaaaaaaagaauu

SEQ ID NO: 15276 - RNA, 1717 nt, Artificial Sequence
  mRNA product Design a-1 (hSL-A64-N5) comprising derived and/or modified sequence from LASV(AV;Clade V)__CCA30314__GPCmut1 (opt4)
aggagagucccgcagucggcguccagcggcucugcuuguucgugugugugucguugcaggccuuauucaagcuuaccaugggccagaucgugaccuucuuccaggaggugccccacgugaucgaggaggugaugaacaucgugcugaucgcccugagcauccuggccgugcugaagggccuguacaacaucgccaccugcggccugaucggccugaucaccuuccugcugcugugcggcagaagcugcagcagcaaccuguacaagggcguguacgagcugcagagccuggaccugaacauggagacccugaacaugaccaugccccugagcugcaccaagaacaacagccaccacuacaucagagugggcaacgacaccggccuggagcugacccugaccaacaccagcauccugaaccacaaguucugcaaccugagcgacgcccacaagaaggaccuguacgaccacgcccugaugagcaucaucagcaccuuccaccugagcauccccaacuucaaccaguacgaggccaugagcugcgacuucaacggcggcaagaucagcgugcaguacaaccugagccacagcuacgccaucgacgccgccaaccacugcggcaccguggccaacggcauccugcagaccuucaugagaauggccuggggcggcagcuacaucgcccuggacagcggcugcggcaacugggacugcaucaugaccagcuaccaguaccugaucauccagaacaccaccugggagaaccacugccaguucagcagacccagccccaucggcuaccugggccugcugagccagagaaccagagacaucuacaucagcagaagacgccggggcaccuucaccuggacccugagcgacagcgagggcaacgccacccccggcggcuacugccugaccagauggaugcugaucgaggccgagcugaagugcuucggcaacaccgccguggccaagugcaacgagaagcacgacgaggaguucugcgacaugcugagacuguucgacuucaacaagcaggccaucagcagacugaagagccccgcccagaugagcauccagcugaucaacaaggccgugaacgcccugaucaacgaccagcugaucaugaagaaccaccugagagacaucaugugcauccccuacugcaacuacagcaaguacugguaccugaaccacaccaucaccggcaagaccagccugcccaagugcuggcuggugagcaacggcagcuaccugaacgagacccacuucagcgacgacaucgagcagcaggccgacaacaugaucaccgagaugcugcagaaggaguacauggagagacagggcaagaccccccugggccugguggaccuguucguguucagcaccagcuucuaccugaucagcaucuuccugagacuggugaagauccccacccacagacacaucgugggcaagcccugccccaagccccacagacugaaccacaugggcaucugcagcugcggccuguacaagcagcccggcgugcccgugagauggaagagaugaggacuagucccuguucccagagcccacuuuuuuuucuuuuuuugaaauaaaauagccugucuuucagaucucaaaggcucuuuucagagccaccaaaaaaaaaaaaaaaaaaaaaaaaaaaaaaaaaaaaaaaaaaaaaaaaaaaaaaaaaaaaaaaaagaauu

SEQ ID NO: 15277 - RNA, 1714 nt, Artificial Sequence
  mRNA product Design a-1 (hSL-A64-N5) comprising derived and/or modified sequence from LASV(Togo/2016/7082;Clade VI)__AMR44577__GPCmut1 (opt4)
aggagagucccgcagucggcguccagcggcucugcuuguucgugugugugucguugcaggccuuauucaagcuuaccaugggccagaucaucaccuucuuccaggaggugccccacgugaucgaggaggugaugaacaucgugcugaucgcccugagccugcuggccauccugaagggcguguacaacguggccaccugcggcaucaucggccuggugaccuuccuguuccugugcggcagaagcugcagccugaucuacaagggcagcuacgagcugcagacccuggagcugaacauggagacccugaacaugaccaugccccugagcugcaccaagaacagcagccaccacuacaucagagugggcaacgagaccggccuggagcugacccugaccaacaccagcaucaucaaccacaaguucugcaaccugagcgacgcccacaagagaaaccuguacgaccacgcccugaugagcauccugagcaccuuccaccugagcauccccaacuucaaccaguacgaggccaugagcugcgacuucaacggcggcaagaucagcgugcaguacaaccugagccacgccuacgccguggacgccgccgagcacugcggcaccguggccaacggcgugcugcagaccuucaugagaauggccuggggcggcagcuacaucgcccuggacagcggcugcggcaacugggacugcaucaugaccagcuaccaguaccugaucauccagaacaccaccugggaggaccacugccaguucagcagacccagccccaucggcuaccugggccugcugagccagagaaccagagacaucuacaucagcagaagacgccggggcaccuucaccuggacccugagcgacagcgagggcaacgagacccccggcggcuacugccugaccagauggaugcugaucgaggccgagcugaagugcuucggcaacaccgccguggccaagugcaacgagaagcacgacgaggaguucugcgacaugcugagacuguucgacuucaacaagcaggccauccagagacugaagagccccgcccagaugagcauccagcugaucaacaaggccgugaacgcccugaucaacgaccagcugaucaugaagaaccaccugagagacaugaugugcauccccuacugcaacuacagcaaguacugguaccugaaccacaccagcagcggcagaaccagccugcccaagugcuggcuggugagcaacggcagcuaccugaacgagacccacuucagcgacgacaucgagcagcaggccgacaacaugaucaccgagaugcugcagaaggaguacaucgacagacagggcaagaccccccugggccugguggaccuguucguguucagcaccagcuucuaccugaucagcaucuuccugcaccugaucaagauccccacccacagacacaucgugggcaagcccugccccaagccccacagacugaaccacaugggcaucugcagcugcggccuguacaagcagcccggcgugcccaccagauggaagagaugaggacuagucccuguucccagagcccacuuuuuuuucuuuuuuugaaauaaaauagccugucuuucagaucucaaaggcucuuuucagagccaccaaaaaaaaaaaaaaaaaaaaaaaaaaaaaaaaaaaaaaaaaaaaaaaaaaaaaaaaaaaaaaaaagaauu

SEQ ID NO: 15278 - RNA, 1714 nt, Artificial Sequence
  mRNA product Design a-1 (hSL-A64-N5) comprising derived and/or modified sequence from LASV(KAK-428;Clade n.d. (VII))__ANH09740__GPCmut1 (opt4)
aggagagucccgcagucggcguccagcggcucugcuuguucgugugugugucguugcaggccuuauucaagcuuaccaugggccagaucgugaccuucuuccaggaggugccccacgugaucgaggaggugaugaacaucgugcugaucgcccugagccugcuggccauccugaagggccuguacaacuucgccaccugcggcgugaucggccugaucaccuuccugcugcugugcggcagaagcugcagcgccaccuacaagggccaguacgagcugcagacccuggagcugaacauggagagccugaacaugaccaugccccugagcugcaccaagaacaacagccaccacuacaucagagccggcaacaacaccggccuggagcugacccugaccaacaccagcaucaucagccacaaguucugcaaccugagcgacgcccacaagaagaaccuguacgaccacacccugaugagcaucaucaccaccuuccaccugagcauccccaacuucaaccaguacgaggccaugagcugcgacuucaacggcggcaagaucagcauccaguacaaccugagccacagcuacgccggcgacgccgcccagcacugcggcaccguggccaacggcgugcugcagaccuucaugagaauggccuggggcggcagcuaccuggcccuggacagcggcugcagaggcugggacugcaucaucagcagcuaccaguaccugaucauccagaacaccaccugggacgaccacugccaguucagcagacccagccccaucggcuaccugggcuucgugagccagaagaccagagacaucuacaucagcagaagacgccggggcaccuucaccuggacccugagcgacagcgagggccacgacaugcccggcggcuacugccugaccagauggaugcugaucgaggccgaccugaagugcuucggcaacaccgccguggccaagugcaacgagaagcacgacgaggaguucugcgacauguggagacuguucgacuucaacaagcaggccauccagagacugaaggcccccgcccagaugaacauccagcugaucaacaaggccgugaacgcccugaucaacgaccagcugaugaugaagaaccaccugagagacaucaugugcauccccuacugcaacuacagcaaguucugguaccugaacaacaccaccaccggcagaaccagccugcccagaugcuggcugaucagcaacggcagcuaccugaacgagacccacuucagcgacgacaucgagcagcaggccgacaacaugaucaccgagaugcugcagaaggaguacauggacagacagggcaagaccccccugggccugguggaccuguucguguucagcaccagcuucuaccugaucaccaucuuccugcaccuggugaagauccccacccacagacacaucgugggcaagcccugccccaagccccacagacugaaccacaugggcaucugcagcugcggccuguacaagcagcccggcgugcccgugagauggaagagaugaggacuagucccuguucccagagcccacuuuuuuuucuuuuuuugaaauaaaauagccugucuuucagaucucaaaggcucuuuucagagccaccaaaaaaaaaaaaaaaaaaaaaaaaaaaaaaaaaaaaaaaaaaaaaaaaaaaaaaaaaaaaaaaaagaauu

SEQ ID NO: 15279 - RNA, 1714 nt, Artificial Sequence; identical to SEQ ID NO: 15273
  mRNA product Design a-1 (hSL-A64-N5) comprising derived and/or modified sequence from LASV(Pinneo-NIG-1969;Clade I)__AIT17836__GPCmut1 (opt4)

SEQ ID NO: 15280 - RNA, 1714 nt, Artificial Sequence
  mRNA product Design a-1 (hSL-A64-N5) comprising derived and/or modified sequence from LASV(ISTH0009-NIG-2011;Clade II)__AIT17404__GPCmut1 (opt4)
aggagagucccgcagucggcguccagcggcucugcuuguucgugugugugucguugcaggccuuauucaagcuuaccaugggccagaucaucaccuucuuccaggaggugccccacgugaucgaggaggugaugaacaucgugcugaucgcccugagccugcuggccauccugaagggcaucuacaacguggccaccugcggccuguucggccuggugagcuuccugcugcugugcggcagaagcugcagcaccaccuacaagggcguguacgagcugcagacccuggagcuggacauggccagccugaacaugaccaugccccugagcugcaccaagaacaacagccaccacuacaucauggugggcaacgagaccggccuggagcugacccugaccaacaccagcaucaucaaccacaaguucugcaaccugagcgacgcccacaagaagaaccuguacgaccacgcccugaugagcaucaucagcaccuuccaccugagcauccccaacuucaaccaguacgaggccaugagcugcgacuucaacggcggcaagaucagcgugcaguacaaccugagccacgccuacgccguggacgccgccaaccacugcggcaccaucgccaacggcgugcugcagaccuucaugagaauggccuggggcggcagcuacaucgcccuggacagcggcugcggcagcugggacugcaucaugaccagcuaccaguaccugaucauccagaacaccaccugggaggaccacugccaguucagcagacccagccccaucggcuaccugggccugcugagccagagaaccagagacaucuacaucagcagaagacgccggggcaccuucaccuggacccugagcgacagcgagggcaacgagacccccggcggcuacugccugaccagauggaugcugaucgaggccgagcugaagugcuucggcaacaccgccguggccaagugcaacgagaagcacgacgaggaguucugcgacaugcugagacuguucgacuucaacaagcaggccaucagaagacugaagacccccgcccagaugagcauccagcugaucaacaaggccgugaacgcccugaucaacgaccagcugaucaugaagaaccaccugagagacaucaugugcauccccuacugcaacuacagcaaguacugguaccugaaccacaccgugaccggcaagaccagccugcccagaugcuggcuggugagcaacggcagcuaccugaacgagacccacuucagcgacgacaucgagcagcaggccgacaacaugaucaccgagcugcugcagaaggaguacauggacagacagggcaagaccccccugggccugguggaccuguucguguucagcaccagcuucuaccugaucagcaucuuccugcaccugaucaagauccccacccacagacacaucaccggcaagcccugccccaagccccacagacugaaccacaugggcaucugcagcugcggccuguacaagcaccccggcgugcccgugaaguggaagagaugaggacuagucccuguucccagagcccacuuuuuuuucuuuuuuugaaauaaaauagccugucuuucagaucucaaaggcucuuuucagagccaccaaaaaaaaaaaaaaaaaaaaaaaaaaaaaaaaaaaaaaaaaaaaaaaaaaaaaaaaaaaaaaaaagaauu

SEQ ID NO: 15281 - RNA, 1714 nt, Artificial Sequence
  mRNA product Design a-1 (hSL-A64-N5) comprising derived and/or modified sequence from LASV(ISTH2010-NIG-2012;Clade II)__AIT17482__GPCmut1 (opt4)
aggagagucccgcagucggcguccagcggcucugcuuguucgugugugugucguugcaggccuuauucaagcuuaccaugggccagaucaucaccuucuuccaggaggugccccacgugaucgaggaggugaugaacaucgugcugaucgcccugagccugcuggccauccugaagggcaucuacaacguggccaccugcggccuguucggccuggugagcuuccugcugcugugcggcagaagcugcagcaccaccuacaagggcguguacgagcugcagacccuggagcuggacauggccagccugaacaugaccaugccccugagcugcaccaagaacaacagccaccacuacaucauggugggcaacgagaccggccuggagcugacccugaccaacaccagcaucaucaaccacaaguucugcaaccugagcgacgcccacaagaagaaccuguacgaccacgcccugaugagcaucaucagcaccuuccaccugagcauccccaacuucaaccaguacgaggccaugagcugcgacuucaacggcggcaagaucagcgugcaguacaaccugagccacgccuacgccguggacgccgccaaccacugcggcaccaucgccaacggcgugcugcagaccuucaugagaauggccuggggcggcagcuacaucgcccuggacagcggcugcggcagcugggacugcaucaugaccagcuaccaguaccugaucauccagaacaucaccugggaggaccacugccaguucagcagacccagccccaucggcuaccugggccugcugagccagagaaccagagacaucuacaucagcagaagacgccggggcaccuucaccuggacccugagcgacagcgagggcaacgagacccccggcggcuacugccugaccagauggaugcugaucgaggccgagcugaagugcuucggcaacaccgccguggccaagugcaacgagaagcacgacgaggaguucugcgacaugcugagacuguucgacuucaacaagcaggccaucagaagacugaagacccccgcccagaugagcauccagcugaucaacaaggccgugaacgcccugaucaacgaccagcugaucaugaagaaccaccugagagacaucaugugcauccccuacugcaacuacagcaaguacugguaccugaaccacaccgugaccggcaagaccagccugcccagaugcuggcuggugagcaacggcagcuaccugaacgagacccacuucagcgacgacaucgagcagcaggccgacaacaugaucaccgagcugcugcagaaggaguacaucgacagacagggcaagaccccccugggccugguggaccuguucguguucagcaccagcuucuaccugaucagcaucuuccugcaccuggugaagauccccacccacagacacguggugggcaagcccugccccaagccccacagacugaaccacaugggcaucugcagcugcggccuguacaagcaccccggcgugcccgugaaguggaagagaugaggacuagucccuguucccagagcccacuuuuuuuucuuuuuuugaaauaaaauagccugucuuucagaucucaaaggcucuuuucagagccaccaaaaaaaaaaaaaaaaaaaaaaaaaaaaaaaaaaaaaaaaaaaaaaaaaaaaaaaaaaaaaaaaagaauu

SEQ ID NO: 15282 - RNA, 1714 nt, Artificial Sequence
  mRNA product Design a-1 (hSL-A64-N5) comprising derived and/or modified sequence from LASV(Lassa virus/H.sapiens-wt/NGA/2015/ISTH_0543;Clade II)__AVO03639__GPCmut1 (opt4)
aggagagucccgcagucggcguccagcggcucugcuuguucgugugugugucguugcaggccuuauucaagcuuaccaugggccagaucaucaccuucuuccaggaggugccccacgugaucgaggaggugaugaacaucgugcugaucgcccugagccugcuggccauccugaagggcaucuacaacguggccaccugcggccuguucggccuggugagcuuccugcugcugugcggcagaagcugcagcaccaccuacaagggcguguacgagcugcagacccuggagcuggacauggccaaccugaacaugaccaugccccugagcugcaccaagaacaacagccaccacuacaucauggugggcaacgagaccggccuggagcugacccugaccaacaccagcaucaucaaccacaaguucugcaaccugagcgacgcccacaagaagaaccuguacgaccacgcccugaugagcaucaucagcaccuuccaccugagcauccccaacuucaaccaguacgaggccaugagcugcgacuucaacggcggcaagaucagcgugcaguacaaccugagccacaccuacgccguggacgccgccaaccacugcggcaccaucgccaacggcgugcugcagaccuucaugagaauggccuggggcggcagcuacaucgcccuggacagcggcugcggcagcugggacugcaucaugaccagcuaccaguaccuggugauccagaacaccaccugggaggaccacugccaguucagcagacccagccccaucggcuaccugggccugcugagccagagaaccagagacaucuacaucagcagaagacgccggggcaccuucaccuggacccugagcgacagcgagggcaacgagacccccggcggcuacugccugaccagauggaugcugaucgaggccgagcugaagugcuucggcaacaccgccguggccaagugcaacgagaagcacgacgaggaguucugcgacaugcugagacuguucgacuucaacaagcaggccaucagaagacugaagacccccgcccagaugagcauccagcugaucaacaaggccgugaacgcccugaucaacgaccagcugaucaugaagaaccaccugagagacaucaugugcauccccuacugcaacuacagcaaguacugguaccugaaccacaccgugaccggcaagaccagccugcccagaugcuggcuggugagcaacggcagcuaccugaacgagacccacuucagcgacgacaucgagcagcaggccgacaacaugaucaccgagcugcugcagaaggaguacaucgacagacagggcaagaccccccugggccugguggaccuguucguguucagcaccagcuucuaccugaucagcaucuuccugcaccuggugaagauccccacccacagacacaucaccggcaagcccugccccaagccccacagacugaaccacaugggcaucugcagcugcggccuguacaagcaccccggcgugcccgugaaguggaagagaugaggacuagucccuguucccagagcccacuuuuuuuucuuuuuuugaaauaaaauagccugucuuucagaucucaaaggcucuuuucagagccaccaaaaaaaaaaaaaaaaaaaaaaaaaaaaaaaaaaaaaaaaaaaaaaaaaaaaaaaaaaaaaaaaagaauu

SEQ ID NO: 15283 - RNA, 1714 nt, Artificial Sequence
  mRNA product Design a-1 (hSL-A64-N5) comprising derived and/or modified sequence from LASV(Lassa virus/H.sapiens-wt/NGA/2016/ISTH_0009;Clade II)__AVO03571__GPCmut1 (opt4)
aggagagucccgcagucggcguccagcggcucugcuuguucgugugugugucguugcaggccuuauucaagcuuaccaugggccagaucaucaccuucuuccaggaggugccccacgugaucgaggaggugaugaacaucgugcugaucgcccugagccugcuggccauccugaagggcaucuacaacguggccaccugcggccugcugggccuggugagcuuccugcugcugugcggcagaagcugcagcaccaccuacaagggcguguacgagcugcagacccuggagcuggacauggccagccugaacaugaccaugccccugagcugcaccaagaacaacagccaccacuacaucauggugggcaacgagaccggccuggagcugacccugaccaacaccagcaucaucaaccacaaguucugcaaccugagcgacgcccacaagaagaaccuguacgaccacgcccugaugagcaucaucagcaccuuccaccugagcauccccaacuucaaccaguacgaggccaugagcugcgacuucaacggcggcagaaucagcgugcaguacaaccugagccacagcuacgccguggacgccgccaaccacugcggcaccaucgccaacggcgugcugcagaccuucaugagaauggccuggggcggcagcuacaucgcccuggacagcggcugcggcagcugggacugcaucaugaccagcuaccaguaccugaucauccagaacaccaccugggaggaccacugccaguucagcagacccagccccaucggcuaccugggccugcugagccagagaaccagagacaucuacaucagcagaagacgccggggcaccuucaccuggacccugagcgacagcgagggcaacgagacccccggcggcuacugccugaccagauggaugcugaucgaggccgagcugaagugcuucggcaacaccgccguggccaagugcaacgagaagcacgacgaggaguucugcgacaugcugagacuguucgacuucaacaagcaggccaucagaagacugaagacccccgcccagaugagcauccagcugaucaacaaggccgugaacgcccugaucaacgaccagcugaucaugaagaaccaccugagagacaucaugugcauccccuacugcaacuacagcaaguacugguaccugaaccacaccgugaccggcaagaccagccugcccagaugcuggcuggugagcaacggcagcuaccugaacgagacccacuucagcgacgacaucgagcagcaggccgacaacaugaucaccgagcugcugcagaaggaguacaucgacagacagggcaagaccccccugggccugguggaccuguucguguucagcaccagcuucuaccugaucagcaucuuccugcaccuggugaagauccccacccacagacacaucaccggcaagcccugccccaagccccacagacugaaccacaugggcaucugcagcugcggccuguacaaccaccccggcgugcccgugaaguggaagagaugaggacuagucccuguucccagagcccacuuuuuuuucuuuuuuugaaauaaaauagccugucuuucagaucucaaaggcucuuuucagagccaccaaaaaaaaaaaaaaaaaaaaaaaaaaaaaaaaaaaaaaaaaaaaaaaaaaaaaaaaaaaaaaaaagaauu

SEQ ID NO: 15284 - RNA, 1714 nt, Artificial Sequence
  mRNA product Design a-1 (hSL-A64-N5) comprising derived and/or modified sequence from LASV(Lassa virus/H.sapiens-wt/NGA/2016/ISTH_0017;Clade II)__AVO03567__GPCmut1 (opt4)
aggagagucccgcagucggcguccagcggcucugcuuguucgugugugugucguugcaggccuuauucaagcuuaccaugggccagaucaucaccuucuuccaggaggugccccacgugaucgaggaggugaugaacaucgugcugaucgcccugagccugcuggccauccugaagggcaucuacaacguggccaccugcggccuguucggccuggugagcuuccugcugcugugcggcagaagcugcagcaccaccuacaagggcguguacgagcugcagacccuggagcuggacauggccagccugaacaugaccaugccccugagcugcaccaagaacaacagccaccacuacaucauggugggcaacgagaccggccuggagcugacccugaccaacaccagcaucaucaaccacaaguucugcaaccugagcgacgcccacaagaagaaccuguacgaccacgcccugaugagcaucaucagcaccuuccaccugagcauccccaacuucaaccaguacgaggccaugagcugcgacuucaacggcggcaagaucagcgugcaguacaaccugagccacaccuacgccaucgacgccgccaaccacugcggcaccaucgccaacggcgugcugcagaccuucaugagaauggccuggggcggcagcuacaucgcccuggacagcggcugcggcagcugggacugcaucaugaccagcuaccaguaccugaucauccagaacaccaccugggaggaccacugccaguucagcagacccagccccaucggcuaccugggccugcugagccagagaaccagagacaucuacaucagcagaagacgccggggcaccuucaccuggacccugagcgacagcgagggcaacgagacccccggcggcuacugccugaccagauggaugcugaucgaggccgagcugaagugcuucggcaacaccgccguggccaagugcaacgagaagcacgacgaggaguucugcgacaugcugagacuguucgacuucaacaagcaggccaucagaagacugaagacccccgcccagaugagcauccagcugaucaacaaggccgugaacgcccugaucaacgaccagcugaucaugaagaaccaccugagagacaucaugugcauccccuacugcaacuacagcaaguacugguaccugaaccacaccgugaccggcaagaccagccugcccagaugcuggcuggugagcaacggcagcuaccugaacgagacccacuucagcgacgacaucgagcagcaggccgacaacaugaucaccgagcugcugcagaaggaguacauggacagacagggcaagaccccccugggccugguggaccuguucguguucagcaccagcuucuaccugaucagcaucuuccugcaccuggugagaauccccacccacagacacgugaucggcaagcccugccccaagccccacagacugaaccacaugggcaucugcagcugcggccuguacaagcaccccggcgugcccgugaaguggaagagaugaggacuagucccuguucccagagcccacuuuuuuuucuuuuuuugaaauaaaauagccugucuuucagaucucaaaggcucuuuucagagccaccaaaaaaaaaaaaaaaaaaaaaaaaaaaaaaaaaaaaaaaaaaaaaaaaaaaaaaaaaaaaaaaaagaauu

SEQ ID NO: 15285 - RNA, 1714 nt, Artificial Sequence
  mRNA product Design a-1 (hSL-A64-N5) comprising derived and/or modified sequence from LASV(Lassa virus/H.sapiens-wt/NGA/2018/ISTH_0959;Clade II)__AVV65099__GPCmut1 (opt4)
aggagagucccgcagucggcguccagcggcucugcuuguucgugugugugucguugcaggccuuauucaagcuuaccaugggccagaucaucaccuucuuccaggaggugccccacgugaucgaggaggugaugaacaucgugcugaucgcccugagccugcuggccauccugaagggcaucuacaacguggugaccugcggccuguucggccuggugagcuuccugcugcugugcggcagaagcugcagcaccaccuacaagggcguguacgagcugcagacccuggagcuggacauggccagccugaacaugaccaugccccugagcugcaccaagaacaacagccaccacuacaucauggugggcaacgagaccggccuggagcugacccugaccaacaccagcaucaucaaccacaaguucugcaaccugagcgacgcccacaagaagaaccuguacgaccacgcccugaugagcaucaucagcaccuuccaccugagcauccccaacuucaaccaguacgaggccaugagcugcgacuucaacggcggcaagaucagcgugcaguacaaccugagccacgccuacgccaucgacgccgccaaccacugcggcaccaucgccaacggcgugcugcagaccuucaugagaauggccuggggcggcagcuacaucgcccuggacagcggcugcggcagcugggacugcaucaugaccagcuaccaguaccugaucauccagaacaccaccugggaggaccacugccaguucagcagacccagccccaucggcuaccugggccugcugagccagagaaccagagacaucuacaucagcagaagacgccggggcaccuucaccuggacccugagcgacagcgagggcaacgagacccccggcggcuacugccugaccagauggaugcugaucgaggccgagcugaagugcuucggcaacaccgccguggccaagugcaacgagaagcacgacgaggaguucugcgacaugcugagacuguucgacuucaacaagcaggccaucagaagacugaagacccccgcccagaugagcauccagcugaucaacaaggccgugaacgcccugaucaacgaccagcugaucaugaagaaccaccugagagacaucaugugcauccccuacugcaacuacagcaaguacugguaccugaaccacaccgugaccggcaagaccagccugcccagaugcuggcuggugagcaacggcagcuaccugaacgagacccacuucagcgacgacaucgagcagcaggccgacaacaugaucaccgagcugcugcagaaggaguacaucgacagacagggcaagaccccccugggccugguggaccuguucguguucagcaccagcuucuaccugaucagcaucuuccugcaccuggugaagauccccacccacagacacgugaucggcaagcccugccccaagccccacagacugaaccacaugggcaucugcagcugcggccuguacaagcaccccggcgugcccgugaaguggaagagaugaggacuagucccuguucccagagcccacuuuuuuuucuuuuuuugaaauaaaauagccugucuuucagaucucaaaggcucuuuucagagccaccaaaaaaaaaaaaaaaaaaaaaaaaaaaaaaaaaaaaaaaaaaaaaaaaaaaaaaaaaaaaaaaaagaauu

SEQ ID NO: 15286 - RNA, 1714 nt, Artificial Sequence
  mRNA product Design a-1 (hSL-A64-N5) comprising derived and/or modified sequence from LASV(LASV003-NIG-2008;Clade II)__AIT17580__GPCmut1 (opt4)
aggagagucccgcagucggcguccagcggcucugcuuguucgugugugugucguugcaggccuuauucaagcuuaccaugggccagaucaucaccuucuuccaggaggugccccacgugaucgaggaggugaugaacaucgugcugaucgcccugagccugcuggccauccugaagggcaucuacaacguggccaccugcggccuguucggccuggugagcuuccugcugcugugcggcagaagcugcagcaccaccuacaagggcguguacgagcugcagacccuggagcuggacauggccagccugaacaugaccaugccccugagcugcaccaagaacaacagccaccacuacaucauggugggcaacgagaccggccuggagcugacccugaccaacaccagcaucaucaaccacaaguucugcaaccugagcgacgcccacaagaagaaccuguacgaccacgcccugaugagcaucaucagcaccuuccaccugagcauccccaacuucaaccaguacgaggccaugagcugcgacuucaacggcggcaagaucagcgugcaguacaaccugagccacaccuacgccguggacgccgccaaccacugcggcaccaucgccaacggcgugcugcagaccuucaugagaauggccuggggcggcagcuacaucgcccuggacagcggcugcggcagcugggacugcaucaugaccagcuaccaguaccugaucauccagaacaccaccugggaggaccacugccaguucagcagacccagccccaucggcuaccugggccugcugagccagagaaccagagacaucuacaucagcagaagacgccggggcaccuucaccuggacccugagcgacagcgagagcaacgagacccccggcggcuacugccugaccagauggaugcugaucgaggccgagcugaagugcuucggcaacaccgccguggccaagugcaacgagaagcacgacgaggaguucugcgacaugcugagacuguucgacuucaacaagcaggccaucagaagacugaaggcccccgcccagaugagcauccagcugaucaacaaggccgugaacgcccugaucaacgaccagcugaucaugaagaaccaccugagagacaucaugugcauccccuacugcaacuacagcaaguacugguaccugaaccacaccgugaccggcagaaccagccugcccagaugcuggcuggugagcaacggcagcuaccugaacgagacccacuucagcgacgacaucgagcagcaggccgacaacaugaucaccgagcugcugcagaaggaguacauggacagacagggcaagaccccccugggccugguggaccuguucguguucagcaccagcuucuaccugaucagcaucuuccugcaccuggugaagauccccacccacagacacgugaucggcaagcccugccccaagccccacagacugaaccacaugggcaucugcagcugcggccuguacaagcaccccggcgugcccgugaaguggaagagaugaggacuagucccuguucccagagcccacuuuuuuuucuuuuuuugaaauaaaauagccugucuuucagaucucaaaggcucuuuucagagccaccaaaaaaaaaaaaaaaaaaaaaaaaaaaaaaaaaaaaaaaaaaaaaaaaaaaaaaaaaaaaaaaaagaauu

SEQ ID NO: 15287 - RNA, 1714 nt, Artificial Sequence
  mRNA product Design a-1 (hSL-A64-N5) comprising derived and/or modified sequence from LASV(LASV035-NIG-2009;Clade II)__AIT17588__GPCmut1 (opt4)
aggagagucccgcagucggcguccagcggcucugcuuguucgugugugugucguugcaggccuuauucaagcuuaccaugggccagaucaucaccuucuuccaggaggugccccacgugaucgaggaggugaugaacaucgugcugaucgcccugagccugcuggccauccugaagggcaucuacaacguggccaccugcggccuguucggccuggugagcuuccugcugcugugcggcagaagcugcagcaccaccuacaagggcguguacgagcugcagacccuggagcuggacauggccagccugaacaugaccaugccccugagcugcaccaagaacaacagccaccacuacaucauggugggcaacgagaccggccuggagcugacccugaccaacaccagcaucaucaaccacaaguucugcaaccugagcgacgcccacaagaagaaccuguacgaccacgcccugaugagcaucaucagcaccuuccaccugagcauccccaacuucaaccaguacgaggccaugagcugcgacuucaacggcggcaagaucagcgugcaguacaaccugagccacgccuacgccguggacgccgccaaccacugcggcaccaucgccaacggcgugcugcagaccuucaugagaauggccuggggcggcagcuacaucgcccuggacagcggcugcggcagcugggacugcaucaugaccagcuaccaguaccugaucauccagaacaccaccugggaggaccacugccaguucagcagacccagccccaucggcuaccugggccugcugagccagagaaccagagacaucuacaucagcagaagacgccggggcaccuucaccuggacccugagcgacagcgagggcaacgagacccccggcggcuacugccugaccagauggaugcugaucgaggccgagcugaagugcuucggcaacaccgccguggccaagugcaacgagaagcacgacgaggaguucugcgacaugcugagacuguucgacuucaacaagcaggccaucagaagacugaaggcccccgcccagaugagcauccagcugaucaacaaggccgugaacgcccugaucaacgaccagcugaucaugaagaaccaccugagagacaucaugugcauccccuacugcaacuacagcaaguacugguaccugaaccacaccgugaccggcaagaccagccugcccagaugcuggcuggugagcaacggcagcuaccugaacgagacccacuucagcgacgacaucgagcagcaggccgacaacaugaucaccgagcugcugcagaaggaguacaucgacagacagggcaagaccccccugggccugguggaccuguucguguucagcaccagcuucuaccugaucagcaucuuccugcaccuggugaagauccccacccacagacacgugaucggcaagcccugccccaagccccacagacugaaccacaugggcaucugcagcugcggccuguacaagcaccccggcgugcccgugaaguggaagagaugaggacuagucccuguucccagagcccacuuuuuuuucuuuuuuugaaauaaaauagccugucuuucagaucucaaaggcucuuuucagagccaccaaaaaaaaaaaaaaaaaaaaaaaaaaaaaaaaaaaaaaaaaaaaaaaaaaaaaaaaaaaaaaaaagaauu

SEQ ID NO: 15288 - RNA, 1714 nt, Artificial Sequence
  mRNA product Design a-1 (hSL-A64-N5) comprising derived and/or modified sequence from LASV(LASV1000-NIG-2009;Clade II)__AIT17782__GPCmut1 (opt4)
aggagagucccgcagucggcguccagcggcucugcuuguucgugugugugucguugcaggccuuauucaagcuuaccaugggccagaucaucaccuucuuccaggaggugccccacgugaucgaggaggugaugaacaucgugcugaucgcccugagccugcuggccauccugaagggcaucuacaacguggccaccugcggccuguucggccuggugagcuuccugcugcugugcggcagaagcugcagcaccaccuacaagggcguguacgagcugcagacccuggagcuggacauggccagccugaacaugaccaugccccugagcugcaccaagaacaacagccaccacuacaucauggugggcaacgagaccggccuggagcugacccugaccaacaccagcaucaucaaccacaaguucugcaaccugagcgacgcccacaagaagaaccuguacgaccacgcccugaugagcaucaucagcaccuuccaccugagcauccccaacuucaaccaguacgaggccaugagcugcgacuucaacggcggcaagaucagcgugcaguacaaccugagccacaccuacgccguggacgccgccaaccacugcggcaccaucgccaacggcgugcugcagaccuucaugagaauggccuggggcggcagcuacaucgcccuggacagcggcugcggcagcugggacugcaucaugaccagcuaccaguaccugaucauccagaacaccaccugggaggaccacugccaguucagcagacccagccccaucggcuaccugggccugcugagccagagaaccagagacaucuacaucagcagaagacgccggggcaccuucaccuggacccugagcgacagcgagggcaacgagacccccggcggcuacugccugaccagauggaugcugaucgaggccgagcugaagugcuucggcaacaccgccguggccaagugcaacgagaagcacgacgaggaguucugcgacaugcugagacuguucgacuucaacaagcaggccaucaagagacugaagacccccgcccagaugagcauccagcugaucaacaaggccgugaacgcccugaucaacgaccagcugaucaugaagaaccaccugagagacaucaugugcauccccuacugcaacuacagcaaguacugguaccugaaccacaccgugaccggcaagaccagccugcccagaugcuggcuggugagcaacggcagcuaccugaacgagacccacuucagcgacgacaucgagcagcaggccgacaacaugaucaccgagcugcugcagaaggaguacaucgacagacagggcaagaccccccugggccugguggaccuguucguguucagcaccagcuucuaccugaucagcaucuuccugcaccuggugaagauccccacccacagacacguggugggcaagcccugccccaagccccacagacugaaccacaugggcaucugcagcugcggccuguacaagcaccccggcgugcccgugaaguggaagagaugaggacuagucccuguucccagagcccacuuuuuuuucuuuuuuugaaauaaaauagccugucuuucagaucucaaaggcucuuuucagagccaccaaaaaaaaaaaaaaaaaaaaaaaaaaaaaaaaaaaaaaaaaaaaaaaaaaaaaaaaaaaaaaaaagaauu

SEQ ID NO: 15289 - RNA, 1714 nt, Artificial Sequence
  mRNA product Design a-1 (hSL-A64-N5) comprising derived and/or modified sequence from LASV(LASV221-NIG-2010;Clade II)__AIT17624__GPCmut1 (opt4)
aggagagucccgcagucggcguccagcggcucugcuuguucgugugugugucguugcaggccuuauucaagcuuaccaugggccagaucaucaccuucuuccaggaggugccccacgugaucgaggaggugaugaacaucgugcugaucgcccugagccugcuggccauccugaagggcaucuacaacguggccaccugcggccuguucggccuggugagcuuccugcugcugugcggcagaagcugcagcaccaccuacaagggcguguacgagcugcagacccuggagcuggacauggccagccugaacaugaccaugccccugagcugcaccaagaacaacagccaccacuacaucauggugggcaacgagaccggccuggagcugacccugaccaacaccagcaucaucaaccacaaguucugcaaccugagcgacgcccacaagaagaaccuguacgaccacgcccugaugagcaucaucagcaccuuccaccugagcauccccaacuucaaccaguacgaggccaugagcugcgacuucaacggcggcaagaucagcgugcaguacaaccugagccacaccuacgccaucgacgccgccaaccacugcggcaccaucgccaacggcgugcugcagaccuucaugagaauggccuggggcggcagcuacaucgcccuggacagcggcugcggcagcugggacugcaucaugaccagcuaccaguaccugaucauccagaacaccaccugggaggaccacugccaguucagcagacccagccccaucggcuaccugggccugcugagccagagaaccagagacaucuacaucagcagaagacgccggggcaccuucaccuggacccugagcgacagcgagggcaacgagacccccggcggcuacugccugaccagauggaugcugaucgaggccgagcugaagugcuucggcaacaccgccguggccaagugcaacgagaagcacgacgaggaguucugcgacaugcugagacuguucgacuucaacaagcaggccaucagaagacugaagacccccgcccagaugagcauccagcugaucaacaaggccgugaacgcccugaucaacgaccagcugaucaugaagaaccaccugagagacaucaugugcauccccuacugcaacuacagcaaguacugguaccugaaccacaccgugaccggcaagaccagccugcccagaugcuggcuggugagcaacggcagcuaccugaacgagacccacuucagcgacgacaucgagcagcaggccgacaacaugaucaccgagaugcugcagaaggaguacauggacagacagggcaagaccccccugggccugguggaccuguucguguucagcaccagcuucuaccugaucagcaucuuccugcaccuggugaagauccccacccacagacacgugaucggcaagcccugccccaagccccacagacugaaccacaugggcaucugcagcugcggccuguacaagcaccccggcgugcccgugaaguggaagagaugaggacuagucccuguucccagagcccacuuuuuuuucuuuuuuugaaauaaaauagccugucuuucagaucucaaaggcucuuuucagagccaccaaaaaaaaaaaaaaaaaaaaaaaaaaaaaaaaaaaaaaaaaaaaaaaaaaaaaaaaaaaaaaaaagaauu

SEQ ID NO: 15290 - RNA, 1714 nt, Artificial Sequence
  mRNA product Design a-1 (hSL-A64-N5) comprising derived and/or modified sequence from LASV(LASV237-NIG-2010;Clade II)__AIT17638__GPCmut1 (opt4)
aggagagucccgcagucggcguccagcggcucugcuuguucgugugugugucguugcaggccuuauucaagcuuaccaugggccagaucaucaccuucuuccaggaggugccccacgugaucgaggaggugaugaacaucgugcugaucgcccugagccugcuggccauccugaagggcaucuacaacguggccaccugcggccuguucggccuggugagcuuccugcugcugugcggcagaagcugcagcaccaccuacaagggcguguacgagcugcagacccuggagcuggacauggccagccugaacaugaccaugccccugagcugcaccaagaacaacagccaccacuacaucauggugggcaacgagaccggccuggagcugacccugaccaacaccagcaucaucaaccacaaguucugcaaccugagcgacgcccacaagaaggaccuguacgaccacgcccugaugagcaucaucagcaccuuccaccugagcauccccaacuucaaccaguacgaggccaugagcugcgacuucaacggcggcaagaucagcgugcaguacaaccugagccacaccuacgccguggacgccgccaaccacugcggcaccaucgccaacggcgugcugcagaccuucaugagaauggccuggggcggcagcuacaucgcccuggacagcggcugcggcagcugggacugcaucaugaccagcuaccaguaccugaucauccagaacaccaccugggaggaccacugccaguucagcagacccagccccaucggcuaccugggccugcugagccagagaaccagagacaucuacaucagcagaagacgccggggcaccuucaccuggacccugagcgacagcgagggcaacgagacccccggcggcuacugccugaccagauggaugcugaucgaggccgagcugaagugcuucggcaacaccgccguggccaagugcaacgagaagcacgacgaggaguucugcgacaugcugagacuguucgacuucaacaagcaggccaucagaagacugaagacccccgcccagaugagcauccagcugaucaacaaggccgugaacgcccugaucaacgaccagcugaucaugaagaaccaccugagagacaucaugugcauccccuacugcaacuacagcaaguacugguaccugaaccacaccgugaccggcaagaccagccugcccagaugcuggcuggugagcaacggcagcuaccugaacgagacccacuucagcgacgacaucgagcagcaggccgacaacaugaucaccgagcugcugcagaaggaguacauggacagacagggcaagaccccccugggccugguggaccuguucguguucagcaccagcuucuaccugaucagcaucuuccugcaccugaucaagauccccacccacagacacaucaccggcaagcccugccccaagccccacagacugaaccacaugggcaucugcagcugcggccuguacaagcaccccggcgugcccgugaaguggaagagaugaggacuagucccuguucccagagcccacuuuuuuuucuuuuuuugaaauaaaauagccugucuuucagaucucaaaggcucuuuucagagccaccaaaaaaaaaaaaaaaaaaaaaaaaaaaaaaaaaaaaaaaaaaaaaaaaaaaaaaaaaaaaaaaaagaauu

SEQ ID NO: 15291 - RNA, 1714 nt, Artificial Sequence
  mRNA product Design a-1 (hSL-A64-N5) comprising derived and/or modified sequence from LASV(LASV253-NIG-2011;Clade II)__AIT17670__GPCmut1 (opt4)
aggagagucccgcagucggcguccagcggcucugcuuguucgugugugugucguugcaggccuuauucaagcuuaccaugggccagaucaucaccuucuuccaggaggugccccacgugaucgaggaggugaugaacaucgugcugaucgcccugagccugcuggccauccugaagggcaucuacaacguggccaccugcggccuguucggccuggugagcuuccugcugcugugcggcagaagcugcagcaccaccuacaagggcguguacgagcugcagacccuggagcuggacauggccagccugaacaugaccaugccccugagcugcaccaagaacaacagccaccacuacaucauggugggcaacgagaccggccuggagcugacccugaccaacaccagcaucaucaaccacaaguucugcaaccugagcgacgcccacaagaagaaccuguacgaccacgcccugaugagcaucaucagcaccuuccaccugagcauccccaacuucaaccaguacgaggccaugagcugcgacuucaacggcggcaagaucagcgugcaguacaaccugagccacaccuacgccguggacgccgccaaccacugcggcaccaucgccaacggcgugcugcagaccuucaugagaauggccuggggcggcagcuacaucgcccuggacagcggcugcggcagcugggacugcaucaugaccagcuaccaguaccugaucauccagaacaccaccugggaggaccacugccaguucagcagacccagccccaucggcuaccugggccugcugagccagagaaccagagacaucuacaucagcagaagacgccggggcaccuucaccuggacccugagcgacagcgagggcaacgagacccccggcggcuacugccugaccagauggaugcugaucgaggccgagcugaagugcuucggcaacaccgccguggccaagugcaacgagaagcacgacgaggaguucugcgacaugcugagacuguucgacuucaacaagcaggccaucagaagacugaaggcccccgcccagaugagcauccagcugaucaacaaggccgugaacgcccugaucaacgaccagcugaucaugaagaaccaccugagagacaucaugugcauccccuacugcaacuacagcaaguacugguaccugaaccacaccgugaccggcagaaccagccugcccagaugcuggcuggugagcaacggcagcuaccugaacgagacccacuucagcgacgacaucgagcagcaggccgacaacaugaucaccgagcugcugcagaaggaguacaucgacagacagggcaagaccccccugggccugguggaccuguucguguucagcaccagcuucuaccugaucagcaucuuccugcaccuggugaagauccccacccacagacacaucaucggcaagcccugccccaagccccacagacugaaccacaugggcaucugcagcugcggccuguacaagcaccccggcgugcccgugaaguggaagagaugaggacuagucccuguucccagagcccacuuuuuuuucuuuuuuugaaauaaaauagccugucuuucagaucucaaaggcucuuuucagagccaccaaaaaaaaaaaaaaaaaaaaaaaaaaaaaaaaaaaaaaaaaaaaaaaaaaaaaaaaaaaaaaaaagaauu

SEQ ID NO: 15292 - RNA, 1714 nt, Artificial Sequence
  mRNA product Design a-1 (hSL-A64-N5) comprising derived and/or modified sequence from LASV(LASV254-NIG-2011;Clade II)__AIT17674__GPCmut1 (opt4)
aggagagucccgcagucggcguccagcggcucugcuuguucgugugugugucguugcaggccuuauucaagcuuaccaugggccagaucaucaccuucuuccaggaggugccccacgugaucgaggaggugaugaacaucgugcugaucgcccugagccugcuggccauccugaagggcaucuacaacguggccaccugcggccuguucggccuggugagcuuccugcugcugugcggcagaagcugcagcaccaccuacaagggcguguacgagcugcagacccuggagcuggacaugaccaaccugaacaugaccaugccccugagcugcaccaagaacaacagccaccacuacaucauggugggcaacgagaccggccuggagcugacccugaccaacaccagcaucaucaaccacaaguucugcaaccugagcgacgcccacaagaagaaccuguacaaccacgcccugaugagcaucaucagcaccuuccaccugagcauccccaacuucaaccaguacgaggccaugagcugcgacuucaacggcggcaagaucagcgugcaguacaaccugagccacagcuacgccguggacgccgccaaccacugcggcaccaucgccaacggcgugcugcagaccuucaugagaauggccuggggcggcagcuacaucgcccuggacagcggcugcggcaacugggacugcaucaugaccagcuaccaguaccugaucauccagaacaccaccugggaggaccacugccaguucagcagacccagccccaucggcuaccugggccugcugagccagagaaccagagacaucuacaucagcagaagacgccggggcaccuucaccuggacccugagcgacagcgagggcaacgagacccccggcggcuacugccugaccagauggaugcugaucgaggccgagcugaagugcuucggcaacaccgccguggccaagugcaacgagaagcacgacgaggaguucugcgacaugcugagacuguucgacuucaacaagcaggccaucagaagacugaagacccccgcccaggccaacauccagcugaucaacaaggccgugaacgcccugaucaacgaccagcugaucaugaagaaccaccugagagacaucaugugcauccccuacugcaacuacagcaaguacugguaccugaaccacaccgugaccggcaagaccagccugcccagaugcuggcuggugagcaacggcagcuaccugaacgagacccacuucagcgacgacaucgagcagcaggccgacaacaugaucaccgagcugcugcagaaggaguacauggacagacagggcaagaccccccugggccugguggaccuguucguguucagcaccagcuucuaccugaucagcaucuuccugcaccuggugaagauccccacccacagacacgugaucggcaagcccugccccaagccccacagacugaaccacaugggcaucugcagcugcggccuguacaagcaccccggcgugcccgugaaguggaagagaugaggacuagucccuguucccagagcccacuuuuuuuucuuuuuuugaaauaaaauagccugucuuucagaucucaaaggcucuuuucagagccaccaaaaaaaaaaaaaaaaaaaaaaaaaaaaaaaaaaaaaaaaaaaaaaaaaaaaaaaaaaaaaaaaagaauu

SEQ ID NO: 15293 - RNA, 1714 nt, Artificial Sequence
  mRNA product Design a-1 (hSL-A64-N5) comprising derived and/or modified sequence from LASV(Nig08-A19;Clade III)__ADU56618__GPCmut1 (opt4)
aggagagucccgcagucggcguccagcggcucugcuuguucgugugugugucguugcaggccuuauucaagcuuaccaugggccagaucgugaccuucuuccaggaggugccccacgugaucgaggaggugaugaacaucgugcugaucgcccugagcauccuggccauccugaagggccuguacaacaucgccaccugcggccugaucggccuggugaccuuccugcugcugagcggcagaagcugcagcaugaccuacaagggcguguacgagcugcagacccuggagcugaacaugaacacccugaacaugaccaugccccugagcugcaccaagaacaacagccaccacuacaucauggugggcaacgagaccggccuggagcugacccugaccaacaccagccugcugcaccacaaguucugcaaccugagcgacgcccacaagaagaaccuguacgaccacacccugaugagcaucaucagcaccuuccaccugagcauccccaacuucaaccaguacgaggccaugagcugcgacuucaacggcggcaagaucaccgugcaguacaaccugagccacagcuacgccaucgacgccgccaaccacugcggcaccguggccaacggcgugcugcagaccuucaugagaauggccuggggcggcagcuacaucgcccuggacagcggcugcggcaagugggacugcaucaugaccagcuaccaguaccugaucauccagaacaccaccugggaggaccacugccaguucagcagacccagccccaucggcuaccugggccugcugagccagagaaccagagacaucuacaucagcagaagacgccggggcaccuucaccuggacccugagcgacagcgagggcaacgagacccccggcggcuacugccugaccagauggaugcugaucgaggccgagcugaagugcuucggcaacaccgccguggccaagugcaacgagaagcacgacgaggaguucugcgacaugcugagacuguucgacuucaacaagcaggccaucagaagacugaaggcccccgcccagaugagcauccagcugaucaacaaggccgugaacgcccugaucaacgaccagcugaucaugaagaaccaccugagagacaucaugugcauccccuacugcaacuacagcaaguacugguaccugaaccacaccagcaccggcagaaccagccugcccagaugcuggcuggugagcaacggcagcuaccugaacgagacccacuucagcgacgacaucgagcagcaggccgacaacaugaucaccgagaugcugcagaaggaguaccuggacagacagggcaagaccccccugggccugguggaccuguucguguucagcaccagcuucuaccugaucagcaucuuccugcaccuggugaagauccccacccacagacacaucgugggcaagcccugccccaagccccacagacugaaccacaugggcaucugcagcugcggccuguacaagcagcccggcgugcccgugagauggaagagaugaggacuagucccuguucccagagcccacuuuuuuuucuuuuuuugaaauaaaauagccugucuuucagaucucaaaggcucuuuucagagccaccaaaaaaaaaaaaaaaaaaaaaaaaaaaaaaaaaaaaaaaaaaaaaaaaaaaaaaaaaaaaaaaaagaauu

SEQ ID NO: 15294 - RNA, 1717 nt, Artificial Sequence
  mRNA product Design a-1 (hSL-A64-N5) comprising derived and/or modified sequence from LASV(G1180-SLE-2010;Clade IV)__AIT17168__GPCmut1 (opt4)
aggagagucccgcagucggcguccagcggcucugcuuguucgugugugugucguugcaggccuuauucaagcuuaccaugggccagaucgugaccuucuuccaggaggugccccacgugaucgaggaggugaugaacaucgugcugaucgcccugagcauccuggccgugcugaagggccuguacaacuucgccaccugcggccuggugggccugcugaccuuccugcugcugugcggcagaagcugcaccgccagcagauacaagggcguguacgagcugcagacccuggagcugaacauggagacccugaacaugaccaugccccugagcugcaccaagaacaacagccaccacuacaucauggugggcaacgagaccggccuggagcugacccugaccaacaccagcaucaucaaccacaaguucugcaaccugagcgacgcccacaagaagaaccuguacgaccacgcccugaugagcaucaucagcaccuuccaccugagcauccccaacuucaaccaguacgaggccaugagcugcgacuucaacggcggcaagaucagcgugcaguacaaccugagccacagcuacgccggcgacgccgccaaccacugcggcaccguggccaacggcgugcugcagaccuucaugagaauggccuggggcggcagcuacaucgcccuggacagcggcugcggcagcugggacugcaucaugaccagcuaccaguaccugaucauccagaacaccaccugggaggaccacugccaguucagcagacccagccccaucggcuaccugggccugcugagccagagaaccagagacaucuacaucagcagaagacgccggggcaccuucaccuggacccugagcgacagcgagggcaaggacacccccggcggcuacugccugaccagauggaugcugaucgaggccgagcugaagugcuucggcaacaccgccguggccaagugcaacgagaagcacgacgaggaguucugcgacaugcugagacuguucgacuucaacaagcaggccauccagagacugaaggcccccgcccagaugagcauccagcugaucaacaaggccgugaacgcccugaucaacgaccagcugaucaugaagaaccaccugagagacaucaugugcauccccuacugcaacuacagcaaguacugguaccugaaccacaccaccaccggcaagaccagccugcccaagugcuggcuggugagcaacggcagcuaccugaacgagacccacuucagcgacgacaucgagcagcaggccgacaacaugaucaccgagaugcugcagaaggaguacauggagagacagggcaagaccccccugggccugguggaccuguucguguucagcaccagcuucuaccugaucagcaucuuccugcaccuggugaagauccccacccacagacacaucgugggcaagagcugccccaagccccacagacugaaccacaugggcaucugcagcugcggccuguacaagcagcccggcgugcccgugaaguggaagagaugaggacuagucccuguucccagagcccacuuuuuuuucuuuuuuugaaauaaaauagccugucuuucagaucucaaaggcucuuuucagagccaccaaaaaaaaaaaaaaaaaaaaaaaaaaaaaaaaaaaaaaaaaaaaaaaaaaaaaaaaaaaaaaaaagaauu

SEQ ID NO: 15295 - RNA, 1717 nt, Artificial Sequence
  mRNA product Design a-1 (hSL-A64-N5) comprising derived and/or modified sequence from LASV(G1442-SLE-2011;Clade IV)__AIT17180__GPCmut1 (opt4)
aggagagucccgcagucggcguccagcggcucugcuuguucgugugugugucguugcaggccuuauucaagcuuaccaugggccagaucgugaccuucuuccaggaggugccccacgugaucgaggaggugaugaacaucgugcugaucgcccugagcauccuggccgugcugaagggccuguacaacguggccaccugcggccugaucggccuggugaccuuccugcugcugugcggcagaagcugcaccaccacccuguacaagggcguguacgagcugcagacccuggagcugaacauggagacccugaacaugaccaugccccugagcugcaccaagaacaacagccaccacuacaucagagugggcaacgagaccggccuggagcugacccugaccaacaccagcaucaucaaccacaaguucugcaaccugagcgacgcccacaagaagaaccuguacgaccacgcccugaugagcaucaucagcaccuuccaccugagcauccccaacuucaaccaguacgaggccaugagcugcgacuucaacggcggcaagaucagcgugcaguacaaccugagccacagcuacgccggcgacgccgccaaccacugcggcaccguggccaacggcgugcugcagaccuucaugagaauggccuggggcggcagcuacaucgcccuggacagcggcugcggcaacugggacugcaucaugaccagcuaccaguaccugaucauccagaacaccaccugggacgaccacugccaguucagcagacccagccccaucggcuaccugggccugcugagccagagaaccagagacguguacaucagcagaagacgccggggcaccuucaccuggacccugagcgacagcgagggcaaggacacccccggcggcuacugccugaccagauggaugcugaucgaggccgagcugaagugcuucggcaacaccgccguggccaagugcaacgagaagcacgacgaggaguucugcgacaugcugagacuguucgacuucaacaagcaggccauccagagacugaaggcccccgcccagaugagcauccagcugaucaacaaggccgugaacgcccugaucaacgaccagcugaucaugaagaaccaccugagagacaucaugugcauccccuacugcaacuacagcaaguacugguaccugaacaacaccgccaccggcaagaccagccugcccaagugcuggcugaucagcaacggcagcuaccugaacgagacccacuucagcgacgacaucgagcaggaggccgacaacaugaucaccgagaugcugcagaaggaguacauggagagacagggcaagaccccccugggccugguggaccuguucguguucagcaccagcuucuaccugaucagcaucuuccugcaccuggugaagauccccacccacagacacaucgugggcaagagcugccccaagccccacagacugaaccacaugggcaucugcagcugcggccuguacaagcagcccggcgugcccgugagauggaagagaugaggacuagucccuguucccagagcccacuuuuuuuucuuuuuuugaaauaaaauagccugucuuucagaucucaaaggcucuuuucagagccaccaaaaaaaaaaaaaaaaaaaaaaaaaaaaaaaaaaaaaaaaaaaaaaaaaaaaaaaaaaaaaaaaagaauu

SEQ ID NO: 15296 - RNA, 1717 nt, Artificial Sequence
  mRNA product Design a-1 (hSL-A64-N5) comprising derived and/or modified sequence from LASV(G3010-SLE-2013;Clade IV)__AIT17344__GPCmut1 (opt4)
aggagagucccgcagucggcguccagcggcucugcuuguucgugugugugucguugcaggccuuauucaagcuuaccaugggccagaucgugaccuucuuccaggaggugccccacgugaucgaggaggugaugaacaucgugcugaucgcccugagcauccuggccgugcugaagggccuguacaacuucgccaccugcggccuggugggccuggugaccuuccugcugcugugcggcagaagcugcaccaccagccuguacaagggcguguacgagcugcagacccuggagcugaacauggagacccugaacaugaccaugccccugagcugcaccaagaacaacagccaccacuacaucauggugggcaacgagaccggccuggagcugacccugaccaacaccagcaucaucaaccacaaguucugcaaccugagcgacgcccacaagaagaaccuguacaaccacgcccugaugagcaucaucagcaccuuccaccugagcauccccaacuucaaccaguacgaggccaugagcugcgacuucaacggcggcaagaucagcgugcaguacaaccugagccacagcuacgccggcgacgccgccagccacugcggcaccguggccaacggcgugcugcagaccuucaugagaauggccuggggcggcagcuacaucgcccuggacagcggcugcggcaagugggacugcaucaugaccagcuaccaguaccugaucauccagaacaccaccugggaggaccacugccaguucagcagacccagccccaucggcuaccugggccugcugagccagagaaccagagacaucuacaucagcagaagacgccggggcaccuucaccuggacccugagcgacagcgagggcaaggacacccccggcggcuacugccugaccagauggaugcugaucgaggccgagcugaagugcuucggcaacaccgccguggccaagugcaacgagaagcacgacgaggaguucugcgacaugcugagacuguucgacuucaacaagcaggccauccagagacugaagacccccgcccagaugagcauccagcugaucaacaaggccgugaacgcccugaucaacgaccagcugaucaugaagaaccaccugagagacaucaugugcauccccuacugcaacuacagcaaguacugguaccugaaccacaccaccaccggcaagaccagccugcccaagugcuggcuggugagcaacggcagcuaccugaacgagacccacuucagcgacgacaucgagcagcaggccgacaacaugaucaccgagaugcugcagaaggaguacauggagagacagggcaagaccccccugggccugguggaccuguucguguucagcaccagcuucuaccugaucagcaucuuccugcaccuggugaagauccccacccacagacacaucgugggcaagagcugccccaagccccacagacugaaccacaugggcaucugcagcugcggccuguacaagcagcccggcgugcccgugagauggaagagaugaggacuagucccuguucccagagcccacuuuuuuuucuuuuuuugaaauaaaauagccugucuuucagaucucaaaggcucuuuucagagccaccaaaaaaaaaaaaaaaaaaaaaaaaaaaaaaaaaaaaaaaaaaaaaaaaaaaaaaaaaaaaaaaaagaauu

SEQ ID NO: 15297 - RNA, 1717 nt, Artificial Sequence
  mRNA product Design a-1 (hSL-A64-N5) comprising derived and/or modified sequence from LASV(G502-SLE-2009;Clade IV)__AIT17126__GPCmut1 (opt4)
aggagagucccgcagucggcguccagcggcucugcuuguucgugugugugucguugcaggccuuauucaagcuuaccaugggccagaucgugaccuucuuccaggaggugccccacgugaucgaggaggugaugaacaucgugcugaucgcccugagcauccuggccgugcugaagggccuguacaacuucgccaccugcggccuggugggccugcugaccuuccugcugcugugcggcagaagcugcaccaccggccuguacaagggcguguacgagcugcagacccuggagcugaacauggagacccugaacaugaccaugccccugagcugcaccaagaacaacagccaccacuacaucauggugggcaacgagaccggccuggagcugacccugaccaacaccagcaucaucaaccacaaguucugcaaccugagcgacgcccacaagaagaaccuguacgaccacgcccugaugagcaucaucagcaccuuccaccugagcauccccaacuucaaccaguacgaggccaugagcugcgacuucaacggcggcaagaucagcgugcaguacaaccugagccacagcuacgccggcgacgccgccgaccacugcggcaccguggccaacggcgugcugcagaccuucaugagaauggccuggggcggcagcuacaucgcccuggacagcggcugcggcagaugggacugcaucaugaccagcuaccaguaccugaucauccagaacaccaccugggaggaccacugccaguucagcagacccagccccaucggcuaccugggccugcugagccagagaaccagagacaucuacaucagcagaagacgccggggcaccuucaccuggacccugagcgacagcgagggcaaggacacccccggcggcuacugccugaccagauggaugcugaucgaggccgagcugaagugcuucggcaacaccgccguggccaagugcaacgagaagcacgacgaggaguucugcgacaugcugagacuguucgacuucaacaagcaggccauccagagacugaaggcccccgcccagaugagcauccagcugaucaacaaggccgugaacgcccugaucaacgaccagcuggugaugaagaaccaccugagagacaucaugugcauccccuacugcaacuacagcagauacugguaccugaaccacaccaccaccggcagaaccagccugcccaagugcuggcuggugagcaacggcagcuaccugaacgagacccacuucagcgacgacaucgagcagcaggccgacaacaugaucaccgagaugcugcagaaggaguacauggagagacagggcaagaccccccugggccugguggaccuguucguguucagcaccagcuucuaccugaucagcaucuuccugcaccuggugaagauccccacccacagacacaucgugggcaagagcugccccaagccccacagacugaaccacaugggcaucugcagcugcggccuguacaagcagcccggcgugcccgugaaguggaagagaugaggacuagucccuguucccagagcccacuuuuuuuucuuuuuuugaaauaaaauagccugucuuucagaucucaaaggcucuuuucagagccaccaaaaaaaaaaaaaaaaaaaaaaaaaaaaaaaaaaaaaaaaaaaaaaaaaaaaaaaaaaaaaaaaagaauu

SEQ ID NO: 15298 - RNA, 1717 nt, Artificial Sequence
  mRNA product Design a-1 (hSL-A64-N5) comprising derived and/or modified sequence from LASV(G733-SLE-2010;Clade IV)__AIT17154__GPCmut1 (opt4)
aggagagucccgcagucggcguccagcggcucugcuuguucgugugugugucguugcaggccuuauucaagcuuaccaugggccagaucgugaccuucuuccaggaggugccccacgugaucgaggaggugaugaacaucgugcugaucgcccugagcauccuggccgugcugaagggccuguacaacuucgccaccugcggcaucgugggccuggugagcuuccugcugcugugcggcagaagcugcaccaccagccuguacaagggcguguacgagcugcagacccuggagcugaacauggagacccugaacaugaccaugccccugagcugcaccaagaacaacagccaccacuacaucauggugggcaacgagaccggccuggagcugacccugaccaacaccagcaucaucaaccacaaguucugcaaccugagcgacgcccacaagaagaaccuguacgaccacgcccugaugagcaucaucagcaccuuccaccugagcauccccaacuucaaccaguacgaggccaugagcugcgacuucaacggcggcaagaucagcgugcaguacaaccugagccacagcuacgccggcgacgccgccaaccacugcggcaccaucgccaacggcgugcugcagaccuucaugagaauggccuggggcggcagcuacaucgcccuggacagcggcugcgacagaugggacugcaucaugaccagcuaccaguaccugaucauccagaacaccaccugggaggaccacugccaguucagcagacccagccccaucggcuaccugggccugcugagccagagaaccagagacaucuacaucagcagaagacgccggggcaccuucaccuggacccugagcgacagcgagggcaaggacacccccggcggcuacugccugaccagauggaugcugaucgaggccgagcugaagugcuucggcaacaccgccguggccaagugcaacgagaagcacgacgaggaguucugcgacaugcugagacuguucgacuucaacaagcaggccauccagagacugaaggcccccgcccagaugagcauccagcugaucaacaaggccgugaacgcccugaucaacgaccagcugaucaugaagaaccaccugagagacaucaugugcauccccuacugcaacuacagcaaguacugguaccugaaccacaccaccaccggcaagaccagccugcccaagugcuggcuggugagcaacggcagcuaccugaacgagacccacuucagcgacgacaucgagcagcaggccgacaacaugaucaccgagaugcugcagaaggaguacauggagagacagggcaagaccccccugggccugguggaccuguucguguucagcaccagcuucuaccugaucagcaucuuccugcaccuggugaagauccccacccacagacacguggugggcaagagcugccccaagccccacagacugaaccacaugggcaucugcagcugcggccuguacggccagcccggcgugcccgugaaguggaagagaugaggacuagucccuguucccagagcccacuuuuuuuucuuuuuuugaaauaaaauagccugucuuucagaucucaaaggcucuuuucagagccaccaaaaaaaaaaaaaaaaaaaaaaaaaaaaaaaaaaaaaaaaaaaaaaaaaaaaaaaaaaaaaaaaagaauu

SEQ ID NO: 15299 - RNA, 1717 nt, Artificial Sequence
  mRNA product Design a-1 (hSL-A64-N5) comprising derived and/or modified sequence from MOPV/LASV reassortant(IGS-1;Clade IV)__AFY05576__GPCmut1 (opt4)
aggagagucccgcagucggcguccagcggcucugcuuguucgugugugugucguugcaggccuuauucaagcuuaccaugggccagaucgugaccuucuuccaggaggugccccacgugaucgaggaggugaugaacaucgugcugaucgcccugagcgugcuggccgugcugaagggccuguacaacuucgccaccugcggccuggugggccuggugaccuuccugcugcugugcggcagaagcugcaccaccagccuguacaagggcguguacgagcugcagacccuggagcugaacauggagacccugaacaugaccaugccccugagcugcaccaagaacaacagccaccacuacaucauggugggcaacgagaccggccuggagcugacccugaccaacaccagcaucaucaaccacaaguucugcaaccugagcgacgcccacaagaagaaccuguacgaccacgcccugaugagcaucaucagcaccuuccaccugagcauccccaacuucaaccaguacgaggccaugagcugcgacuucaacggcggcaagaucagcgugcaguacaaccugagccacagcuacgccggcgacgccgccaaccacugcggcaccguggccaacggcgugcugcagaccuucaugagaauggccuggggcggcagcuacaucgcccuggacagcggcugcggcaacugggacugcaucaugaccagcuaccaguaccugaucauccagaacaccaccugggaggaccacugccaguucagcagacccagccccaucggcuaccugggccugcugagccagagaaccagagacaucuacaucagcagaagacgccggggcaccuucaccuggacccugagcgacagcgagggcgaggacacccccggcggcuacugccugaccagauggaugcugaucgaggccgagcugaagugcuucggcaacaccgccguggccaagugcaacgagaagcacgacgaggaguucugcgacaugcugagacuguucgacuucaacaagcaggccauccagagacugaaggcccccgcccagaugagcauccagcugaucaacaaggccgugaacgcccugaucaacgaccagcugaucaugaagaaccaccugagagacaucaugugcauccccuacugcaacuacagcaaguacugguaccugaaccacaccaccaccggcagaaccagccugcccaagugcuggcuggugagcaacggcagcuaccugaacgagacccacuucagcgacgacaucgagcagcaggccgacaacaugaucaccgagaugcugcagaaggaguacauggagagacagggcaagaccccccugggccugguggaccuguucguguucagcaccagcuucuaccugaucagcaucuuccugcaccuggugaagauccccacccacagacacaucgugggcaagagcugccccaagccccacagacugaaccacaugggcaucugcagcugcggccuguacaagcagcccggcgugcccgugaaguggaagagaugaggacuagucccuguucccagagcccacuuuuuuuucuuuuuuugaaauaaaauagccugucuuucagaucucaaaggcucuuuucagagccaccaaaaaaaaaaaaaaaaaaaaaaaaaaaaaaaaaaaaaaaaaaaaaaaaaaaaaaaaaaaaaaaaagaauu

SEQ ID NO: 15300 - RNA, 1717 nt, Artificial Sequence
  mRNA product Design a-1 (hSL-A64-N5) comprising derived and/or modified sequence from LASV(LM765-SLE-2012;Clade IV)__AIT17814__GPCmut1 (opt4)
aggagagucccgcagucggcguccagcggcucugcuuguucgugugugugucguugcaggccuuauucaagcuuaccaugggccagaucgugaccuucuuccaggaggugccccacgugaucgaggaggugaugaacaucgugcugaucgcccugagcauccuggccgugcugaagggccuguacaacuucgccaccugcggccuggugggccuggugaccuuccugcugcugugcggcagaagcugcaccaccagccuguacaagggcguguacgagcugcagacccuggagcugaacauggagacccugaacaugaccaugccccugagcugcaccaagaacaacagccaccacuacaucauggugggcaacgagaccggccuggagcugacccugaccaacaccagcaucaucgaccacaaguucugcaaccugagcgacgcccacagaaagaaccuguacgaccacgcccugaugagcaucaucagcaccuuccaccugagcauccccaacuucaaccaguacgaggccaugagcugcgacuucaacggcggcaagaucagcgugcaguacaaccugagccacagcuacgccaaggacgccgccgaccacugcggcaccguggccaacggcgugcugcagaccuucaugagaauggccuggggcggcagcuacaucgcccuggacagcggcugcggcagaugggacugcaucaugaccagcuaccaguaccugaucauccagaacaccaccugggaggaccacugccaguucagcagacccagccccaucggcuaccugggccugcugagccagagaaccagagacaucuacaucagcagaagacgccggggcaccuucaccuggacccugagcgacagcgagggcaaggacacccccggcggcuacugccugaccagauggaugcugaucgaggccgagcugaagugcuucggcaacaccgccguggccaagugcaacgagaagcacgacgaggaguucugcgacaugcugagacuguucgacuucaacaagcaggccauccagagacugaaggcccccgcccagaugagcauccagcugaucaacaaggccgugaacgcccugaucaacgaccagcugaucaugaagaaccaccugagagacaucaugugcauccccuacugcaacuacagcaaguacugguaccugaaccacaccaccaccggcaagaccagccugcccaagugcuggcuggugagcaacggcagcuaccugaacgagacccacuucagcgacgacaucgagcagcaggccgacaacaugaucaccgagaugcugcagaaggaguacauggagagacagggcaagaccccccugggccugguggaccuguucguguucagcaccagcuucuaccugaucagcaucuuccugcaccuggugaagauccccacccacagacacaucgugggcaagcccugccccaagccccacagacugaaccacaugggcaucugcagcugcggccuguacaagcagcccggcgugcccgugaaguggaagagaugaggacuagucccuguucccagagcccacuuuuuuuucuuuuuuugaaauaaaauagccugucuuucagaucucaaaggcucuuuucagagccaccaaaaaaaaaaaaaaaaaaaaaaaaaaaaaaaaaaaaaaaaaaaaaaaaaaaaaaaaaaaaaaaaagaauu

SEQ ID NO: 15301 - RNA, 1717 nt, Artificial Sequence
  mRNA product Design a-1 (hSL-A64-N5) comprising derived and/or modified sequence from LASV(LM776-SLE-2012;Clade IV)__AIT17824__GPCmut1 (opt4)
aggagagucccgcagucggcguccagcggcucugcuuguucgugugugugucguugcaggccuuauucaagcuuaccaugggccagaucgugaccuucuuccaggaggugccccacgugaucgaggaggugaugaacaucgugcugaucgcccugagcauccuggccgugcugaagggccuguacaacuucgccaccugcggccuggugggccuggugaccuuccugcugcugugcggcagaagcugcaccaccagcguguacaagggcguguacgagcugcagacccuggagcugaacauggagacccugaacaugaccaugccccugagcugcaccaagaacaacagccaccacuacaucauggugggcaacgagaccggccuggagcugacccugaccaacaccagcaucaucaaccacaaguucugcaaccugagcgacgcccacaagaagaaccuguacgaccacgcccugaugagcaucaucagcaccuuccaccugagcauccccaacuucaaccaguacgaggccaugagcugcgacuucaacggcggcaagaucagcgugcaguacaaccugagccacagcuacgccggcgacgccgccaaccacugcggcaccguggccaacggcgugcugcagaccuucaugagaauggccuggggcggcagcuacaucgcccuggacagcggcugcggcaagugggacugcaucaugaccagcuaccaguaccugaucauccagaacaccaccugggaggaccacugccaguucagcagacccagccccaucggcuaccugggccugcugagccagagaaccagagacaucuacaucagcagaagacgccggggcaccuucaccuggacccugagcgacagcgagggcaaggacacccccggcggcuacugccugaccagauggaugcugaucgaggccgagcugaagugcuucggcaacaccgccguggccaagugcaacgagaagcacgacgaggaguucugcgacaugcugagacuguucgacuucaacaagcaggccauccagagacugaaggcccccgcccagaugagcauccagcugaucaacaaggccgugaacgcccugaucaacgaccagcugaucaugaagaaccaccugagagacaucaugugcauccccuacugcaacuacagcaaguacugguaccugaaccacaccaccaccggcaagaccagccugcccaagugcuggcuggugagcaacggcagcuaccugaacgagacccacuucagcgacgacaucgagcagcaggccgacaacaugaucaccgagaugcugcagaaggaguacauggagagacagggcaagaccccccugggccugguggaccuguucguguucagcaccagcuucuaccugaucagcaucuuccugcaccuggugaagauccccacccacagacacaucgugggcaagagcugccccaagccccacagacugaaccacaugggcaucugcagcugcggccuguacaagcagcccggcgugcccgugagauggaagagaugaggacuagucccuguucccagagcccacuuuuuuuucuuuuuuugaaauaaaauagccugucuuucagaucucaaaggcucuuuucagagccaccaaaaaaaaaaaaaaaaaaaaaaaaaaaaaaaaaaaaaaaaaaaaaaaaaaaaaaaaaaaaaaaaagaauu

SEQ ID NO: 15302 - RNA, 1717 nt, Artificial Sequence
  mRNA product Design a-1 (hSL-A64-N5) comprising derived and/or modified sequence from LASV(Mad39;Clade IV)__ANH09722__GPCmut1 (opt4)
aggagagucccgcagucggcguccagcggcucugcuuguucgugugugugucguugcaggccuuauucaagcuuaccaugggccagaucgugaccuucuuccaggaggugccccacgugaucgaggaggugaugaacaucgugcugaucgcccugagcauccuggccgugcugaagggccuguacaacguggccaccugcggccugaucggccuggugaccuuccugcugcugugcggcagaagcugcaccaccacccuguacaagggcguguacgagcugcaggcccuggagcugaacauggagacccugaacaugaccaugccccugagcugcaccaagaacaacagccaccacuacaucagagugggcaacgagaccggccuggagcugacccugaccaacaccagccugaucaaccacaaguucugcaaccugagcgacgcccacaagaagaaccuguacgaccacgcccugaugagcaucaucagcaccuuccaccugagcauccccaacuucaaccaguacgaggccaugagcugcgacuucaacgacggcaagaucagcgugcaguacaaccugagccacaccuacgccggcgacaccgccaaccacugcggcaccguggccaacggcgugcugcagaccuucaugagaauggccuggggcggcagcuacaucgcccuggacagcggcugcggcggcugggacugcaucaugaccagcuaccaguaccugaucauccagaacaccaccugggaggaccacugccaguucagcagacccagccccaucggcuaccugggccugcugagccagagaaccagagacaucuacaucagcagaagacgccggggcaccuucaccuggacccugagcgacagcgagggcaaggacacccccggcggcuacugccugaccagauggaugcugaucgaggccgagcugaagugcuucggcaacaccgccguggccaagugcaacgagaagcacgacgaggaguucugcgacaugcugagacuguucgacuucaacaagcaggccauccagagacugaaggcccccgcccagaugagcauccagcugaucaacaaggccgugaacgcccugaucaacgaccagcugaucaugaagaaccaccugagagacaucaugugcauccccuacugcaacuacagcaaguacugguaccugaaccacaccgugaccggcaagaccagccugcccaagugcuggcuggugagcaacggcagcuaccugaacgagacccacuucagcgacgacaucgagcagcaggccgacaacaugaucaccgagaugcugcagaaggaguacauggagagacagggcaagaccccccugggccugguggaccuguucguguucagcaccagcuucuaccugaucagcaucuuccugcaccuggugaagauccccacccacagacacguggugggcaagcccugccccaagccccacagacugaaccacaugggcaucugcagcugcggcuucuacaagcagcccggcgugcccgugagauggaagagaugaggacuagucccuguucccagagcccacuuuuuuuucuuuuuuugaaauaaaauagccugucuuucagaucucaaaggcucuuuucagagccaccaaaaaaaaaaaaaaaaaaaaaaaaaaaaaaaaaaaaaaaaaaaaaaaaaaaaaaaaaaaaaaaaagaauu

SEQ ID NO: 15303 - RNA, 1717 nt, Artificial Sequence
  mRNA product Design a-1 (hSL-A64-N5) comprising derived and/or modified sequence from LASV(Z0947-SLE-2011;Clade IV)__AIT17840__GPCmut1 (opt4)
aggagagucccgcagucggcguccagcggcucugcuuguucgugugugugucguugcaggccuuauucaagcuuaccaugggccagaucgugaccuucuuccaggaggugccccacgugaucgaggaggugaugaacaucgugcugaucgcccugagcauccuggccgugcugaagggccuguacaacuucgccaccugcggccuggugggccuggugaccuuccugcugcugugcggcagaagcugcaccaucagccuguacaagggcguguacgagcugcagacccuggagcugaacauggagacccugaacaugaccaugccccugagcugcaccaagaacaacagccaccacuacaucauggugggcaacgagaccggccuggagcugacccugaccaacaccagcaucaucaaccacaaguucugcaaccugagcgacgcccacaagaagaaccuguacgaccacgcccugaugagcaucaucagcaccuuccaccugagcauccccaacuucaaccaguacgaggccaugagcugcgacuucaacggcggcaagaucagcgugcaguacaaccugagccacagcuacgccggcgacgccgccaaccacugcggcaccguggccaacggcgugcugcagaccuucaugagaauggccuggggcggcagcuacaucgcccuggacagcggcugcgacagaugggacugcaucaugaccagcuaccaguaccugaucauccagaacaccaccugggaggaccacugccaguucagcagacccagccccaucggcuaccugggccugcugagccagagaaccagagacaucuacaucagcagaagacgccggggcaccuucaccuggacccugagcgacagcgagggcaaggacacccccggcggcuacugccugaccagauggaugcugaucgaggccgagcugaagugcuucggcaacaccgccguggccaagugcaacgagaagcacgacgaggaguucugcgacaugcugagacuguucgacuucaacaagcaggccauccagagacugaaggcccccgcccagaugagcauccagcugaucaacaaggccgugaacgcccugaucaacgaccagcugaucaugaagaaccaccugagagacaucaugugcauccccuacugcaacuacagcaaguacugguaccugaaccacaccaccaccggcaagaccagccugcccaagugcuggcuggugagcaacggcagcuaccugaacgagacccacuucagcgacgacaucgagcagcaggccgacaacaugaucaccgagaugcugcagaaggaguacauggagagacagggcaagaccccccugggccugguggaccuguucguguucagcaccagcuucuaccugaucagcaucuuccugcaccuggugaagauccccacccacagacacaucgugggcaagcccugccccaagccccacagacugaaccacaugggcaucugcagcugcggccuguacaagcagcccggcgugcccgugaaguggaagagaugaggacuagucccuguucccagagcccacuuuuuuuucuuuuuuugaaauaaaauagccugucuuucagaucucaaaggcucuuuucagagccaccaaaaaaaaaaaaaaaaaaaaaaaaaaaaaaaaaaaaaaaaaaaaaaaaaaaaaaaaaaaaaaaaagaauu

SEQ ID NO: 15304 - RNA, 1717 nt, Artificial Sequence
  mRNA product Design a-1 (hSL-A64-N5) comprising derived and/or modified sequence from LASV(Josiah;Clade IV)__NP_694870__GPCmut1 (opt5)
aggagagucccgcagucggcguccagcggcucugcuuguucgugugugugucguugcaggccuuauucaagcuuaccaugggccagaucgugaccuucuuucaagaggucccccacguuauugaagaggugaugaacaucgugcugauugcccucagcguccuggcugugcuuaaggggcuguacaauuucgccacaugcggacucguuggccuggugacguuucuucugcucugugggagauccugcaccacaucucuguauaaaggagucuacgaacugcagacccucgagcugaacauggaaacacuuaauaugaccaugccucugagcuguacaaagaacaauucccaucacuauaucauggugggcaacgagaccgggcucgagcugacgcuuaccaauacaucuauuaucaaccauaaauucugcaaucugagcgacgcgcacaagaaaaaccucuacgaucaugcucugauguccaucauuucuaccuuucaccugagcaucccgaauuucaaccaguaugaagccauguccugugacuuuaauggaggcaagauuagcguucaguacaaccucucucacuccuaugccggcgaugcugccaaucauugcgggacaguggcuaacggaguccugcaaaccuucaugcggauggccuggggcgggagcuacaucgcgcuugacucuggaugcggcaacugggauuguauuaugacguccuaccaguaucugaucauucagaauacaaccugggaggaccacugccaguuuagcagacccucuccuaucggguaccucggacugcuuucccaacggacacgcgauaucuauauuagcagacggcgccggggcaccuucaccuggacacuguccgacucugaaggcaaggauacgcccgggggauacugucugacccgcuggaugcucaucgaggccgagcugaaaugcuuuggcaacacagcuguggccaaguguaaugaaaaacaugacgaggaguucugcgauaugcuuagacuguuugacuucaacaagcaggcuauucagcggcucaaagcccccgcgcagaugagcauccaacugauuaauaaggccgugaacgcucuuaucaaugaucagcugaucaugaagaaccaccuccgcgacauuaugugcaucccuuauugcaauuacuccaaauauugguaccugaaccacaccacaaccggaagaacgagccugcccaaguguuggcucgucucuaauggcuccuaccugaacgaaacacauuucagcgacgauauugagcagcaagccgacaauaugaucaccgagaugcuucagaaagaauauauggagcggcaggggaagaccccucugggacucguugaucuguuuguguucucuaccagcuuuuaccugauuuccaucuuccuucaccucgugaaaaucccgacacaucgccacauugucggcaagucuugccccaaaccucauagacugaaccacaugggcaucuguagcugcgggcuguauaagcagcccggagugccuguuaaguggaaacggugaggacuagucccuguucccagagcccacuuuuuuuucuuuuuuugaaauaaaauagccugucuuucagaucucaaaggcucuuuucagagccaccaaaaaaaaaaaaaaaaaaaaaaaaaaaaaaaaaaaaaaaaaaaaaaaaaaaaaaaaaaaaaaaaagaauu

SEQ ID NO: 15305 - RNA, 1714 nt, Artificial Sequence
  mRNA product Design a-1 (hSL-A64-N5) comprising derived and/or modified sequence from LASV(LP;Clade I)__AAF86701__GPCmut1 (opt5)
aggagagucccgcagucggcguccagcggcucugcuuguucgugugugugucguugcaggccuuauucaagcuuaccaugggccagaucauuaccuucuuucaagaggugccccacgucaucgaagagguuaugaacauugugcugaucgcccucagccugcuugcuauucugaaggggcucuacaauaucgccacaugcggaaucauuggccugguggcguuccuuuuucugugugggaaauccugcucucucacgcugaagggaggcuaugaacugcagacccucgagcugaacauggaaacacuuaauaugaccaugccucugagcuguaccaaaaacuccucucaucacuacaucagagucgggaaugagacaggacucgagcugacacuuaccaacacgagcauuaucaaucauaaguucugcaaccuguccgacgcucacaaaaagaaucucuaugaucaugcccugaugucuauuaucagcaccuuucaccuguccauuccgaacuucaaucaguacgaagccaugagcugugacuuuaacggcggcaagaucucugugcaguauaaucucucccacagcuacgcuggggaugccgcugagcauugcggaacaguugccaacggcgugcugcaaaccuucaugcggauggcguggggagggcgcuauaucgcccuugacucuggcugcgggaauugggauuguauuaugacauccuaccaguaccugaucauucagaacaccacgugggaagaccacugccaguuuagcagacccucuccuaucggauaucucggccugcuuucccaacggacacgcgauauuuacaucagcagacggcgccggggcaccuucacauggacccuguccgacucugaggggaacgagacccccggaggcuauugucugacacgcuggaugcucaucgaagcugagcugaagugcuuugggaauacggccgucgcuaaauguaacgaaaagcaugaugaggaguucugcgacaugcuuagacuguuugauuucaauaaacaggccauucggcgccucaaggcgcccgcccagaugagcauccagcugauuaacaaggcugugaaugcccuuaucaacgaccaacugauuaugaaaaaucaccucagagauaucaugugcaucccuuacugcaacuauuccaaguacugguaucugaaucacaccagcucuggccggacaucccugcccaaauguuggcucauuagcaacgggucuuaccugaaugagacccaguucagcgacgacaucgaacagcaagcugauaacaugauuacagagaugcuucagaaggaauacaucgagcgccagggaaaaaccccucugggccucguugacauuuuuaucuucuccacgucuuuuuaucugauuagcaucuuccugcaucuuaucaagauuccgacacacagacauaucgugggcaaacccugcccuaagccccaccggcucaaucauaugggggucuguuccugcggacuguacaagcacccuggcgugcccaccaaauggaagcgcugaggacuagucccuguucccagagcccacuuuuuuuucuuuuuuugaaauaaaauagccugucuuucagaucucaaaggcucuuuucagagccaccaaaaaaaaaaaaaaaaaaaaaaaaaaaaaaaaaaaaaaaaaaaaaaaaaaaaaaaaaaaaaaaaagaauu

SEQ ID NO: 15306 - RNA, 1714 nt, Artificial Sequence
  mRNA product Design a-1 (hSL-A64-N5) comprising derived and/or modified sequence from LASV(803213;Clade II)__AAF86703__GPCmut1 (opt5)
aggagagucccgcagucggcguccagcggcucugcuuguucgugugugugucguugcaggccuuauucaagcuuaccaugggccagaucauuaccuucuuucaagaggugccccacgucaucgaagagguuaugaacauugugcugaucgcccucagccugcuugcuauucugaaggggaucuacaauguggccacaugcggacucuucggccugaucuccuuucuucugcucugugggagaucuugcagcgucacguauaaaggaguguacgaacugcagacccuggagcucaacauggcgaaucugaacaugacaaugccucuuuccuguaccaagaauaacucucaucacuauauuaugguuggcaaugaaacagggcuggagcucacccugacaaacaccagcaucauuaaucauaaauucugcaaccuuuccgacgcucacaagaaaaaucuguacgaucaugcccucaugucuaucauuagcacguuucaccuguccaucccgaacuucaaucaguaugaggccaugagcugugacuuuaacggaggcaagauuucugugcaguacaaucugucccacagcuucgcugucgaugccgcuaaccauugcggcaccaucgccaacggggugcuccaaacauuuaugcggauggcguggggaggcucuuauaucgcccuggacuccgggugcggaaauugggauuguauuaugaccagcuaccaguaccuuaucauucagaacacaaccugggaagaccacugccaguucucucgccccuccccuaucggcuaucuggggcuccugagccaaagaacgcgggauauuuacaucucccgcagacgccggggaacauuuaccuggacacucucugacagcgagggcaaugaagcucccggcggguauugucugacccgguggaugcugaucgaggccgagcucaaaugcuucggaaacaccgcuguugccaaguguaaugaaaaacaugaugaggaauuuugcgacaugcugcgccuuuucgauuucaacaagcaggcgauuaaaagacugaagacacccgcccagauguccauccagcucauuaauaaggcugugaacgcccugaucaaugaccaacuuauuaugaaaaaccaucugcgggauaucaugugcaucccuuacugcaauuauagccgcuacugguaucucaaccacacggucaccgggaagacaucucugcccagauguuggcugguguccaauggaagcuaccucaacgaaacccacuuuucugacgacauugagcagcaggcugauaauaugaucacagagaugcugcaaaaagaauacauggaccggcagggcaagaccccucuugggcugguggaucucuucgucuuuagcacguccuucuaucugauuucuaucuuucugcaccuuguuaaaauuccgacacaucgccacaucgugggaaagcccugcccuaaaccccauagacucaaccacaugggcauuuguagcugcggccuguacaagcacccuggggugcccgucaaguggaaacggugaggacuagucccuguucccagagcccacuuuuuuuucuuuuuuugaaauaaaauagccugucuuucagaucucaaaggcucuuuucagagccaccaaaaaaaaaaaaaaaaaaaaaaaaaaaaaaaaaaaaaaaaaaaaaaaaaaaaaaaaaaaaaaaaagaauu

SEQ ID NO: 15307 - RNA, 1714 nt, Artificial Sequence
  mRNA product Design a-1 (hSL-A64-N5) comprising derived and/or modified sequence from LASV(GA391;Clade III)__CAA36645__GPCmut1 (opt5)
aggagagucccgcagucggcguccagcggcucugcuuguucgugugugugucguugcaggccuuauucaagcuuaccaugggccagaucgugaccuucuuucaagaggucccccacguuauugaagaggugaugaacaucgugcugauugcccucagcauccuggcuauucuuaaggggcuguacaaugucgccacaugcggacucaucggccuggugacguuccuucugcucuccgggagaucuuguagccugaucuauaaaggaaccuacgaacugcagacacucgagcugaacauggaaacccuuaauaugacaaugccucuguccugcaccaagaacaauucucaucacuauauucggguuggcaacgagacagggcucgagcugacccuuacgaauaccagcauccugaaccauaaauuuuguaaucucuccgacgcgcacaagcgcaaccuguacgaucauucucugaugagcauuaucuccacauuccaccucagcauuccgaauuuuaaccaguaugaagcuaugucuugcgacuucaauggaggcaaaaucaccgugcaguacaaccugucccacagcuuugccgucgaugccgcuggccauugugggacacuugccaauggagugcugcaaaccuucaugagaauggcuuggggcgggucuuauauugcccucgacuccggaugcggcaacugggauugcaucaugacgagcuaccaguaccugaucauucagaacacaaccugggacgaucacugucaguuuucucgccccuccccuaucggguaucuuggacugcucagccaaagaacacgggacauuuacaucucccgcagacgccggggcaccuucaccuggacacucucugauagcgagggcaaugaaacgcccgggggauauugccugacccgguggaugcuuauugaggcggagcugaaguguuuuggcaacacagccguugcuaagugcaaugaaaaacaugacgaggaguucugugauaugcuccgccuguuugacuucaacaagcaggccaucagacggcuuaaaacccccgcucagauguccauccagcugauuaauaaggccgugaacgcgcucaucaaugaucaacugauuaugaaaaaccaucugcgcgacaucaugugcauuccuuacugcaauuauagcagauacugguaucucaaccacacaucuaccggaaagacgucccugccccggugcuggcuuaucagcaauggcucuuaccugaacgaaacaaaguucagcgacgauaucgagcagcaggccgacaauaugauuaccgagaugcuccaaaaagaauacaucgaucgccaggggaagaccccucugggacuggucgaccuuuuuguguucuccacaucuuuuuaucucauuagcaucuuccugcaccuggugaaaauuccgacccacagacauaucgucggcaagcccuguccuaaaccccaccggcucaaccauaugggcauuugcuccugugggcuguacaagcagccuggaguucccgugagauggaaacgcugaggacuagucccuguucccagagcccacuuuuuuuucuuuuuuugaaauaaaauagccugucuuucagaucucaaaggcucuuuucagagccaccaaaaaaaaaaaaaaaaaaaaaaaaaaaaaaaaaaaaaaaaaaaaaaaaaaaaaaaaaaaaaaaaagaauu

SEQ ID NO: 15308 - RNA, 1717 nt, Artificial Sequence
  mRNA product Design a-1 (hSL-A64-N5) comprising derived and/or modified sequence from LASV(AV;Clade V)__CCA30314__GPCmut1 (opt5)
aggagagucccgcagucggcguccagcggcucugcuuguucgugugugugucguugcaggccuuauucaagcuuaccaugggccagaucgugaccuucuuucaagaggucccccacguuauugaagaggugaugaacaucgugcugauugcccucagcauccuggcuguccuuaaggggcuguacaauauugccacaugcggacucaucggccugaucacguuccuucugcucugugggagauccugcucuagcaaccuguauaaaggaguguacgaacugcagucccucgaccugaauauggagacccuuaacaugacaaugccucugucuuguaccaagaauaacagccaucacuauauucggguuggcaaugauacagggcucgaacugacccuuacaaacaccuccauccugaaucauaaauuuugcaaccucucugacgcgcacaagaaagaucuguacgaccaugcucugaugagcauuaucuccacguuccaccucagcauuccgaauuuuaaccaguaugaggccaugucuugugauuucaauggaggcaagaucuccgugcaguacaaccugagccacucuuaugccauugacgcugccaaucauugcggcaccgucgcuaacgggauccuucaaacauuuaugcgcauggccuggggaggcuccuacaucgcgcuggauagcgggugcggaaacugggacuguauuaugaccucuuaccaguaucucaucauucagaauacaaccugggagaaccacugccaguucucccggcccagcccuaucggcuaccuggggcuucugucccaacgcacgagagauauuuauaucucucggcgccgccggggaacauuuaccuggacacugagcgacuccgaaggcaaugccacccccggcggguacugucucaccagauggaugcugaucgaggcugaacuuaagugcuucggaaacacagccguggcuaaauguaaugagaagcaugaugaggaauuuugcgacaugcugcgccucuucgauuuuaacaaacaggccauuagccggcugaagucucccgcgcagauguccauccagcuuauuaauaaagccguuaacgcucugaucaaugaccaacucauuaugaagaaccaccugagagacaucaugugcaucccuuauugcaauuacagcaaguauugguaccugaaccacacgauuaccgggaaaacaucucuccccaaguguuggcuggugagcaauggauccuaccuuaacgaaacccauuucucugaugacaucgagcagcaggccgauaauaugauuacagaaaugcugcaaaaagaguauauggagcggcagggcaagaccccucucgggcuggucgaccuguucguguuuagcacguccuucuaccuuaucagcauuuuucuccgccuggugaaaaucccgacacacagacauauugucggaaagcccugcccuaaaccccaccggcugaaccauaugggcaucuguucuugcggccucuauaagcagccugggguucccgugcgcuggaagagaugaggacuagucccuguucccagagcccacuuuuuuuucuuuuuuugaaauaaaauagccugucuuucagaucucaaaggcucuuuucagagccaccaaaaaaaaaaaaaaaaaaaaaaaaaaaaaaaaaaaaaaaaaaaaaaaaaaaaaaaaaaaaaaaaagaauu

SEQ ID NO: 15309 - RNA, 1714 nt, Artificial Sequence
  mRNA product Design a-1 (hSL-A64-N5) comprising derived and/or modified sequence from LASV(Togo/2016/7082;Clade VI)__AMR44577__GPCmut1 (opt5)
aggagagucccgcagucggcguccagcggcucugcuuguucgugugugugucguugcaggccuuauucaagcuuaccaugggccagaucauuaccuucuuucaagaggugccccacgucaucgaagagguuaugaacauugugcugaucgcccucagccugcuugcuauucugaaggggguguacaaugucgccacaugcggaaucaucggccucgugacguuccuguuucuuugugggagauccugcucucugauuuauaaaggaagcuacgaacuccagacccuggagcugaacauggaaacacucaauaugaccaugccucuguccuguacaaagaacucuagccaucacuauauccggguuggcaaugagaccgggcuugagcugacacucaccaacacguccauuaucaaucauaaauucugcaaccugucugacgcgcacaagcgcaaucuuuacgaucaugcucugaugagcauucucuccaccuuucaccugagcaucccgaacuucaaucaguaugaagccaugucuugugacuuuaacggaggcaaaauuuccgugcaguacaaucugagccacgccuaugcugucgaugccgcugagcauugcggcacaguggccaacgggguucuccaaaccuucaugagaauggcguggggaggcucuuacaucgcccuggacuccgggugcggaaauugggauuguaucaugacaagcuaccaguaucuuauuauccagaacaccacgugggaagaccacugccaguuuucucgccccuccccuauuggcuaccuggggcuccugagccaaagaacacgggauaucuauauuucccgcagacgccggggaaccuucacauggacccucucugacagcgagggcaacgagacccccggcggguacugucugacacgguggaugcugaucgaagcugagcucaagugcuuuggaaauacggccguggcuaaguguaacgaaaaacaugaugaggaguucugcgacaugcugcgccuuuuugauuucaauaagcaggccauccagagacugaaaucccccgcgcagaugagcauucaacucaucaacaaggccgucaaugcucugauuaacgaccagcuuaucaugaaaaaucaucugcgggauaugaugugcauuccuuauugcaacuacucuaaguauugguaccucaaucacaccuccagcgggcgcacaucucugcccaaguguuggcuggugagcaacggauccuaccucaaugagacccacuucucugacgacaucgaacagcaagccgauaacaugaucacagagaugcugcagaaagaauauauugacagacagggcaagaccccucuugggcugguggaucucuuugucuucagcacguccuuuuaccugaucagcauuuuccugcaccuuaucaaaauuccgacacaucggcacaucguuggaaagcccugcccuaaaccccaucgccucaaucacaugggcauuuguucuugcggccuguauaagcagccuggggugcccaccagauggaaacggugaggacuagucccuguucccagagcccacuuuuuuuucuuuuuuugaaauaaaauagccugucuuucagaucucaaaggcucuuuucagagccaccaaaaaaaaaaaaaaaaaaaaaaaaaaaaaaaaaaaaaaaaaaaaaaaaaaaaaaaaaaaaaaaaagaauu

SEQ ID NO: 15310 - RNA, 1714 nt, Artificial Sequence
  mRNA product Design a-1 (hSL-A64-N5) comprising derived and/or modified sequence from LASV(KAK-428;Clade n.d. (VII))__ANH09740__GPCmut1 (opt5)
aggagagucccgcagucggcguccagcggcucugcuuguucgugugugugucguugcaggccuuauucaagcuuaccaugggccagaucgugaccuucuuucaagaggucccccacguuauugaagaggugaugaacaucgugcugauugcccucagccugcuugcuauccugaaggggcucuacaauuucgccacaugcggagucauuggccugaucacguuucuucugcucugugggagauccugcucugcgaccuauaaaggacaguacgaacugcagacacuggagcucaacauggaaagccugaauaugaccaugccucuuuccuguacaaagaacaauucucaucacuauauccgggcuggcaacaauaccgggcuggagcucacacugaccaacacgagcauuaucucccauaaauucugcaaucuuucugacgcccacaagaaaaaccuguacgaucauacccucaugagcauuaucacaaccuuucaccuguccauuccgaauuucaaccaguaugaggccaugagcugugacuuuaauggaggcaagaucucuauucaauacaaccugucccacagcuaugcuggcgaugccgcucagcauugcgggacaguggccaauggaguucuccagaccuucaugcgcauggcguggggcgggucuuaccuggcccuugacuccggaugccggggcugggauuguaucaucagcucuuaccaguaucugauuauccaaaacacgacaugggacgaucacugccaguuuucccgccccagcccuauuggguaccucggauucgugucccagaagaccagagacaucuauauuucucggcgccgccggggcacauuuaccuggacccugagcgauuccgaaggccaugacaugcccgggggauacugucucacaagauggaugcugaucgaggcugaucugaaaugcuucggcaacacggccgucgcuaaguguaaugaaaaacacgacgaggaguuuugcgauauguggcgccucuucgacuucaacaagcaggccauccaacggcugaaagcgcccgcccagaugaauauucagcuuaucaacaaggcugugaaugcccugauuaacgaccaacucaugaugaagaaucaccugagagauaucaugugcauuccuuauugcaacuacagcaaauuuugguaucuuaauaacaccacaaccggacggacaucucugccccgcuguuggcucaucuccaauggcagcuaccugaacgagacccauuucucugacgauaucgaacagcaggcugacaauaugauuacggagaugcugcagaaggaauacauggauagacaagggaaaacaccucucggacugguugaccuuuuuguguucagcaccuccuuuuaucugaucaccauuuuccuccaccuggucaagaucccgacacaucggcacauugugggcaaacccugcccuaagccccaucgccugaaccacaugggcaucuguucuugcgggcuuuacaaacagccuggagugcccgucagauggaagcggugaggacuagucccuguucccagagcccacuuuuuuuucuuuuuuugaaauaaaauagccugucuuucagaucucaaaggcucuuuucagagccaccaaaaaaaaaaaaaaaaaaaaaaaaaaaaaaaaaaaaaaaaaaaaaaaaaaaaaaaaaaaaaaaaagaauu

SEQ ID NO: 15311 - RNA, 1714 nt, Artificial Sequence; identical to SEQ ID NO: 15305
  mRNA product Design a-1 (hSL-A64-N5) comprising derived and/or modified sequence from LASV(Pinneo-NIG-1969;Clade I)__AIT17836__GPCmut1 (opt5)

SEQ ID NO: 15312 - RNA, 1714 nt, Artificial Sequence
  mRNA product Design a-1 (hSL-A64-N5) comprising derived and/or modified sequence from LASV(ISTH0009-NIG-2011;Clade II)__AIT17404__GPCmut1 (opt5)
aggagagucccgcagucggcguccagcggcucugcuuguucgugugugugucguugcaggccuuauucaagcuuaccaugggccagaucauuaccuucuuucaagaggugccccacgucaucgaagagguuaugaacauugugcugaucgcccucagccugcuugcuauucugaaggggaucuacaauguggccacaugcggacucuucggccuggucuccuuucuucugcucugugggagaucuugcagcacgaccuauaaaggaguguacgaacugcagacacuggagcucgacauggcgucccugaacaugaccaugccucuuucuuguacaaagaauaacagccaucacuauaucaugguuggcaaugaaaccgggcuggagcucacacugaccaacacguccauuaucaaucauaaauucugcaaccuuucugaugcucacaagaaaaaucuguacgaccaugcccucaugagcauuaucuccaccuuucaccugagcauuccgaacuucaaucaguaugaggccaugucuugugauuuuaacggaggcaagaucuccgugcaguacaaucugagccacgcuuaugccgucgacgcugccaaccauugcggcacaauugcgaauggggugcuccaaaccuucaugcggauggccuggggaggcucuuacaucgcucuggauuccgggugcggaagcugggacuguaucaugacaucuuaccaguaucuuauuauccagaacaccacgugggaagaucacugccaguuuucccgccccagcccuauuggcuaccuggggcuccugucccaaagaacacgggacaucuauauuucucgcagacgccggggaaccuucacauggacccucagcgauuccgagggcaacgaaacccccggcggguacugucugacacgguggaugcugaucgaggccgagcucaaaugcuuuggaaauacggcuguugccaaguguaacgaaaaacaugacgaggaguucugcgauaugcugcgccuuuuugacuucaauaagcaggcgaucagacggcugaaaacccccgcccagaugagcauucagcucaucaacaaggcugugaaugcccugauuaacgaucaacuuaucaugaagaaucaucugcgcgacauuaugugcaucccuuauugcaacuacucuaaauauugguaccucaaucacacagucaccgggaagacaucccugcccagauguuggcuggugagcaacggaucuuaccucaaugaaacccacuucagcgacgauaucgagcagcaggcugacaacaugauuacggagcugcuucaaaaagaauauauggaucggcagggcaagacaccucuggggcucguggaccuguuugucuucuccaccucuuuuuaccugaucagcauuuuccuucaccucaucaaaauuccgacccaucgccacaucacaggaaagcccugcccuaaaccccauagacugaaucacaugggcauuuguuccugcggccuguauaagcacccugggguucccgugaaguggaaacggugaggacuagucccuguucccagagcccacuuuuuuuucuuuuuuugaaauaaaauagccugucuuucagaucucaaaggcucuuuucagagccaccaaaaaaaaaaaaaaaaaaaaaaaaaaaaaaaaaaaaaaaaaaaaaaaaaaaaaaaaaaaaaaaaagaauu

SEQ ID NO: 15313 - RNA, 1714 nt, Artificial Sequence
  mRNA product Design a-1 (hSL-A64-N5) comprising derived and/or modified sequence from LASV(ISTH2010-NIG-2012;Clade II)__AIT17482__GPCmut1 (opt5)
aggagagucccgcagucggcguccagcggcucugcuuguucgugugugugucguugcaggccuuauucaagcuuaccaugggccagaucauuaccuucuuucaagaggugccccacgucaucgaagagguuaugaacauugugcugaucgcccucagccugcuugcuauucugaaggggaucuacaauguggccacaugcggacucuucggccuggucuccuuucuucugcucugugggagaucuugcagcacgaccuauaaaggaguguacgaacugcagacacuggagcucgacauggcgucccugaacaugaccaugccucuuucuuguacaaagaauaacagccaucacuauaucaugguuggcaaugaaaccgggcuggagcucacacugaccaacacguccauuaucaaucauaaauucugcaaccuuucugaugcucacaagaaaaaucuguacgaccaugcccucaugagcauuaucuccaccuuucaccugagcauuccgaacuucaaucaguaugaggccaugucuugugauuuuaacggaggcaagaucuccgugcaguacaaucugagccacgcuuaugccgucgacgcugccaaccauugcggcacaauugcgaauggggugcuccaaaccuucaugcggauggccuggggaggcucuuacaucgcucuggauuccgggugcggaagcugggacuguaucaugacaucuuaccaguaucuuauuauccagaacauuaccugggaagaucacugccaguuuucccgccccagcccuaucggcuaccuggggcuccugucccaaagaacgcgggacauuuauaucucucgcagacgccggggaacauucaccuggacacucagcgauuccgagggcaacgaaacccccggcggguacugucugacccgguggaugcugaucgaggccgagcucaaaugcuuuggaaauacagcuguugccaaguguaacgaaaaacaugacgaggaguucugcgauaugcugcgccuuuuugacuucaauaagcaggcgauuagacggcugaaaacgcccgcccagaugagcauccagcucauuaacaaggcugugaaugcccugaucaacgaucaacuuauuaugaagaaucaucugcgcgacaucaugugcaucccuuauugcaacuacucuaaauauugguaccucaaucacaccgucacagggaagaccucccugcccagauguuggcuggugagcaacggaucuuaccucaaugaaacacacuucagcgacgauauugagcagcaggcugacaacaugaucaccgagcugcuucaaaaagaauauauugaucggcagggcaagacgccucuggggcucguggaccuguuugucuucuccacaucuuuuuaccugaucagcauuuuccuucaccucguuaaaaucccgacccaucgccacguggugggaaagcccugcccuaaaccccauagacugaaucacaugggcauuuguuccugcggccuguauaagcacccugggguccccgugaaguggaaacggugaggacuagucccuguucccagagcccacuuuuuuuucuuuuuuugaaauaaaauagccugucuuucagaucucaaaggcucuuuucagagccaccaaaaaaaaaaaaaaaaaaaaaaaaaaaaaaaaaaaaaaaaaaaaaaaaaaaaaaaaaaaaaaaaagaauu

SEQ ID NO: 15314 - RNA, 1714 nt, Artificial Sequence
  mRNA product Design a-1 (hSL-A64-N5) comprising derived and/or modified sequence from LASV(Lassa virus/H.sapiens-wt/NGA/2015/ISTH_0543;Clade II)__AVO03639__GPCmut1 (opt5)
aggagagucccgcagucggcguccagcggcucugcuuguucgugugugugucguugcaggccuuauucaagcuuaccaugggccagaucauuaccuucuuucaagaggugccccacgucaucgaagagguuaugaacauugugcugaucgcccucagccugcuugcuauucugaaggggaucuacaauguggccacaugcggacucuucggccuggucuccuuucuucugcucugugggagaucuugcagcacgaccuauaaaggaguguacgaacugcagacacuggagcucgacauggcgaaccugaauaugaccaugccucuuuccuguacaaagaacaauucucaucacuauaucaugguuggcaacgaaaccgggcuggagcucacacugaccaauacgagcauuaucaaccauaaauucugcaaucuuuccgaugcucacaagaaaaaccuguacgaccaugcccucaugucuauuaucagcaccuuucaccuguccauuccgaauuucaaccaguaugaggccaugagcugugauuuuaauggaggcaagaucucugugcaguacaaccugucccacacauaugcugucgacgccgcuaaucauugcggcaccauugccaacggggugcuccaaacauucaugcggauggcguggggaggcagcuacaucgcccuggauucugggugcggauccugggacuguaucaugaccagcuaccaguaucuuguuauucagaacacgacaugggaagaucacugccaguuuucucgccccuccccuaucggcuaccuggggcuccugagccaaagaacccgggacauuuauaucucccgcagacgccggggaacauucaccuggacccucucugauagcgagggcaaugaaacacccggcggguacugucugacgcgguggaugcugauugaggcugagcucaaaugcuuuggaaacaccgccguggcuaaguguaaugaaaaacaugacgaggaguucugcgauaugcugcgccuuuuugacuucaacaagcaggccaucagacggcugaaaacacccgcgcagauguccauccagcucauuaauaaggccgucaacgcucugaucaaugaucaacuuauuaugaagaaccaucugcgcgacaucaugugcauuccuuauugcaauuacagcaaauauugguaccucaaccacaccgugacagggaagaccucucugcccagauguuggcugguguccaauggaagcuaccucaacgaaacgcacuucucugacgauaucgagcagcaggccgacaauaugaucacagagcugcuucaaaaagaauauauugaucggcagggcaagaccccucuggggcucgucgaccuguuuguuuucagcaccuccuuuuaccugaucucuauuuuccuucaccucgugaaaaucccgacacaucgccacauuaccggaaagcccugcccuaaaccccauagacugaaccacaugggcaucuguagcugcggccuguauaagcacccuggggugcccgucaaguggaaacggugaggacuagucccuguucccagagcccacuuuuuuuucuuuuuuugaaauaaaauagccugucuuucagaucucaaaggcucuuuucagagccaccaaaaaaaaaaaaaaaaaaaaaaaaaaaaaaaaaaaaaaaaaaaaaaaaaaaaaaaaaaaaaaaaagaauu

SEQ ID NO: 15315 - RNA, 1714 nt, Artificial Sequence
  mRNA product Design a-1 (hSL-A64-N5) comprising derived and/or modified sequence from LASV(Lassa virus/H.sapiens-wt/NGA/2016/ISTH_0009;Clade II)__AVO03571__GPCmut1 (opt5)
aggagagucccgcagucggcguccagcggcucugcuuguucgugugugugucguugcaggccuuauucaagcuuaccaugggccagaucauuaccuucuuucaagaggugccccacgucaucgaagagguuaugaacauugugcugaucgcccucagccugcuugcuauucugaaggggaucuacaauguggccacaugcggacuccugggccuugucuccuuccugcuccugugugggagaucuugcagcacgaccuauaaaggaguguacgaacugcagacacucgagcuggacauggcgucccuuaacaugaccaugccucugucuuguacaaagaauaacagccaucacuauaucaugguuggcaaugaaaccgggcucgagcugacacuuaccaacacguccauuaucaaucauaaauuuugcaaccugucugaugcucacaagaaaaaucucuacgaccaugcccugaugagcauuaucuccaccuuccaccugagcauuccgaacuuuaaucaguaugaggccaugucuugugauuucaacggaggccggaucuccgugcaguacaaucucagccacucuuaugcugucgacgccgcuaaccauugcggcacaauugccaauggggugcugcaaaccuuuaugcgcauggcguggggaggcuccuacaucgcccuugauagcgggugcggaucuugggacuguaucaugacauccuaccaguaucugauuauccagaacaccacgugggaagaucacugccaguucagcagacccuccccuauuggcuaccucgggcugcuuucucaacggacacgcgacaucuauauuagcagacggcgccggggaaccuuuacauggacccuguccgauagcgagggcaacgaaacccccggcggguacugucugacacgcuggaugcucaucgaggcugagcugaagugcuucggaaauacggccguugcuaaauguaacgaaaagcaugacgaggaauuuugcgauaugcuuagacuguucgacuuuaauaaacaggccauccggcgccucaagacccccgcgcagaugucuauucagcugaucaacaaagccgugaaugcucuuauuaacgaucaacugaucaugaagaaucaccucagagacauuaugugcaucccuuauugcaacuacuccaaguauugguaccugaaucacacagucaccgggaaaacaagccugccccgguguuggcucgugucuaacggaagcuaccugaaugaaacccauuucuccgacgauaucgagcagcaggccgacaacaugauuacggagcuucugcaaaaggaauauaucgaucgccagggcaaaacaccucucgggcugguggaccuguucgucuuuucuaccagcuucuaccuuauuuccaucuuucuccaccugguuaagauuccgacccauagacacaucacaggaaaacccugcccuaagccccaucggcugaaucacaugggcauuuguagcugcggccucuauaaccacccuggggugcccgugaaauggaagcgcugaggacuagucccuguucccagagcccacuuuuuuuucuuuuuuugaaauaaaauagccugucuuucagaucucaaaggcucuuuucagagccaccaaaaaaaaaaaaaaaaaaaaaaaaaaaaaaaaaaaaaaaaaaaaaaaaaaaaaaaaaaaaaaaaagaauu

SEQ ID NO: 15316 - RNA, 1714 nt, Artificial Sequence
  mRNA product Design a-1 (hSL-A64-N5) comprising derived and/or modified sequence from LASV(Lassa virus/H.sapiens-wt/NGA/2016/ISTH_0017;Clade II)__AVO03567__GPCmut1 (opt5)
aggagagucccgcagucggcguccagcggcucugcuuguucgugugugugucguugcaggccuuauucaagcuuaccaugggccagaucauuaccuucuuucaagaggugccccacgucaucgaagagguuaugaacauugugcugaucgcccucagccugcuugcuauucugaaggggaucuacaauguggccacaugcggacucuucggccuggucuccuuucuucugcucugugggagaucuugcagcacgaccuauaaaggaguguacgaacugcagacacuggagcucgacauggcgucccugaacaugaccaugccucuuucuuguacaaagaauaacagccaucacuauaucaugguuggcaaugaaaccgggcuggagcucacacugaccaacacguccauuaucaaucauaaauucugcaaccuuucugaugcucacaagaaaaaucuguacgaccaugcccucaugagcauuaucuccaccuuucaccugagcauuccgaacuucaaucaguaugaggccaugucuugugauuuuaacggaggcaagaucuccgugcaguacaaucugagccacacauaugcuauugacgccgcuaaccauugcggcaccaucgccaaugggguccuccaaacauucaugcggauggcguggggaggcucuuacaucgcccuggauuccgggugcggaagcugggacuguauuaugaccucuuaccaguaucuuaucauucagaacacgacaugggaagaucacugccaguuuucccgccccagcccuaucggcuaccuggggcuccugucccaaagaacccgggacauuuauaucucucgcagacgccggggaacauucaccuggacccucagcgauuccgagggcaacgaaacacccggcggguacugucugacgcgguggaugcugaucgaggcugagcucaaaugcuuuggaaauaccgccguggcuaaguguaacgaaaaacaugacgaggaguucugcgauaugcugcgccuuuuugacuucaauaagcaggccauuagacggcugaaaacacccgcgcagaugagcauccagcucauuaacaaggccguuaaugcucugaucaacgaucaacuuauuaugaagaaucaucugcgcgacaucaugugcaucccuuauugcaacuacucuaaauauugguaccucaaucacaccgugacagggaagaccucccugcccagauguuggcuggucagcaacggaucuuaccucaaugaaacgcacuucagcgacgauauugagcagcaggccgacaacaugaucacagagcugcuucaaaaagaauauauggaucggcagggcaagaccccucuggggcucguggaccuguuuguguucuccaccucuuuuuaccugauuagcaucuuccuucaccucguccgcauuccgacacauagacacguuaucggaaaacccugcccuaagccccaucggcugaaucacaugggcauuuguuccugcggccuguauaaacacccuggggugcccgugaaguggaagcgcugaggacuagucccuguucccagagcccacuuuuuuuucuuuuuuugaaauaaaauagccugucuuucagaucucaaaggcucuuuucagagccaccaaaaaaaaaaaaaaaaaaaaaaaaaaaaaaaaaaaaaaaaaaaaaaaaaaaaaaaaaaaaaaaaagaauu

SEQ ID NO: 15317 - RNA, 1714 nt, Artificial Sequence
  mRNA product Design a-1 (hSL-A64-N5) comprising derived and/or modified sequence from LASV(Lassa virus/H.sapiens-wt/NGA/2018/ISTH_0959;Clade II)__AVV65099__GPCmut1 (opt5)
aggagagucccgcagucggcguccagcggcucugcuuguucgugugugugucguugcaggccuuauucaagcuuaccaugggccagaucauuaccuucuuucaagaggugccccacgucaucgaagagguuaugaacauugugcugaucgcccucagccugcuugcuauucugaaggggaucuacaauguggucacaugcggacucuucggccugguguccuuucuucugcucugugggagaucuugcagcacgaccuauaaaggaguuuacgaacugcagacacuggagcucgacauggccucccugaacaugaccaugccucuuucuuguacaaagaauaacagccaucacuauaucauggugggcaaugaaaccgggcuggagcucacacugaccaacacguccauuaucaaucauaaauucugcaaccuuucugaugcgcacaagaaaaaucuguacgaccaugcucucaugagcauuaucuccaccuuucaccugagcauuccgaacuucaaucaguaugaggccaugucuugugauuuuaacggaggcaagaucuccguccaguacaaucugagccacgccuaugcuauugacgccgcuaaccauugcggcacaaucgccaauggggugcuccaaaccuucaugcggauggcguggggaggcucuuacaucgcccuggauuccgggugcggaagcugggacuguauuaugacaucuuaccaguaucuuaucauucagaacaccacgugggaagaucacugccaguuuucccgccccagcccuaucggcuaccuggggcuccugucccaaagaacacgggacauuuauaucucucgcagacgccggggaaccuucacauggacccucagcgauuccgagggcaacgaaacccccggcggguacugucugacacgguggaugcugaucgaggcugagcucaaaugcuuuggaaauacggccguugcuaaguguaacgaaaaacaugacgaggaguucugcgauaugcugcgccuuuuugacuucaauaagcaggccauuagacggcugaaaacccccgcgcagaugagcauccagcucauuaacaaggccgugaaugcucugaucaacgaucaacuuauuaugaagaaucaucugcgcgacaucaugugcaucccuuauugcaacuacucuaaauauugguaccucaaucacacagucaccgggaagacaucccugcccagauguuggcuggugagcaacggaucuuaccucaaugaaacccacuucagcgacgauauugagcagcaggccgacaacaugaucacggagcugcuucaaaaagaauauauugaucggcagggcaagacaccucuggggcucguggaccuguuugucuucuccaccucuuuuuaccugaucagcauuuuccuucaccucguuaaaaucccgacccaucgccacgugauuggaaagcccugcccuaaaccccauagacugaaucacaugggcaucuguuccugcggccuguauaagcacccuggggugcccgucaaguggaaacggugaggacuagucccuguucccagagcccacuuuuuuuucuuuuuuugaaauaaaauagccugucuuucagaucucaaaggcucuuuucagagccaccaaaaaaaaaaaaaaaaaaaaaaaaaaaaaaaaaaaaaaaaaaaaaaaaaaaaaaaaaaaaaaaaagaauu

SEQ ID NO: 15318 - RNA, 1714 nt, Artificial Sequence
  mRNA product Design a-1 (hSL-A64-N5) comprising derived and/or modified sequence from LASV(LASV003-NIG-2008;Clade II)__AIT17580__GPCmut1 (opt5)
aggagagucccgcagucggcguccagcggcucugcuuguucgugugugugucguugcaggccuuauucaagcuuaccaugggccagaucauuaccuucuuucaagaggugccccacgucaucgaagagguuaugaacauugugcugaucgcccucagccugcuugcuauucugaaggggaucuacaauguggccacaugcggacucuucggccuggucuccuuucuucugcucugugggagaucuugcagcacgaccuauaaaggaguguacgaacugcagacacuggagcucgacauggcgucccugaacaugaccaugccucuuucuuguacaaagaauaacagccaucacuauaucaugguuggcaaugaaaccgggcuggagcucacacugaccaacacguccauuaucaaucauaaauucugcaaccuuucugaugcucacaagaaaaaucuguacgaccaugcccucaugagcauuaucuccaccuuucaccugagcauuccgaacuucaaucaguaugaggccaugucuugugauuuuaacggaggcaagaucuccgugcaguacaaucugagccacacauaugcugucgacgccgcuaaccauugcggcaccauugccaauggggugcuccaaacauucaugcggauggcguggggaggcucuuacaucgcccuggauuccgggugcggaagcugggacuguaucaugaccucuuaccaguaucuuauuauccagaacacgacaugggaagaucacugccaguuuucccgccccagcccuauuggcuaccuggggcuccugucccaaagaacccgggacaucuauauuucucgcagacgccggggaacauucaccuggacccucagcgauuccgagagcaacgaaacacccggcggcuacugucugacgcgguggaugcugaucgaggcugagcucaaaugcuuugggaauaccgccguugcuaaguguaacgaaaaacaugacgaggaguucugcgauaugcugcgccuuuuugacuucaauaagcaggccaucagacggcugaaagcgcccgcccagaugucuauucagcucaucaacaaggcugugaaugcccugauuaacgaucaacuuaucaugaagaaucaucugcgcgacauuaugugcaucccuuauugcaacuacuccaaauauugguaccucaaucacacagucaccggcagaacaagccugccccgguguuggcuggugucuaacgggagcuaccucaaugaaacccacuucuccgacgauaucgagcagcaggcugacaacaugauuacggagcugcuucaaaaggaauauauggaucgccagggaaaaacaccucugggccucguggaccuguuugucuucucuaccagcuuuuaccugaucuccauuuuccuucaccucguuaagaucccgacccauagacacgugauugggaaacccugcccuaagccccaucggcugaaucacaugggaaucuguagcugcggccuguauaaacacccuggcgugcccgucaaguggaagcgcugaggacuagucccuguucccagagcccacuuuuuuuucuuuuuuugaaauaaaauagccugucuuucagaucucaaaggcucuuuucagagccaccaaaaaaaaaaaaaaaaaaaaaaaaaaaaaaaaaaaaaaaaaaaaaaaaaaaaaaaaaaaaaaaaagaauu

SEQ ID NO: 15319 - RNA, 1714 nt, Artificial Sequence
  mRNA product Design a-1 (hSL-A64-N5) comprising derived and/or modified sequence from LASV(LASV035-NIG-2009;Clade II)__AIT17588__GPCmut1 (opt5)
aggagagucccgcagucggcguccagcggcucugcuuguucgugugugugucguugcaggccuuauucaagcuuaccaugggccagaucauuaccuucuuucaagaggugccccacgucaucgaagagguuaugaacauugugcugaucgcccucagccugcuugcuauucugaaggggaucuacaauguggccacaugcggacucuucggccuggucuccuuucuucugcucugugggagaucuugcagcacgaccuauaaaggaguguacgaacugcagacacuggagcucgacauggcgucccugaacaugaccaugccucuuucuuguacaaagaauaacagccaucacuauaucaugguuggcaaugaaaccgggcuggagcucacacugaccaacacguccauuaucaaucauaaauucugcaaccuuucugaugcucacaagaaaaaucuguacgaccaugcccucaugagcauuaucuccaccuuucaccugagcauuccgaacuucaaucaguaugaggccaugucuugugauuuuaacggaggcaagaucuccgugcaguacaaucugagccacgcuuaugccgucgacgcugccaaccauugcggcacaauugcgaauggggugcuccaaaccuucaugcggauggccuggggaggcucuuacaucgcucuggauuccgggugcggaagcugggacuguaucaugacaucuuaccaguaucuuauuauccagaacaccacgugggaagaucacugccaguuuucccgccccagcccuauuggcuaccuggggcuccugucccaaagaacacgggacaucuauauuucucgcagacgccggggaaccuucacauggacccucagcgauuccgagggcaacgaaacccccggcggguacugucugacacgguggaugcugaucgaggccgagcucaaaugcuuuggaaauacggcuguugccaaguguaacgaaaaacaugacgaggaguucugcgauaugcugcgccuuuuugacuucaauaagcaggcgaucagacggcugaaagcccccgcucagaugagcauucagcucaucaacaaggccgugaaugcucugauuaacgaucaacuuaucaugaagaaucaucugcgcgacauuaugugcaucccuuauugcaacuacucuaaauauugguaccucaaucacaccgucacagggaagaccucccugcccagauguuggcuggugagcaacggaucuuaccucaaugaaacacacuucagcgacgauaucgagcagcaggccgacaacaugauuaccgagcugcuucaaaaagaauauaucgaucggcagggcaagacgccucuggggcucguggaccuguuugucuucuccacaucuuuuuaccugauuagcaucuuccuucaccucguuaaaauuccgacccaucgccacgugaucggaaagcccugcccuaaaccccauagacugaaucacaugggcauuuguuccugcggccuguauaagcacccuggggugcccgucaaguggaaacggugaggacuagucccuguucccagagcccacuuuuuuuucuuuuuuugaaauaaaauagccugucuuucagaucucaaaggcucuuuucagagccaccaaaaaaaaaaaaaaaaaaaaaaaaaaaaaaaaaaaaaaaaaaaaaaaaaaaaaaaaaaaaaaaaagaauu

SEQ ID NO: 15320 - RNA, 1714 nt, Artificial Sequence
  mRNA product Design a-1 (hSL-A64-N5) comprising derived and/or modified sequence from LASV(LASV1000-NIG-2009;Clade II)__AIT17782__GPCmut1 (opt5)
aggagagucccgcagucggcguccagcggcucugcuuguucgugugugugucguugcaggccuuauucaagcuuaccaugggccagaucauuaccuucuuucaagaggugccccacgucaucgaagagguuaugaacauugugcugaucgcccucagccugcuugcuauucugaaggggaucuacaauguggccacaugcggacucuucggccuggucuccuuucuucugcucugugggagaucuugcagcacgaccuauaaaggaguguacgaacugcagacacuggagcucgacauggcgucccugaacaugaccaugccucuuucuuguacaaagaauaacagccaucacuauaucaugguuggcaaugaaaccgggcuggagcucacacugaccaacacguccauuaucaaucauaaauucugcaaccuuucugaugcucacaagaaaaaucuguacgaccaugcccucaugagcauuaucuccaccuuucaccugagcauuccgaacuucaaucaguaugaggccaugucuugugauuuuaacggaggcaagaucuccgugcaguacaaucugagccacacauaugcugucgacgccgcuaaccauugcggcaccauugccaauggggugcuccaaacauucaugcggauggcguggggaggcucuuacaucgcccuggauuccgggugcggaagcugggacuguaucaugaccucuuaccaguaucuuauuauccagaacacgacaugggaagaucacugccaguuuucccgccccagcccuauuggcuaccuggggcuccugucccaaagaacccgggacaucuauauuucucgcagacgccggggaacauucaccuggacccucagcgauuccgagggcaacgaaacacccggcggguacugucugacgcgguggaugcugaucgaggcugagcucaaaugcuuuggaaauaccgccguugcuaaguguaacgaaaaacaugacgaggaguucugcgauaugcugcgccuuuuugacuucaauaagcaggccaucaaaagacugaagacacccgcgcagaugagcauucagcucaucaacaaggccgugaaugcucugauuaacgaucaacuuaucaugaaaaaucaucugcgggacauuaugugcaucccuuauugcaacuacucuaaguauugguaccucaaucacaccgucacagggaaaaccucccugccccgcuguuggcuggugagcaacggaucuuaccucaaugaaacgcacuucagcgacgauaucgagcagcaggccgacaacaugauuacagagcugcuucaaaaggaauauaucgauagacagggcaaaaccccucuggggcucguggaccuguuugucuucuccaccucuuuuuaccugauuagcaucuuccuucaccucguuaagauuccgacacaucggcacguggugggaaaacccugcccuaagccccaucgccugaaucacaugggcaucuguuccugcggccuguauaagcacccugggguccccgugaaauggaagagaugaggacuagucccuguucccagagcccacuuuuuuuucuuuuuuugaaauaaaauagccugucuuucagaucucaaaggcucuuuucagagccaccaaaaaaaaaaaaaaaaaaaaaaaaaaaaaaaaaaaaaaaaaaaaaaaaaaaaaaaaaaaaaaaaagaauu

SEQ ID NO: 15321 - RNA, 1714 nt, Artificial Sequence
  mRNA product Design a-1 (hSL-A64-N5) comprising derived and/or modified sequence from LASV(LASV221-NIG-2010;Clade II)__AIT17624__GPCmut1 (opt5)
aggagagucccgcagucggcguccagcggcucugcuuguucgugugugugucguugcaggccuuauucaagcuuaccaugggccagaucauuaccuucuuucaagaggugccccacgucaucgaagagguuaugaacauugugcugaucgcccucagccugcuugcuauucugaaggggaucuacaauguggccacaugcggacucuucggccuggucuccuuucuucugcucugugggagaucuugcagcacgaccuauaaaggaguguacgaacugcagacacuggagcucgacauggcgucccugaacaugaccaugccucuuucuuguacaaagaauaacagccaucacuauaucaugguuggcaaugaaaccgggcuggagcucacacugaccaacacguccauuaucaaucauaaauucugcaaccuuucugaugcucacaagaaaaaucuguacgaccaugcccucaugagcauuaucuccaccuuucaccugagcauuccgaacuucaaucaguaugaggccaugucuugugauuuuaacggaggcaagaucuccgugcaguacaaucugagccacacauaugcuauugacgccgcuaaccauugcggcaccaucgccaaugggguccuccaaacauucaugcggauggcguggggaggcucuuacaucgcccuggauuccgggugcggaagcugggacuguauuaugaccucuuaccaguaucuuaucauucagaacacgacaugggaagaucacugccaguuuucccgccccagcccuaucggcuaccuggggcuccugucccaaagaacccgggacauuuauaucucucgcagacgccggggaacauucaccuggacccucagcgauuccgagggcaacgaaacacccggcggguacugucugacgcgguggaugcugaucgaggcugagcucaaaugcuuuggaaauaccgccguggcuaaguguaacgaaaaacaugacgaggaguucugcgauaugcugcgccuuuuugacuucaauaagcaggccauuagacggcugaaaacacccgcgcagaugagcauccagcucauuaacaaggccguuaaugcucugaucaacgaucaacuuauuaugaagaaucaucugcgcgacaucaugugcaucccuuauugcaacuacucuaaauauugguaccucaaucacaccgugacagggaagaccucccugcccagauguuggcuggucagcaacggaucuuaccucaaugaaacgcacuucagcgacgauauugagcagcaggccgacaacaugaucacagagaugcugcaaaaagaauauauggaucggcagggcaagaccccucuugggcugguggaccucuuuguguucuccaccucuuuuuaccugauuagcaucuuccugcaccuugucaaaauuccgacacaucgccacguuaucggaaagcccugcccuaaaccccauagacucaaucacaugggcauuuguuccugcggccuguauaagcacccuggggugcccgugaaguggaaacggugaggacuagucccuguucccagagcccacuuuuuuuucuuuuuuugaaauaaaauagccugucuuucagaucucaaaggcucuuuucagagccaccaaaaaaaaaaaaaaaaaaaaaaaaaaaaaaaaaaaaaaaaaaaaaaaaaaaaaaaaaaaaaaaaagaauu

SEQ ID NO: 15322 - RNA, 1714 nt, Artificial Sequence
  mRNA product Design a-1 (hSL-A64-N5) comprising derived and/or modified sequence from LASV(LASV237-NIG-2010;Clade II)__AIT17638__GPCmut1 (opt5)
aggagagucccgcagucggcguccagcggcucugcuuguucgugugugugucguugcaggccuuauucaagcuuaccaugggccagaucauuaccuucuuucaagaggugccccacgucaucgaagagguuaugaacauugugcugaucgcccucagccugcuugcuauucugaaggggaucuacaauguggccacaugcggacucuucggccuggucuccuuucuucugcucugugggagaucuugcagcacgaccuauaaaggaguguacgaacugcagacacuggagcucgacauggcgucccugaacaugaccaugccucuuucuuguacaaagaauaacagccaucacuauaucaugguuggcaaugaaaccgggcuggagcucacacugaccaacacguccauuaucaaucauaaauucugcaaccuuucugaugcucacaagaaagaccuguacgaucaugcccucaugagcauuaucuccaccuuucaccugagcauuccgaauuucaaccaguaugaggccaugucuugugacuuuaauggaggcaagaucuccgugcaguacaaccugagccacacauaugcugucgaugccgcuaaucauugcggcaccauugccaacggggugcuccaaacauucaugcggauggcguggggaggcucuuacaucgcccuggacuccgggugcggaagcugggauuguaucaugaccucuuaccaguaucuuauuauccagaauacgacaugggaagaccacugccaguuuucccgccccagcccuauuggcuaccuggggcuccugucccaaagaacccgggauaucuauauuucucgcagacgccggggaacauucaccuggacccucagcgacuccgagggcaacgaaacacccggcggguacugucugacgcgguggaugcugaucgaggcugagcucaaaugcuuuggaaacaccgccguugcuaaguguaaugaaaaacaugaugaggaguucugcgacaugcugcgccuuuuugauuucaacaagcaggccaucagacggcugaaaacacccgcgcagaugagcauucagcucaucaauaaggccgugaacgcucugauuaaugaccaacuuaucaugaagaaccaucugcgcgacauuaugugcaucccuuauugcaauuacucuaaauauugguaccucaaccacaccgucacagggaagaccucccugcccagauguuggcuggugagcaauggaucuuaccucaacgaaacgcacuucagcgaugacaucgagcagcaggccgauaauaugauuacagagcugcuucaaaaagaauauauggaccggcagggcaagaccccucuggggcucguggaucuguuugucuucuccaccucuuuuuaccugaucagcauuuuccuucaccucaucaaaauuccgacacaucgccacaucaccggaaagcccugcccuaaaccccauagacugaaccacaugggcauuuguuccugcggccuguauaagcacccugggguucccgugaaguggaaacggugaggacuagucccuguucccagagcccacuuuuuuuucuuuuuuugaaauaaaauagccugucuuucagaucucaaaggcucuuuucagagccaccaaaaaaaaaaaaaaaaaaaaaaaaaaaaaaaaaaaaaaaaaaaaaaaaaaaaaaaaaaaaaaaaagaauu

SEQ ID NO: 15323 - RNA, 1714 nt, Artificial Sequence
  mRNA product Design a-1 (hSL-A64-N5) comprising derived and/or modified sequence from LASV(LASV253-NIG-2011;Clade II)__AIT17670__GPCmut1 (opt5)
aggagagucccgcagucggcguccagcggcucugcuuguucgugugugugucguugcaggccuuauucaagcuuaccaugggccagaucauuaccuucuuucaagaggugccccacgucaucgaagagguuaugaacauugugcugaucgcccucagccugcuugcuauucugaaggggaucuacaauguggccacaugcggacucuucggccuggucuccuuucuucugcucugugggagaucuugcagcacgaccuauaaaggaguguacgaacugcagacacuggagcucgacauggcgucccugaacaugaccaugccucuuucuuguacaaagaauaacagccaucacuauaucaugguuggcaaugaaaccgggcuggagcucacacugaccaacacguccauuaucaaucauaaauucugcaaccuuucugaugcucacaagaaaaaucuguacgaccaugcccucaugagcauuaucuccaccuuucaccugagcauuccgaacuucaaucaguaugaggccaugucuugugauuuuaacggaggcaagaucuccgugcaguacaaucugagccacacauaugcugucgacgccgcuaaccauugcggcaccauugccaauggggugcuccaaacauucaugcggauggcguggggaggcucuuacaucgcccuggauuccgggugcggaagcugggacuguaucaugaccucuuaccaguaucuuauuauccagaacacgacaugggaagaucacugccaguuuucccgccccagcccuauuggcuaccuggggcuccugucccaaagaacccgggacaucuauauuucucgcagacgccggggaacauucaccuggacccucagcgauuccgagggcaacgaaacacccggcggguacugucugacgcgguggaugcugaucgaggcugagcucaaaugcuuuggaaauaccgccguugcuaaguguaacgaaaaacaugacgaggaguucugcgauaugcugcgccuuuuugacuucaauaagcaggccaucagacggcugaaagcgcccgcccagaugagcauucagcucaucaacaaggcugugaaugcccugauuaacgaucaacuuaucaugaagaaucaucugcgcgacauuaugugcaucccuuauugcaacuacucuaaauauugguaccucaaucacacagucaccgggagaacaucccugccccgguguuggcuggugagcaacggaucuuaccucaaugaaacccacuucagcgacgauaucgagcagcaggcugacaacaugauuacggagcugcuucaaaaggaauauaucgaucgccagggcaaaacaccucuggggcucguggaccuguuugucuucuccaccucuuuuuaccugauuagcaucuuccuucaccucguuaagauuccgacccauagacacaucauuggaaaacccugcccuaagccccaucggcugaaucacaugggcaucuguuccugcggccuguauaaacacccuggggugcccgugaaguggaagcgcugaggacuagucccuguucccagagcccacuuuuuuuucuuuuuuugaaauaaaauagccugucuuucagaucucaaaggcucuuuucagagccaccaaaaaaaaaaaaaaaaaaaaaaaaaaaaaaaaaaaaaaaaaaaaaaaaaaaaaaaaaaaaaaaaagaauu

SEQ ID NO: 15324 - RNA, 1714 nt, Artificial Sequence
  mRNA product Design a-1 (hSL-A64-N5) comprising derived and/or modified sequence from LASV(LASV254-NIG-2011;Clade II)__AIT17674__GPCmut1 (opt5)
aggagagucccgcagucggcguccagcggcucugcuuguucgugugugugucguugcaggccuuauucaagcuuaccaugggccagaucauuaccuucuuucaagaggugccccacgucaucgaagagguuaugaacauugugcugaucgcccucagccugcuugcuauucugaaggggaucuacaauguggccacaugcggacucuucggccuggucuccuuucuucugcucugugggagaucuugcagcacgaccuauaaaggaguguacgaacugcagacacuggagcucgacaugaccaaccugaauaugacaaugccucuuuccuguaccaagaacaauucucaucacuauaucaugguuggcaacgaaacagggcuggagcucacccugacgaauaccagcauuaucaaccauaaauucugcaaucuuuccgaugcgcacaagaaaaaccuguacaaucaugcucucaugucuauuaucagcacauuucaccuguccauuccgaacuucaaucaguaugaggccaugagcugugacuuuaacggaggcaagaucucugugcaguacaaucugucccacagcuaugccgucgaugcugccaaccauugcggcaccauugcuaacggggugcuccaaacauucaugcggauggccuggggaggcucuuacaucgcgcuggacuccgggugcggaaauugggauuguaucaugaccagcuaccaguaucuuauuauccagaacacgacaugggaagaccacugccaguuuucucgccccuccccuauuggcuaccuggggcuccugagccaaagaacccgggauaucuauauuucccgcagacgccggggaacauucaccuggacccucucugacagcgagggcaaugaaacacccggcggguacugucugacgcgguggaugcugaucgaggccgagcucaaaugcuuuggaaacaccgcuguugccaaguguaaugaaaaacaugaugaggaguucugcgacaugcugcgccuuuuugauuucaacaagcaggcuaucagacggcugaaaacacccgcccaggcgaauauucagcucaucaacaaggccgugaaugcucugauuaacgaccaacuuaucaugaagaaucaucugcgcgauauuaugugcaucccuuauugcaacuacuccaaauauugguaccucaaucacaccgucacagggaagaccagccugcccagauguuggcuggugucuaacggauccuaccucaaugaaacgcacuucagcgacgacaucgagcagcaggccgauaacaugauuacagagcugcuucaaaaagaauauauggaccggcagggcaagaccccucuggggcucguggaucuguuugucuucucuaccagcuuuuaccugaucuccauuuuccuucaccucguuaaaaucccgacacaucgccacgugauuggaaagcccugcccuaaaccccauagacugaaccacaugggcaucuguucuugcggccuguauaagcacccuggggugcccgucaaguggaaacggugaggacuagucccuguucccagagcccacuuuuuuuucuuuuuuugaaauaaaauagccugucuuucagaucucaaaggcucuuuucagagccaccaaaaaaaaaaaaaaaaaaaaaaaaaaaaaaaaaaaaaaaaaaaaaaaaaaaaaaaaaaaaaaaaagaauu

SEQ ID NO: 15325 - RNA, 1714 nt, Artificial Sequence
  mRNA product Design a-1 (hSL-A64-N5) comprising derived and/or modified sequence from LASV(Nig08-A19;Clade III)__ADU56618__GPCmut1 (opt5)
aggagagucccgcagucggcguccagcggcucugcuuguucgugugugugucguugcaggccuuauucaagcuuaccaugggccagaucgugaccuucuuucaagaggucccccacguuauugaagaggugaugaacaucgugcugauugcccucagcauccuggcuauucuuaaggggcuguacaauaucgccacaugcggacucaucggccuggucacguuccuucugcucuccgggagaucuuguagcaugaccuauaaaggaguguacgaacugcagacacuggagcucaacaugaauacccugaacaugacaaugccucuuuccugcaccaagaauaacucucaucacuauauuaugguuggcaaugaaacagggcuggagcucacccugacgaacaccagccuucugcaucacaaauuuuguaaucucuccgacgcgcauaagaaaaaccuguacgaucacacacugaugucuaucauuagcaccuuccaccucuccaucccgaauuuuaaccaguaugaggcuaugagcugcgacuucaauggaggcaagauuacagugcaguacaaccugucucauuccuaugccaucgaugccgcuaaucacuguggcaccgucgccaacggggugcuucaaacguuuaugcggauggcuuggggaggcagcuacauugcccuggacucugggugcggaaagugggauugcaucaugacauccuaccaguaucucaucauucagaacaccacaugggaagaccauugucaguucagcagacccucuccuaucggcuaccuggggcuucugucccaacggacccgcgauauuuauaucagcagacggcgccggggaaccuuuacauggacgcuguccgacucugagggcaaugaaacccccggcggguacugccucacacgcuggaugcugauugaggcggagcuuaaauguuucggaaacaccgccguugcuaagugcaaugaaaaacacgaugaggaauuuugugacaugcugagacucuucgauuuuaacaagcaggccauccggcgccugaaagcucccgcccagaugagcauccagcuuauuaauaaggcggugaacgcccugaucaaugaccaacucauuaugaagaaccaccugagagauaucaugugcauuccuuauugcaauuacuccaaauauugguaccugaaccauacaagcaccgggcggacgucucucccccgcugcuggcuggucuccaauggaagcuaccuuaacgaaacacacuucucugacgacaucgagcagcaggcugauaauaugaucaccgagaugcugcaaaaggaauaucucgacagacagggcaaaaccccucuggggcugguggaucuuuucguguuuagcacauccuucuaccucauuucuaucuuucugcaucuggucaagauuccgacccaccggcauaucguuggaaaacccuguccuaagccccaccgccucaaccacaugggcauuugcagcuguggccuguauaaacagccuggggugcccgugagauggaagcggugaggacuagucccuguucccagagcccacuuuuuuuucuuuuuuugaaauaaaauagccugucuuucagaucucaaaggcucuuuucagagccaccaaaaaaaaaaaaaaaaaaaaaaaaaaaaaaaaaaaaaaaaaaaaaaaaaaaaaaaaaaaaaaaaagaauu

SEQ ID NO: 15326 - RNA, 1717 nt, Artificial Sequence
  mRNA product Design a-1 (hSL-A64-N5) comprising derived and/or modified sequence from LASV(G1180-SLE-2010;Clade IV)__AIT17168__GPCmut1 (opt5)
aggagagucccgcagucggcguccagcggcucugcuuguucgugugugugucguugcaggccuuauucaagcuuaccaugggccagaucgugaccuucuuucaagaggucccccacguuauugaagaggugaugaacaucgugcugauugcccucagcauccuggcuguccuuaaggggcuguacaauuucgccacaugcggacucgugggccugcuuacguuucugcuccugugugggagauccugcaccgcgucucgguauaaaggaguuuacgaacugcagacacucgagcugaacauggaaacccuuaauaugacaaugccucugagcuguaccaagaacaauucccaucacuauauuauggugggcaacgagacagggcucgagcugacccuuacgaauaccucuaucaucaaccauaaauucugcaaucugagcgacgcucacaagaaaaaccucuacgaucaugcccugauguccauuaucucuacauuucaccugagcauuccgaauuucaaccaguaugaagccauguccugugacuuuaauggaggcaagaucagcguccaguacaaccucucucacuccuaugcuggcgaugccgcuaaucauugcgggaccguggccaacggaguucugcaaacauucaugcgcauggcguggggcgggagcuacauugcccuugacucuggaugcggcuccugggauuguaucaugaccagcuaccaguaucugauuauccagaacacgacaugggaggaccauugccaguuuucuagacccuccccuaucggguaccucggacugcuuagccaacggacccgcgauauuuauaucuccagacggcgccggggcacauucaccuggacccugucugacagcgaaggcaaggauacacccgggggauacugucugacgcgcuggaugcucauugaggcugagcugaaaugcuuuggcaauaccgccguggcuaaguguaacgaaaaacacgacgaggaguucugcgauaugcuuagacuguuugacuucaauaagcaggccauccagcggcucaaagcgcccgcccagauguccauucaacugaucaacaaggcugucaaugcccuuaucaacgaucagcugauuaugaagaaucaccuccgcgacaucaugugcauuccuuauugcaacuacagcaaauauugguaccugaaucauacaaccacaggaaagaccucucugcccaaauguuggcucguguccaacggcagcuaccugaaugaaacgcacuucucugacgauaucgagcagcaagcugacaacaugauuacagagaugcuucagaaggaauauauggagagacaggggaaaaccccucugggacucguggaucuguuugucuucagcaccuccuuuuaccugaucucuaucuuccuucaucucguuaagauuccgacacaccggcauaucgugggcaaaagcugccccaagccucaccgccugaaucacaugggcauuuguuccugcgggcuguauaagcagcccggagugccugucaaauggaagagaugaggacuagucccuguucccagagcccacuuuuuuuucuuuuuuugaaauaaaauagccugucuuucagaucucaaaggcucuuuucagagccaccaaaaaaaaaaaaaaaaaaaaaaaaaaaaaaaaaaaaaaaaaaaaaaaaaaaaaaaaaaaaaaaaagaauu

SEQ ID NO: 15327 - RNA, 1717 nt, Artificial Sequence
  mRNA product Design a-1 (hSL-A64-N5) comprising derived and/or modified sequence from LASV(G1442-SLE-2011;Clade IV)__AIT17180__GPCmut1 (opt5)
aggagagucccgcagucggcguccagcggcucugcuuguucgugugugugucguugcaggccuuauucaagcuuaccaugggccagaucgugaccuucuuucaagaggucccccacguuauugaagaggugaugaacaucgugcugauugcccucagcauccuggcuguccuuaaggggcuguacaauguggccacaugcggacucauuggccugguuacguuccuucugcucugugggagauccugcaccacaacccuguauaaaggaguguacgaacugcagacacucgagcugaacauggaaacccuuaauaugacaaugccucugucuuguaccaagaacaauagccaucacuauauccgggucggcaacgagacggggcucgagcugacccuuacaaauaccuccaucauuaaccauaaauuuugcaaucugucugacgcgcacaagaaaaaccucuacgaucaugcucugaugagcaucauuuccacauuccaccugucuaucccgaauuuuaaccaguaugaagccaugagcugugacuucaauggaggcaagauuuccgugcaguacaaccucagccacucuuaugccggcgaugcugccaaucauugcgggaccguugcuaacggagugcugcaaacguuuaugcgcauggccuggggcggguccuacaucgcgcuugacagcggaugcggcaacugggauuguauuaugacaucuuaccaguaucugaucauccagaauaccacaugggacgaucacugccaguucucccggcccagcccuauuggguaccucggacugcuuucucaacgcaccagagacgucuauaucucccggcgccgccggggcaccuuuacauggacgcugagcgauuccgagggcaaggacacccccgggggauacugucugacaagauggaugcucauugaagccgagcugaaaugcuucggcaacaccgcuguggccaaguguaaugagaaacaugaugaagaguuuugcgacaugcuucggcuguucgauuuuaacaagcaggcuauccagcgccucaaagcccccgcgcagaugucuauucaacugaucaauaaggccgugaacgcucuuaucaaugaccagcugauuaugaagaaccaccucagagacaucaugugcauuccuuauugcaauuacagcaaauauugguaccugaacaauacagccaccggaaagacgucccugcccaaauguuggcucaucagcaacggcucuuaccugaaugagacacacuucuccgaugacauugaacaggaggcugauaacaugaucaccgagaugcuucaaaaggaauauauggagcggcaggggaaaaccccucugggacucgucgaccuguucguuuuuagcacaucuuucuaccugaucagcauuuuucuucaucucgugaagaucccgacccaccgccauauugugggcaaauccugccccaagccucacagacugaaucauaugggcaucuguucuugcgggcuguauaagcagcccggagucccugugcgguggaaacgcugaggacuagucccuguucccagagcccacuuuuuuuucuuuuuuugaaauaaaauagccugucuuucagaucucaaaggcucuuuucagagccaccaaaaaaaaaaaaaaaaaaaaaaaaaaaaaaaaaaaaaaaaaaaaaaaaaaaaaaaaaaaaaaaaagaauu

SEQ ID NO: 15328 - RNA, 1717 nt, Artificial Sequence
  mRNA product Design a-1 (hSL-A64-N5) comprising derived and/or modified sequence from LASV(G3010-SLE-2013;Clade IV)__AIT17344__GPCmut1 (opt5)
aggagagucccgcagucggcguccagcggcucugcuuguucgugugugugucguugcaggccuuauucaagcuuaccaugggccagaucgugaccuucuuucaagaggucccccacguuauugaagaggugaugaacaucgugcugauugcccucagcauccuggcuguccuuaaggggcuguacaauuucgccacaugcggacucgugggccugguuacguuucuucugcucugugggagauccugcaccacaucucuguauaaaggaguguacgaacugcagacccucgagcugaacauggaaacacuuaauaugaccaugccucugagcuguacaaagaacaauucccaucacuauauuauggucggcaacgagaccgggcucgagcugacgcuuaccaauacaucuaucaucaaccauaaauucugcaaucugagcgacgcgcacaagaaaaaccucuacaaucaugcucugauguccauuaucucuaccuuucaccugagcauuccgaacuucaaucaguaugaagccauguccugugauuuuaacggaggcaagaucagcgugcaguacaaucucucucacuccuaugccggcgacgcugccagccauugcgggacaguugcuaacggagugcugcaaaccuucaugcggauggccuggggcgggucuuacauugcgcuugauuccggaugcggcaagugggacuguaucaugacgagcuaucaguaccugauuauccagaacacaaccugggaggaucacugccaguuuucucgccccuccccuaucggguaucucggacugcuuagccaaagaacacgggacauuuacaucucccgcagacgccggggcaccuucaccuggacacugucugauagcgaaggcaaagacacgcccgggggauauugucugacccgguggaugcucauugaggccgagcugaagugcuuuggcaauacagcugucgccaaauguaacgaaaagcaugaugaggaguucugcgacaugcuucgccuguuugauuucaauaaacaggcuauccagagacucaagacccccgcccagauguccauucaacugaucaacaaggcggugaaugcccuuaucaacgaccagcugauuaugaaaaaucaccuccgggauaucaugugcauuccuuacugcaacuauagcaaguacugguaccugaaucacacaaccacgggaaaaacaucucugcccaaguguuggcucguguccaacggcagcuaucugaaugaaacccauuucucugacgacaucgagcagcaagcugauaacaugauuaccgagaugcuucagaaagaauacauggagcgccaggggaagacaccucugggacucgucgaccuguuuguuuucagcaccuccuuuuaucugaucucuaucuuccuucaccucgugaaaauuccgacacauagacacaucgugggcaagagcugccccaagccucaucggcugaaucacaugggcauuuguuccugcgggcuguacaaacagcccggagucccugugcgcuggaagagaugaggacuagucccuguucccagagcccacuuuuuuuucuuuuuuugaaauaaaauagccugucuuucagaucucaaaggcucuuuucagagccaccaaaaaaaaaaaaaaaaaaaaaaaaaaaaaaaaaaaaaaaaaaaaaaaaaaaaaaaaaaaaaaaaagaauu

SEQ ID NO: 15329 - RNA, 1717 nt, Artificial Sequence
  mRNA product Design a-1 (hSL-A64-N5) comprising derived and/or modified sequence from LASV(G502-SLE-2009;Clade IV)__AIT17126__GPCmut1 (opt5)
aggagagucccgcagucggcguccagcggcucugcuuguucgugugugugucguugcaggccuuauucaagcuuaccaugggccagaucgugaccuucuuucaagaggucccccacguuauugaagaggugaugaacaucgugcugauugcccucagcauccuggcuguccuuaaggggcuguacaauuucgccacaugcggacucgugggccugcuuacguuucugcuccugugugggagauccugcaccacaggacuguauaaaggcguuuacgaacuccagacccuggagcuuaacauggaaacacugaauaugaccaugccucucucuuguacaaagaacaauagccaucacuauauuaugguggggaacgagaccggacuggagcuuacgcugaccaauacauccaucaucaaccauaaauucugcaaucucucugacgcgcacaagaaaaaccuguacgaucaugcucugaugagcauuaucuccaccuuucaccucucuauuccgaauuucaaccaguaugaagccaugagcugugacuuuaauggcggcaagaucuccguccaguacaaccugagccacucuuaugccggggaugcugccgaccauugcggaacaguggcuaauggcguucuucaaaccuucaugcggauggccuggggaggguccuacauugcgcuggauagcggcugcgggagaugggacuguaucaugacgucuuaccaguaucucauuauccagaacacaaccugggaggaucacugccaguuuucccggcccagcccuaucggauaccugggccuucugucucaacgcacaagagacauuuauaucucccggcgccgccggggcaccuucaccuggacacugagcgauuccgaagggaaggacacgcccggaggcuacugucucaccagauggaugcugauugaggccgagcuuaaaugcuuugggaacacagcuguggccaaguguaaugaaaaacaugaugaggaguucugcgacaugcugcggcucuuugauuucaacaagcaggcuauccagcgccugaaagcccccgcgcagaugucuauucaacuuaucaauaaggccgucaacgcucugaucaaugaccagcucgugaugaagaaccaccugagagacauuaugugcaucccuuauugcaauuacagccgguauugguaccugaaccacaccacaaccggccgcacgucccuccccaaauguuggcuggugagcaaugggucuuaccuuaacgaaacacauuucuccgaugacauugagcagcaagccgauaauaugaucaccgagaugcugcagaaggaauauauggagagacagggaaaaaccccucucggccuggucgaccuguuuguuuucagcacaucuuuuuaccuuauuagcaucuuccuccaccuggugaagaucccgacccaucggcacauugugggcaaauccugccccaagccucaucgccugaaccacauggggaucuguucuugcggacucuauaaacagcccggcgucccugugaaguggaagagaugaggacuagucccuguucccagagcccacuuuuuuuucuuuuuuugaaauaaaauagccugucuuucagaucucaaaggcucuuuucagagccaccaaaaaaaaaaaaaaaaaaaaaaaaaaaaaaaaaaaaaaaaaaaaaaaaaaaaaaaaaaaaaaaaagaauu

SEQ ID NO: 15330 - RNA, 1717 nt, Artificial Sequence
  mRNA product Design a-1 (hSL-A64-N5) comprising derived and/or modified sequence from LASV(G733-SLE-2010;Clade IV)__AIT17154__GPCmut1 (opt5)
aggagagucccgcagucggcguccagcggcucugcuuguucgugugugugucguugcaggccuuauucaagcuuaccaugggccagaucgugaccuucuuucaagaggucccccacguuauugaagaggugaugaacaucgugcugauugcccucagcauccuggcuguccuuaaggggcuguacaauuucgccacaugcggaauugugggccucguuuccuuucugcuucugugugggagaucuugcacgaccagccucuauaaaggaguguacgaacugcagacacuggagcucaacauggaaacccugaauaugacaaugccucuuuccuguaccaagaacaauucucaucacuauaucauggucggcaacgagacagggcuggagcucacccugacgaauaccagcaucauuaaccauaaauucugcaaucuuuccgacgcgcacaagaaaaaccuguacgaucaugcucucaugucuaucauuagcacauuucaccuguccaucccgaauuucaaccaguaugaagccaugagcugugacuuuaauggaggcaagauuucugugcaguacaaccugucccacagcuaugccggcgaugcugccaaucauugcgggaccaucgcuaacggaguucuccaaacauucaugcggauggccuggggcgggucuuacauugcgcuggacuccggaugcgauagaugggacuguaucaugaccagcuaccaguaucuuaucauucagaacacgacaugggaggaucacugccaguuuucucggcccuccccuaucggcuaccuggggcuccugagccaacgcaccagagacauuuauaucucccggcgccgccggggaacauucaccuggacccucucugauagcgaaggcaaggacacacccggcggguacugucugacgagauggaugcugauugaggccgagcucaaaugcuuuggaaauaccgcuguggccaaguguaacgaaaaacaugaugaggaguucugcgacaugcugcggcuuuuugauuucaauaagcaggcuauccagcgccugaaagcccccgcgcagauguccauccaacucauuaacaaggccgucaaugcucugaucaacgaccagcuuauuaugaagaaucaccugagagacaucaugugcauuccuuauugcaacuacagcaaauauugguaccucaaucacacaaccacagggaagaccucucugcccaaauguuggcugguguccaacggaagcuaccucaaugaaacgcauuucucugaugacaucgagcagcaagccgauaacaugaucacagagaugcugcagaaggaauauauggagcggcagggcaaaaccccucuugggcugguggaccucuuugucuucagcaccuccuuuuaccugauuucuaucuuccugcaccuuguuaagauuccgacacaucgccacguggugggaaaaagcugccccaagccucauagacucaaucacaugggcaucuguuccugcggccuguaugggcagcccggagucccugugaaguggaaacggugaggacuagucccuguucccagagcccacuuuuuuuucuuuuuuugaaauaaaauagccugucuuucagaucucaaaggcucuuuucagagccaccaaaaaaaaaaaaaaaaaaaaaaaaaaaaaaaaaaaaaaaaaaaaaaaaaaaaaaaaaaaaaaaaagaauu

SEQ ID NO: 15331 - RNA, 1717 nt, Artificial Sequence
  mRNA product Design a-1 (hSL-A64-N5) comprising derived and/or modified sequence from MOPV/LASV reassortant(IGS-1;Clade IV)__AFY05576__GPCmut1 (opt5)
aggagagucccgcagucggcguccagcggcucugcuuguucgugugugugucguugcaggccuuauucaagcuuaccaugggccagaucgugaccuucuuucaagaggucccccacguuauugaagaggugaugaacaucgugcugauugcccucagcguccuggcugugcuuaaggggcuguacaauuucgccacaugcggacucguuggccuggugacguuucuucugcucugugggagauccugcaccacaucucuguauaaaggagucuacgaacugcagacccucgagcugaacauggaaacacuuaauaugaccaugccucugagcuguacaaagaacaauucccaucacuauaucauggugggcaacgagaccgggcucgagcugacgcuuaccaauacaucuauuaucaaccauaaauucugcaaucugagcgacgcgcacaagaaaaaccucuacgaucaugcucugauguccaucauuucuaccuuucaccugagcaucccgaauuucaaccaguaugaagccauguccugugacuuuaauggaggcaagauuagcguucaguacaaccucucucacuccuaugccggcgaugcugccaaucauugcgggacaguggcuaacggaguccugcaaaccuucaugcggauggccuggggcgggagcuacaucgcgcuugacucuggaugcggcaacugggauuguauuaugacguccuaccaguaucugaucauucagaauacaaccugggaggaccacugccaguuuagcagacccucuccuaucggguaccucggacugcuuucccaacggacacgcgauaucuauauuagcagacggcgccggggcaccuucaccuggacacuguccgacucugaaggcgaggauacgcccgggggauacugucugacccgcuggaugcucaucgaggccgaacugaagugcuuuggcaacacagcuguggccaaauguaaugagaagcaugacgaagaguucugcgauaugcuuagacuguuugacuucaacaaacaggcuauucagcggcucaaggcccccgcgcagaugagcauccaacugauuaauaaagccgugaacgcucuuaucaaugaucagcugaucaugaagaaccaccuccgcgacauuaugugcaucccuuauugcaauuacuccaaguauugguaccugaaccacaccacaaccggaagaacgagccugcccaaauguuggcucgucucuaauggcuccuaccugaacgagacacauuucagcgacgauauugagcagcaagccgacaauaugaucaccgaaaugcuucagaaggaguauauggaacggcaggggaaaaccccucugggacucguugaucuguuuguguucucuaccagcuuuuaccugauuuccaucuuccuucaccucgugaagaucccgacacaucgccacauugucggcaaaucuugccccaagccucauagacugaaccacaugggcaucuguagcugcgggcuguauaaacagcccggagugccuguuaaguggaagcggugaggacuagucccuguucccagagcccacuuuuuuuucuuuuuuugaaauaaaauagccugucuuucagaucucaaaggcucuuuucagagccaccaaaaaaaaaaaaaaaaaaaaaaaaaaaaaaaaaaaaaaaaaaaaaaaaaaaaaaaaaaaaaaaaagaauu

SEQ ID NO: 15332 - RNA, 1717 nt, Artificial Sequence
  mRNA product Design a-1 (hSL-A64-N5) comprising derived and/or modified sequence from LASV(LM765-SLE-2012;Clade IV)__AIT17814__GPCmut1 (opt5)
aggagagucccgcagucggcguccagcggcucugcuuguucgugugugugucguugcaggccuuauucaagcuuaccaugggccagaucgugaccuucuuucaagaggucccccacguuauugaagaggugaugaacaucgugcugauugcccucagcauccuggcuguccuuaaggggcuguacaauuucgccacaugcggacucgugggccugguuacguuucuucugcucugugggagauccugcaccacaucucuguauaaaggaguguacgaacugcagacccucgagcugaacauggaaacacuuaauaugaccaugccucugagcuguacaaagaacaauucccaucacuauauuauggucggcaacgagaccgggcucgagcugacgcuuaccaauacaucuaucaucgaccauaaauucugcaaccugagcgaugcgcaccggaagaaucucuacgaccaugcucugauguccauuaucucuaccuuucaccugagcauuccgaacuucaaucaguaugaagccauguccugugauuuuaacggaggcaaaaucagcgugcaguacaaucucucucacuccuaugccaaggacgcugccgaucauugcggcacaguugcuaacggggugcugcaaaccuucaugcgcauggccuggggaggcagcuacauugcgcuugacucugggugcggacggugggauuguaucaugacguccuaccaguaucugauuauccagaauacaaccugggaggaccacugccaguuuagccgccccucuccuaucggcuaccucgggcugcuuucccaaagaacacgggauauuuauaucagccgcagacgccggggaaccuucaccuggacacuguccgacucugaaggcaaggauacgcccggcggguacugucugacccgguggaugcucauugaggccgagcugaaaugcuuuggaaacacagcugucgccaaguguaacgaaaaacaugacgaggaguucugcgauaugcuucgccuguuugacuucaauaagcaggcuauccagagacucaaagcccccgcgcagaugagcauucaacugaucaacaaggccgugaaugcucuuaucaacgaccagcugauuaugaagaaucaccuccgggauaucaugugcauuccuuauugcaacuacuccaaauauugguaccugaaucacaccacaaccgggaagacgagccugcccaaauguuggcucgugucuaacggauccuaccugaaugaaacacauuucagcgacgauaucgagcagcaagccgacaacaugauuaccgagaugcuucagaaggaauauauggagcgccagggcaaaaccccucuggggcucgucgaucuguuuguuuucucuaccagcuuuuaccugaucuccaucuuccuucaccucgugaagauuccgacacauagacacaucgugggaaaacccugcccuaagccccaucggcugaaucacaugggcauuuguucuugcggccuguauaagcagccugggguccccgugaaauggaagcgcugaggacuagucccuguucccagagcccacuuuuuuuucuuuuuuugaaauaaaauagccugucuuucagaucucaaaggcucuuuucagagccaccaaaaaaaaaaaaaaaaaaaaaaaaaaaaaaaaaaaaaaaaaaaaaaaaaaaaaaaaaaaaaaaaagaauu

SEQ ID NO: 15333 - RNA, 1717 nt, Artificial Sequence
  mRNA product Design a-1 (hSL-A64-N5) comprising derived and/or modified sequence from LASV(LM776-SLE-2012;Clade IV)__AIT17824__GPCmut1 (opt5)
aggagagucccgcagucggcguccagcggcucugcuuguucgugugugugucguugcaggccuuauucaagcuuaccaugggccagaucgugaccuucuuucaagaggucccccacguuauugaagaggugaugaacaucgugcugauugcccucagcauccuggcuguccuuaaggggcuguacaauuucgccacaugcggacucgugggccugguuacguuucuucugcucugugggagauccugcaccacaucuguguauaaaggagucuacgaacugcagacccuggagcucaacauggaaacacugaauaugaccaugccucuuagcuguacaaagaacaauucccaucacuauauuauggugggcaacgagaccgggcuggagcucacgcugaccaauacaucuaucaucaaccauaaauucugcaaucuuagcgacgcgcacaagaaaaaccuguacgaucaugcucucauguccauuaucucuaccuuucaccugagcauuccgaauuucaaccaguaugaagccauguccugugacuuuaauggaggcaagaucagcguucaguacaaccugucucacuccuaugccggcgaugcugccaaucauugcgggacaguggcuaacggaguccuccaaaccuucaugcggauggccuggggcgggagcuacauugcgcuggacucuggaugcggcaagugggauuguaucaugacguccuaccaguaucuuauuauccagaacacaaccugggaggaccauugccaguuuagccgccccucuccuaucggguaccugggacuccugucccaaagaacacgggauauuuauaucagccgcagacgccggggcaccuucaccuggacacucuccgacucugaaggcaaagauacgcccgggggauacugucugacccgguggaugcugauugaggccgagcucaagugcuuuggcaauacagcuguggccaaauguaacgaaaagcacgacgaggaguucugcgauaugcugcgccuuuuugacuucaauaaacaggcuauccagagacugaaggcccccgcgcagaugagcauucaacucaucaacaaggccgugaaugcucugaucaacgaucagcuuauuaugaaaaaucaucugcgggacaucaugugcauuccuuauugcaacuacuccaaguauugguaccucaaucacaccacaaccggaaaaacgagccugcccaaguguuggcuggucucuaacggcuccuaccucaaugaaacacacuucagcgacgauaucgagcagcaagccgacaacaugauuaccgagaugcugcagaaagaauauauggagcgccaggggaagaccccucuuggacugguugaucucuuuguguucucuaccagcuuuuaccugaucuccaucuuccugcaucuugugaaaauuccgacacacagacauaucgucggcaagucuugccccaagccucaccggcucaaucacaugggcauuuguagcugcgggcuguauaaacagcccggagugccuguucgcuggaagagaugaggacuagucccuguucccagagcccacuuuuuuuucuuuuuuugaaauaaaauagccugucuuucagaucucaaaggcucuuuucagagccaccaaaaaaaaaaaaaaaaaaaaaaaaaaaaaaaaaaaaaaaaaaaaaaaaaaaaaaaaaaaaaaaaagaauu

SEQ ID NO: 15334 - RNA, 1717 nt, Artificial Sequence
  mRNA product Design a-1 (hSL-A64-N5) comprising derived and/or modified sequence from LASV(Mad39;Clade IV)__ANH09722__GPCmut1 (opt5)
aggagagucccgcagucggcguccagcggcucugcuuguucgugugugugucguugcaggccuuauucaagcuuaccaugggccagaucgugaccuucuuucaagaggucccccacguuauugaagaggugaugaacaucgugcugauugcccucagcauccuggcuguccuuaaggggcuguacaauguggccacaugcggacucauuggccugguuacguuccuucugcucugugggagauccugcaccacaacccuguauaaaggaguguacgaacugcaggcgcucgagcugaacauggaaacacuuaauaugaccaugccucugucuuguacaaagaacaauagccaucacuauauccgggucggcaacgagaccgggcucgagcugacgcuuaccaauacaucccugaucaaccauaaauuuugcaaucucucugacgcucacaagaaaaaccuguacgaucaugcccugaugagcauuaucuccaccuuccaccucucuauuccgaauuuuaaccaguaugaagccaugagcugugacuucaaugauggaaagaucuccgugcaguacaaccugagccacacauaugcuggcgacaccgccaaucauugcggcacgguugcuaacggggugcuucaaacauuuaugcgcauggccuggggaggcucuuacauugcgcuggauuccgggugcggaggcugggacuguaucaugaccagcuaccaguaucucauuauccagaacacaaccugggaggaucacugccaguucucucggcccuccccuaucggguaccugggacuucugagccaacgcaccagagacauuuauaucucucggcgccgccggggcacauuuacguggacccuguccgauagcgaaggcaaggacacacccgggggauacugucucaccagauggaugcugauugaggccgagcuuaaaugcuucggcaauacagcugucgccaaguguaacgaaaaacaugaugaggaauuuugcgacaugcugcgccucuucgauuuuaauaagcaggcuauccagcggcugaaagcccccgcgcagauguccauucaacuuaucaacaaggccgugaaugcucugaucaacgaccagcucauuaugaagaaucaccugagagacaucaugugcauuccuuauugcaacuacucuaaauauugguaccugaaucacaccgugacgggaaagacaagccuccccaaauguuggcuggucuccaacggcagcuaccuuaaugaaacccauuucucugaugacaucgagcagcaagccgauaacaugauuaccgagaugcugcagaaggaauauauggagcggcaggggaaaacaccucucggacugguugaccuguucguguuuuccaccagcuucuaccuuaucucuaucuuucuccaccuggugaagauuccgacacaucgccacgucgugggcaaacccugcccuaagccccauagacugaaucacaugggcaucuguagcugcggguucuauaagcagccuggaguucccgugcgguggaaacgcugaggacuagucccuguucccagagcccacuuuuuuuucuuuuuuugaaauaaaauagccugucuuucagaucucaaaggcucuuuucagagccaccaaaaaaaaaaaaaaaaaaaaaaaaaaaaaaaaaaaaaaaaaaaaaaaaaaaaaaaaaaaaaaaaagaauu

SEQ ID NO: 15335 - RNA, 1717 nt, Artificial Sequence
  mRNA product Design a-1 (hSL-A64-N5) comprising derived and/or modified sequence from LASV(Z0947-SLE-2011;Clade IV)__AIT17840__GPCmut1 (opt5)
aggagagucccgcagucggcguccagcggcucugcuuguucgugugugugucguugcaggccuuauucaagcuuaccaugggccagaucgugaccuucuuucaagaggucccccacguuauugaagaggugaugaacaucgugcugauugcccucagcauccuggcuguccuuaaggggcuguacaauuucgccacaugcggacucgugggccugguuacguuucuucugcucugugggagauccugcaccauuucucuguauaaaggaguguacgaacugcagacacucgagcugaacauggaaacccuuaauaugacaaugccucugagcuguaccaagaacaauucccaucacuauaucauggucggcaacgagacagggcucgagcugacccuuacgaauaccucuaucauuaaccauaaauucugcaaucugagcgacgcgcacaagaaaaaccucuacgaucaugcucugauguccaucauuucuacauuucaccugagcaucccgaauuucaaccaguaugaagccauguccugugacuuuaauggaggcaagauuagcgugcaguacaaccucucucacuccuaugccggcgaugcugccaaucauugcgggaccguugcuaacggagugcugcaaacauucaugcggauggccuggggcgggagcuacaucgcgcuugacucuggaugcgauagaugggacuguauuaugaccuccuaccaguaucugaucauccagaacacgacaugggaggaucacugccaguuuagccggcccucuccuauuggcuaccucgggcugcuuucccaacgcaccagagacaucuauauuagccggcgccgccggggaacauucaccuggacccuguccgauucugaaggcaaggacacacccggcggguacugucugacgagauggaugcucaucgaggccgagcugaaaugcuuuggaaauaccgcugucgccaaguguaacgaaaaacaugaugaggaguucugcgacaugcuucggcuguuugauuucaauaagcaggcuauucagcgccucaaagcccccgcgcagaugagcauccaacugaucaacaaggccgugaaugcucuuauuaacgaccagcugaucaugaagaaucaccucagagacauuaugugcaucccuuauugcaacuacuccaaauauugguaccugaaucacacaaccacagggaagaccagccugcccaaauguuggcucgugucuaacggauccuaccugaaugaaacgcauuucagcgaugacauugagcagcaagccgauaacaugaucacagagaugcuucagaaggaauauauggagcggcagggcaaaaccccucuggggcucgucgaccuguuuguuuucucuaccagcuuuuaccugaucuccauuuuccuucaccucgugaagaucccgacacaucgccacauugugggaaaacccugcccuaagccccauagacugaaucacaugggcaucuguucuugcggccuguauaagcagccugggguccccgugaaauggaagcggugaggacuagucccuguucccagagcccacuuuuuuuucuuuuuuugaaauaaaauagccugucuuucagaucucaaaggcucuuuucagagccaccaaaaaaaaaaaaaaaaaaaaaaaaaaaaaaaaaaaaaaaaaaaaaaaaaaaaaaaaaaaaaaaaagaauu

SEQ ID NO: 15336 - RNA, 1748 nt, Artificial Sequence
  mRNA product Design a-1 (hSL-A100) comprising derived and/or modified sequence from LASV(Josiah;Clade IV)__NP_694870__GPCmut1 (opt1) R8476
aggagagucccgcagucggcguccagcggcucugcuuguucgugugugugucguugcaggccuuauucaagcuuaccaugggccagaucgugaccuucuuccaggaggucccccacgugaucgaggaggugaugaacaucguccugaucgcccucagcgugcuggccgugcugaaggggcucuacaacuucgcgaccugcggccuggucgggcuggugacguuccuccugcugugcggccgcuccugcaccaccagccucuacaaggggguguacgagcugcagacccuggagcucaacauggagacgcugaacaugaccaugccgcuguccugcaccaagaacaacagccaccacuacaucauggucggcaacgagaccggccucgagcugacgcugaccaacaccuccaucaucaaccacaaguucugcaaccucagcgacgcccacaagaagaaccuguacgaccacgcccugauguccaucaucagcaccuuccaccucuccauccccaacuucaaccaguacgaggccaugagcugcgacuucaacgggggcaagaucuccgugcaguacaaccugagccacuccuacgccggggacgcggccaaccacugcggcacgguggccaacgggguccugcagaccuucaugcggauggccuggggcggcagcuacaucgcgcucgacuccgggugcggcaacugggacugcaucaugaccagcuaccaguaccugaucauccagaacaccacgugggaggaccacugccaguucucccggcccagccccaucggguaccugggccuccugucccagcgcacccgggacaucuacaucagccgccggcgccggggcaccuucaccuggacgcugagcgacuccgaggggaaggacaccccgggcggguacugccugacccgcuggaugcucaucgaggccgagcugaagugcuucggcaacaccgccguggccaagugcaacgagaagcacgacgaggaguucugcgacaugcugcggcuguucgacuucaacaagcaggccauccagcgccugaaggcgcccgcccagaugagcauccagcugaucaacaaggccgugaacgcccucaucaacgaccagcugaucaugaagaaccaccuccgggacaucaugugcauccccuacugcaacuacuccaaguacugguaccucaaccacacgaccaccggccgcaccagccugcccaagugcuggcuggucuccaacggcagcuaccucaacgagacgcacuucuccgacgacaucgagcagcaggccgacaacaugaucaccgagaugcugcagaaggaguacauggagcggcaggggaagacgccccugggccucguggaccuguucguguucagcaccuccuucuaccugaucagcaucuuccugcaccucgucaagaucccgacccaccgccacaucguggggaaguccugccccaagccccaccggcugaaccacaugggcaucugcagcugcgggcuguacaagcagcccggcgugccggucaaguggaagcgcugaggacuagucccuguucccagagcccacuuuuuuuucuuuuuuugaaauaaaauagccugucuuucagaucucaaaggcucuuuucagagccaccaaaaaaaaaaaaaaaaaaaaaaaaaaaaaaaaaaaaaaaaaaaaaaaaaaaaaaaaaaaaaaaaaaaaaaaaaaaaaaaaaaaaaaaaaaaaaaaaaaaaa

SEQ ID NO: 15337 - RNA, 1745 nt, Artificial Sequence
  mRNA product Design a-1 (hSL-A100) comprising derived and/or modified sequence from LASV(LP;Clade I)__AAF86701__GPCmut1 (opt1)
aggagagucccgcagucggcguccagcggcucugcuuguucgugugugugucguugcaggccuuauucaagcuuaccaugggccagaucaucaccuucuuccaggaggugccccacgucaucgaggaggugaugaacaucgugcugaucgcccucagccugcuggccauccucaaggggcuguacaacaucgcgaccugcggcaucaucgggcuggucgccuuccucuuccugugcggcaaguccugcagccugacgcucaagggcggguacgagcugcagacccuggagcucaacauggagacccugaacaugaccaugccgcuguccugcacgaagaacagcucccaccacuacauccgcgugggcaacgagaccgggcucgagcugacccugaccaacacgagcaucaucaaccacaaguucugcaaccucuccgacgcccacaagaagaaccuguacgaccacgcccugaugagcaucaucuccaccuuccaccucagcauccccaacuucaaccaguacgaggccauguccugcgacuucaacggcgggaagaucagcgugcaguacaaccugucccacagcuacgcgggcgacgccgccgagcacugcgggaccgucgccaacggcgugcugcagaccuucaugcggauggcguggggcgggcgcuacaucgcccucgacuccggcugcgggaacugggacugcaucaugacgagcuaccaguaccugaucauccagaacaccaccugggaggaccacugccaguucucccggcccagccccaucggcuaccugggccuccugucccagcgcacccgggacaucuacaucagccgccggcgccgggggacguucaccuggacccugagcgacuccgagggcaacgagacccccgggggcuacugccugacgcgcuggaugcucaucgaggccgagcugaagugcuucgggaacaccgccguggccaagugcaacgagaagcacgacgaggaguucugcgacaugcugcggcuguucgacuucaacaagcaggcgauccgccggcugaaggcccccgcccagaugagcauccagcugaucaacaaggccgucaacgcccucaucaacgaccagcugaucaugaagaaccaccuccgcgacaucaugugcauccccuacugcaacuacuccaaguacugguaccucaaccacaccagcuccggccggaccagccugcccaagugcuggcugaucuccaacgggagcuaccucaacgagacgcaguucuccgacgacaucgagcagcaggcggacaacaugaucaccgagaugcugcagaaggaguacaucgagcgccagggcaagaccccgcuggggcucguggacaucuucaucuucagcaccuccuucuaccugaucagcaucuuccugcaccugaucaagaucccgacgcaccggcacaucgugggcaagcccugccccaagccccaccgccucaaccacaugggggucugcuccugcggccuguacaagcacccgggcgugcccaccaaguggaagcggugaggacuagucccuguucccagagcccacuuuuuuuucuuuuuuugaaauaaaauagccugucuuucagaucucaaaggcucuuuucagagccaccaaaaaaaaaaaaaaaaaaaaaaaaaaaaaaaaaaaaaaaaaaaaaaaaaaaaaaaaaaaaaaaaaaaaaaaaaaaaaaaaaaaaaaaaaaaaaaaaaaaaa

SEQ ID NO: 15338 - RNA, 1745 nt, Artificial Sequence
  mRNA product Design a-1 (hSL-A100) comprising derived and/or modified sequence from LASV(803213;Clade II)__AAF86703__GPCmut1 (opt1)
aggagagucccgcagucggcguccagcggcucugcuuguucgugugugugucguugcaggccuuauucaagcuuaccaugggccagaucaucaccuucuuccaggaggugccccacgucaucgaggaggugaugaacaucgugcugaucgcccucagccugcuggccauccucaaggggaucuacaacgucgcgaccugcggccuguucgggcugaucuccuuccuccugcugugcggccgcagcugcuccgugacguacaaggggguguacgagcuccagacccuggagcugaacauggccaaccucaacaugaccaugccgcugagcugcaccaagaacaacucccaccacuacaucauggucggcaacgagacgggccuggagcucacccugaccaacaccagcaucaucaaccacaaguucugcaaccuguccgacgcccacaagaagaaccucuacgaccacgcccugaugagcaucaucuccacguuccaccugagcauccccaacuucaaccaguacgaggccauguccugcgacuucaacgggggcaagaucagcgugcaguacaaccucucccacagcuucgcgguggacgccgccaaccacugcgggaccaucgccaacggcguccugcagaccuucaugcggauggcguggggcggguccuacaucgcccuggacagcggcugcgggaacugggacugcaucaugaccuccuaccaguaccucaucauccagaacacgaccugggaggaccacugccaguucagccgccccucccccaucggcuaccuggggcugcucagccagcggacccgcgacaucuacaucagccggcgccgccggggcaccuucacguggacccucuccgacagcgagggcaacgaggcccccgggggcuacugccugacccgguggaugcugaucgaggccgagcucaagugcuucgggaacaccgccguggcgaagugcaacgagaagcacgacgaggaguucugcgacaugcugcgccuguucgacuucaacaagcaggccaucaagcggcucaagacgcccgcccagauguccauccagcugaucaacaaggccgugaacgcccugaucaacgaccagcucaucaugaagaaccaccuccgcgacaucaugugcauccccuacugcaacuacagccgguacugguaccugaaccacaccgucaccgggaagaccucccugccccgcugcuggcuggugagcaacggcuccuaccugaacgagacgcacuucagcgacgacaucgagcagcaggcggacaacaugaucaccgagaugcuccagaaggaguacauggaccggcagggcaagaccccgcuggggcugguggaccucuucgucuucuccaccagcuucuaccugaucuccaucuuccugcaccuggugaagaucccgacgcaccgccacaucgugggcaagcccugccccaagccccaccggcucaaccacauggggaucugcagcugcggccuguacaagcacccggggguccccgugaaguggaagcgcugaggacuagucccuguucccagagcccacuuuuuuuucuuuuuuugaaauaaaauagccugucuuucagaucucaaaggcucuuuucagagccaccaaaaaaaaaaaaaaaaaaaaaaaaaaaaaaaaaaaaaaaaaaaaaaaaaaaaaaaaaaaaaaaaaaaaaaaaaaaaaaaaaaaaaaaaaaaaaaaaaaaaa

SEQ ID NO: 15339 - RNA, 1745 nt, Artificial Sequence
  mRNA product Design a-1 (hSL-A100) comprising derived and/or modified sequence from LASV(GA391;Clade III)__CAA36645__GPCmut1 (opt1)
aggagagucccgcagucggcguccagcggcucugcuuguucgugugugugucguugcaggccuuauucaagcuuaccaugggccagaucgugaccuucuuccaggaggucccccacgugaucgaggaggugaugaacaucguccugaucgcccucagcauccuggccauccugaaggggcucuacaacguggcgaccugcggccugaucgggcuggugacguuccuccugcuguccggccgcagcugcucccucaucuacaaggggaccuacgagcugcagacccuggagcucaacauggagacccugaacaugacgaugccgcugagcugcaccaagaacaacucccaccacuacauccgggucggcaacgagaccggccucgagcugacccugacgaacaccagcauccucaaccacaaguucugcaaccuguccgacgcccacaagcgcaaccuguacgaccacagccucauguccaucaucagcaccuuccaccuguccauccccaacuucaaccaguacgaggccaugagcugcgacuucaacgggggcaagaucaccgugcaguacaaccugucccacagcuucgccguggacgccgcggggcacugcggcacgcucgccaacgggguccugcagaccuucaugcggauggccuggggcggcuccuacaucgcccuggacagcgggugcggcaacugggacugcaucaugaccuccuaccaguaccucaucauccagaacaccacgugggacgaccacugccaguucagccggcccucccccaucggguaccugggccugcucagccagcgcacccgggacaucuacaucagccgccggcgccggggcaccuucaccuggacgcucuccgacagcgaggggaacgagaccccgggcggguacugccugacccgcuggaugcugaucgaggcggagcucaagugcuucggcaacaccgccguggccaagugcaacgagaagcacgacgaggaguucugcgacaugcugcggcuguucgacuucaacaagcaggccauccgccggcucaagacgcccgcccagauguccauccagcugaucaacaaggcggugaacgcccugaucaacgaccagcucaucaugaagaaccaccuccgcgacaucaugugcauccccuacugcaacuacagccgguacugguaccugaaccacaccuccaccggcaagaccagccugccccgcugcuggcugaucuccaacggcagcuaccugaacgagacgaaguucuccgacgacaucgagcagcaggccgacaacaugaucaccgagaugcuccagaaggaguacaucgaccggcaggggaagacgccccugggccuggucgaccuguucguguucagcaccuccuucuaccucaucagcaucuuccugcaccuggugaagaucccgacccaccgccacaucgucgggaagcccugccccaagccccaccggcucaaccacaugggcaucugcuccugcgggcuguacaagcagccgggcgugcccgugcgcuggaagcggugaggacuagucccuguucccagagcccacuuuuuuuucuuuuuuugaaauaaaauagccugucuuucagaucucaaaggcucuuuucagagccaccaaaaaaaaaaaaaaaaaaaaaaaaaaaaaaaaaaaaaaaaaaaaaaaaaaaaaaaaaaaaaaaaaaaaaaaaaaaaaaaaaaaaaaaaaaaaaaaaaaaaa

SEQ ID NO: 15340 - RNA, 1748 nt, Artificial Sequence
  mRNA product Design a-1 (hSL-A100) comprising derived and/or modified sequence from LASV(AV;Clade V)__CCA30314__GPCmut1 (opt1)
aggagagucccgcagucggcguccagcggcucugcuuguucgugugugugucguugcaggccuuauucaagcuuaccaugggccagaucgugaccuucuuccaggaggucccccacgugaucgaggaggugaugaacaucguccugaucgcccucagcauccuggccgugcugaaggggcucuacaacaucgcgaccugcggccugaucgggcugaucacguuccuccugcugugcggccgcuccugcagcuccaaccucuacaaggggguguacgagcugcagagccuggaccucaacauggagacccugaacaugaccaugccgcuguccugcaccaagaacaacagccaccacuacauccgggucggcaacgacacgggccucgagcugacccugaccaacaccuccauccucaaccacaaguucugcaaccugagcgacgcccacaagaaggaccuguacgaccacgcccucauguccaucaucagcacguuccaccuguccauccccaacuucaaccaguacgaggccaugagcugcgacuucaacgggggcaagaucuccgugcaguacaaccugagccacuccuacgccaucgacgcggccaaccacugcgggaccguggccaacggcauccuccagaccuucaugcgcauggccuggggcgggagcuacaucgcgcuggacuccggcugcgggaacugggacugcaucaugaccagcuaccaguaccugaucauccagaacacgaccugggagaaccacugccaguucucccgccccagccccaucggcuaccucgggcugcugagccagcggacccgcgacaucuacaucucccggcgccgccggggcaccuucacguggacccugagcgacuccgagggcaacgccacccccgggggcuacugccucacccgguggaugcugaucgaggccgagcugaagugcuucgggaacacggccgucgccaagugcaacgagaagcacgacgaggaguucugcgacaugcuccgccuguucgacuucaacaagcaggcgaucagccggcugaagucccccgcccagaugagcauccagcucaucaacaaggccgugaacgcccugaucaacgaccagcugaucaugaagaaccaccuccgcgacaucaugugcauccccuacugcaacuacuccaaguacugguaccugaaccacaccaucaccgggaagaccagccugcccaagugcuggcucguguccaacggcagcuaccugaacgagacgcacuucuccgacgacaucgagcagcaggccgacaacaugaucaccgagaugcugcagaaggaguacauggagcggcagggcaagaccccgcucgggcuggucgaccuguucguguucagcaccuccuucuaccugaucagcaucuuccuccgccuggugaagaucccgacgcaccggcacaucgucggcaagcccugccccaagccccaccgccugaaccacauggggaucugcuccugcggccucuacaagcagccgggggugcccgugcgguggaagcgcugaggacuagucccuguucccagagcccacuuuuuuuucuuuuuuugaaauaaaauagccugucuuucagaucucaaaggcucuuuucagagccaccaaaaaaaaaaaaaaaaaaaaaaaaaaaaaaaaaaaaaaaaaaaaaaaaaaaaaaaaaaaaaaaaaaaaaaaaaaaaaaaaaaaaaaaaaaaaaaaaaaaaa

SEQ ID NO: 15341 - RNA, 1745 nt, Artificial Sequence
  mRNA product Design a-1 (hSL-A100) comprising derived and/or modified sequence from LASV(Togo/2016/7082;Clade VI)__AMR44577__GPCmut1 (opt1)
aggagagucccgcagucggcguccagcggcucugcuuguucgugugugugucguugcaggccuuauucaagcuuaccaugggccagaucaucaccuucuuccaggaggugccccacgucaucgaggaggugaugaacaucgugcugaucgcccucagccugcuggccauccucaagggggucuacaacguggcgaccugcggcaucaucgggcuggugacguuccuguuccucugcggccgcuccugcagccugaucuacaagggguccuacgagcugcagacccucgagcugaacauggagacccugaacaugaccaugccgcucagcugcacgaagaacuccagccaccacuacauccgggucggcaacgagaccggccuggagcugacccucaccaacacguccaucaucaaccacaaguucugcaaccugagcgacgcccacaagcgcaaccuguacgaccacgcccucauguccauccugagcaccuuccaccuguccauccccaacuucaaccaguacgaggccaugagcugcgacuucaacgggggcaagaucuccgugcaguacaaccucagccacgccuacgcgguggacgccgccgagcacugcgggaccgucgccaacggcgugcugcagaccuucaugcggauggcguggggcggguccuacaucgcccuggacagcggcugcgggaacugggacugcaucaugacguccuaccaguaccucaucauccagaacaccaccugggaggaccacugccaguucagccggcccucccccaucggcuaccuggggcugcucagccagcgcacccgggacaucuacaucagccgccggcgccggggcacguucaccuggacccucuccgacagcgagggcaacgagacccccgggggcuacugccugacgcgcuggaugcugaucgaggccgagcucaagugcuucgggaacaccgccguggccaagugcaacgagaagcacgacgaggaguucugcgacaugcugcggcuguucgacuucaacaagcaggcgauccagcgccucaagucccccgcccagaugagcauccagcugaucaacaaggccgucaacgcccugaucaacgaccagcucaucaugaagaaccaccuccgggacaugaugugcauccccuacugcaacuacuccaaguacugguaccugaaccacaccagcuccgggcgcaccagccugcccaagugcuggcugguguccaacggcagcuaccugaacgagacgcacuucuccgacgacaucgagcagcaggccgacaacaugaucaccgagaugcuccagaaggaguacaucgaccggcagggcaagaccccgcuggggcugguggaccucuucgucuucagcaccuccuucuaccugaucagcaucuuccugcaccugaucaagaucccgacgcaccgccacaucgugggcaagcccugccccaagccccaccggcucaaccacauggggaucugcuccugcggccuguacaagcagccgggggugcccacccgcuggaagcggugaggacuagucccuguucccagagcccacuuuuuuuucuuuuuuugaaauaaaauagccugucuuucagaucucaaaggcucuuuucagagccaccaaaaaaaaaaaaaaaaaaaaaaaaaaaaaaaaaaaaaaaaaaaaaaaaaaaaaaaaaaaaaaaaaaaaaaaaaaaaaaaaaaaaaaaaaaaaaaaaaaaaa

SEQ ID NO: 15342 - RNA, 1745 nt, Artificial Sequence
  mRNA product Design a-1 (hSL-A100) comprising derived and/or modified sequence from LASV(KAK-428;Clade n.d. (VII))__ANH09740__GPCmut1 (opt1)
aggagagucccgcagucggcguccagcggcucugcuuguucgugugugugucguugcaggccuuauucaagcuuaccaugggccagaucgugaccuucuuccaggaggucccccacgugaucgaggaggugaugaacaucguccugaucgcccucagccugcuggccauccucaaggggcuguacaacuucgcgaccugcggcgugaucgggcugaucacguuccuccugcugugcggccgcuccugcagcgccaccuacaaggggcaguacgagcuccagacccuggagcugaacauggagucccucaacaugaccaugccgcugagcugcacgaagaacaacucccaccacuacauccgggccggcaacaacaccggccuggagcucacccugaccaacacgagcaucaucucccacaaguucugcaaccugagcgacgcccacaagaagaaccucuacgaccacacccugauguccaucaucaccaccuuccaccugagcauccccaacuucaaccaguacgaggccauguccugcgacuucaacgggggcaagaucagcauccaguacaaccucucccacagcuacgcgggggacgccgcccagcacugcggcacgguggccaacgggguccugcagaccuucaugcgcauggcguggggcggcuccuaccuggcccucgacagcgggugccgcggcugggacugcaucaucuccagcuaccaguaccugaucauccagaacaccaccugggacgaccacugccaguucucccggcccagccccaucggguaccugggcuucgugagccagaagacgcgcgacaucuacaucucccggcgccgccggggcaccuucaccuggacccugagcgacuccgaggggcacgacaugccgggcggguacugccucacgcgguggaugcugaucgaggccgaccugaagugcuucggcaacaccgccguggccaagugcaacgagaagcacgacgaggaguucugcgacauguggcgccucuucgacuucaacaagcaggcgauccagcggcugaaggcccccgcccagaugaacauccagcugaucaacaaggccgucaacgcccucaucaacgaccagcugaugaugaagaaccaccuccgcgacaucaugugcauccccuacugcaacuacagcaaguucugguaccugaacaacaccaccacgggccggaccucccugccccgcugcuggcugaucagcaacggcuccuaccucaacgagacccacuucagcgacgacaucgagcagcaggcggacaacaugaucaccgagaugcugcagaaggaguacauggaccggcaggggaagacgccccugggccucguggaccuguucguguucuccaccagcuucuaccugaucaccaucuuccuccaccuggucaagaucccgacccaccgccacaucguggggaagcccugccccaagccccaccggcugaaccacaugggcaucugcuccugcgggcuguacaagcagccgggcgugcccguccgcuggaagcggugaggacuagucccuguucccagagcccacuuuuuuuucuuuuuuugaaauaaaauagccugucuuucagaucucaaaggcucuuuucagagccaccaaaaaaaaaaaaaaaaaaaaaaaaaaaaaaaaaaaaaaaaaaaaaaaaaaaaaaaaaaaaaaaaaaaaaaaaaaaaaaaaaaaaaaaaaaaaaaaaaaaaa

SEQ ID NO: 15343 - RNA, 1745 nt, Artificial Sequence; identical to SEQ ID NO: 15337
  mRNA product Design a-1 (hSL-A100) comprising derived and/or modified sequence from LASV(Pinneo-NIG-1969;Clade I)__AIT17836__GPCmut1 (opt1)

SEQ ID NO: 15344 - RNA, 1745 nt, Artificial Sequence
  mRNA product Design a-1 (hSL-A100) comprising derived and/or modified sequence from LASV(ISTH0009-NIG-2011;Clade II)__AIT17404__GPCmut1 (opt1)
aggagagucccgcagucggcguccagcggcucugcuuguucgugugugugucguugcaggccuuauucaagcuuaccaugggccagaucaucaccuucuuccaggaggugccccacgucaucgaggaggugaugaacaucgugcugaucgcccucagccugcuggccauccucaaggggaucuacaacgucgcgaccugcggccuguucgggcugguguccuuccuccugcugugcggccgcagcugcuccacgaccuacaaggggguguacgagcuccagacccuggagcuggacauggccagccucaacaugaccaugccgcuguccugcacgaagaacaacagccaccacuacaucauggucggcaacgagaccggccuggagcucacccugaccaacacguccaucaucaaccacaaguucugcaaccugagcgacgcccacaagaagaaccucuacgaccacgcccugauguccaucaucagcaccuuccaccuguccauccccaacuucaaccaguacgaggccaugagcugcgacuucaacgggggcaagaucuccgugcaguacaaccucagccacgcguacgccguggacgccgccaaccacugcgggaccaucgcgaacggcguccugcagaccuucaugcggauggccuggggcggguccuacaucgcccuggacagcggcugcggguccugggacugcaucaugacgagcuaccaguaccucaucauccagaacaccaccugggaggaccacugccaguucucccgccccagccccaucggcuaccuggggcugcucagccagcggacccgcgacaucuacaucucccggcgccgccggggcacguucaccuggacccucagcgacuccgagggcaacgagacccccgggggcuacugccugacgcgguggaugcugaucgaggccgagcucaagugcuucgggaacaccgccguggcgaagugcaacgagaagcacgacgaggaguucugcgacaugcugcgccuguucgacuucaacaagcaggccauccggcgccucaagacccccgcccagaugagcauccagcugaucaacaaggccgugaacgcccugaucaacgaccagcucaucaugaagaaccaccuccgggacaucaugugcaucccguacugcaacuacuccaaguacugguaccugaaccacaccgucacggggaagaccagccugccccgcugcuggcugguguccaacggcagcuaccugaacgagacccacuucuccgacgacaucgagcagcaggcggacaacaugaucaccgagcuccugcagaaggaguacauggaccggcagggcaagacgccccuggggcucguggaccuguucgucuucagcaccuccuucuaccugaucagcaucuuccugcaccucaucaagaucccgacccaccgccacaucaccggcaagcccugccccaagccccaccggcugaaccacauggggaucugcuccugcggccuguacaagcacccgggggugcccgugaaguggaagcgcugaggacuagucccuguucccagagcccacuuuuuuuucuuuuuuugaaauaaaauagccugucuuucagaucucaaaggcucuuuucagagccaccaaaaaaaaaaaaaaaaaaaaaaaaaaaaaaaaaaaaaaaaaaaaaaaaaaaaaaaaaaaaaaaaaaaaaaaaaaaaaaaaaaaaaaaaaaaaaaaaaaaaa

SEQ ID NO: 15345 - RNA, 1745 nt, Artificial Sequence
  mRNA product Design a-1 (hSL-A100) comprising derived and/or modified sequence from LASV(ISTH2010-NIG-2012;Clade II)__AIT17482__GPCmut1 (opt1)
aggagagucccgcagucggcguccagcggcucugcuuguucgugugugugucguugcaggccuuauucaagcuuaccaugggccagaucaucaccuucuuccaggaggugccccacgucaucgaggaggugaugaacaucgugcugaucgcccucagccugcuggccauccucaaggggaucuacaacgucgcgaccugcggccuguucgggcugguguccuuccuccugcugugcggccgcagcugcuccacgaccuacaaggggguguacgagcuccagacccuggagcuggacauggccagccucaacaugaccaugccgcuguccugcacgaagaacaacagccaccacuacaucauggucggcaacgagaccggccuggagcucacccugaccaacacguccaucaucaaccacaaguucugcaaccugagcgacgcccacaagaagaaccucuacgaccacgcccugauguccaucaucagcaccuuccaccuguccauccccaacuucaaccaguacgaggccaugagcugcgacuucaacgggggcaagaucuccgugcaguacaaccucagccacgcguacgccguggacgccgccaaccacugcgggaccaucgcgaacggcguccugcagaccuucaugcggauggccuggggcggguccuacaucgcccuggacagcggcugcggguccugggacugcaucaugacgagcuaccaguaccucaucauccagaacaucaccugggaggaccacugccaguucucccgccccagccccaucggcuaccuggggcugcucagccagcggacccgcgacaucuacaucucccggcgccgccggggcaccuucacguggacccucagcgacuccgagggcaacgagacccccgggggcuacugccugacccgguggaugcugaucgaggccgagcucaagugcuucgggaacacggccguggcgaagugcaacgagaagcacgacgaggaguucugcgacaugcugcgccuguucgacuucaacaagcaggccauccggcgccucaagacccccgcccagaugagcauccagcugaucaacaaggccgugaacgcccugaucaacgaccagcucaucaugaagaaccaccuccgggacaucaugugcauccccuacugcaacuacuccaaguacugguaccugaaccacaccgucaccgggaagacgagccugccccgcugcuggcugguguccaacggcagcuaccugaacgagacccacuucuccgacgacaucgagcagcaggcggacaacaugaucaccgagcuccugcagaaggaguacaucgaccggcagggcaagaccccgcuggggcucguggaccuguucgucuucagcacguccuucuaccugaucagcaucuuccugcaccucgugaagaucccgacccaccgccacguggucggcaagcccugccccaagccccaccggcugaaccacauggggaucugcuccugcggccuguacaagcacccgggggugcccgugaaguggaagcgcugaggacuagucccuguucccagagcccacuuuuuuuucuuuuuuugaaauaaaauagccugucuuucagaucucaaaggcucuuuucagagccaccaaaaaaaaaaaaaaaaaaaaaaaaaaaaaaaaaaaaaaaaaaaaaaaaaaaaaaaaaaaaaaaaaaaaaaaaaaaaaaaaaaaaaaaaaaaaaaaaaaaaa

SEQ ID NO: 15346 - RNA, 1745 nt, Artificial Sequence
  mRNA product Design a-1 (hSL-A100) comprising derived and/or modified sequence from LASV(Lassa virus/H.sapiens-wt/NGA/2015/ISTH_0543;Clade II)__AVO03639__GPCmut1 (opt1)
aggagagucccgcagucggcguccagcggcucugcuuguucgugugugugucguugcaggccuuauucaagcuuaccaugggccagaucaucaccuucuuccaggaggugccccacgucaucgaggaggugaugaacaucgugcugaucgcccucagccugcuggccauccucaaggggaucuacaacgucgcgaccugcggccuguucgggcugguguccuuccuccugcugugcggccgcagcugcuccacgaccuacaaggggguguacgagcuccagacccuggagcuggacauggccaaccucaacaugaccaugccgcugagcugcacgaagaacaacucccaccacuacaucauggucggcaacgagaccggccuggagcucacccugaccaacacgagcaucaucaaccacaaguucugcaaccuguccgacgcccacaagaagaaccucuacgaccacgcccugaugagcaucaucuccaccuuccaccugagcauccccaacuucaaccaguacgaggccauguccugcgacuucaacgggggcaagaucagcgugcaguacaaccucucccacaccuacgcgguggacgccgccaaccacugcgggaccaucgccaacggcguccugcagacguucaugcggauggcguggggcgggagcuacaucgcccuggacuccggcugcgggagcugggacugcaucaugaccuccuaccaguaccucgugauccagaacaccaccugggaggaccacugccaguucagccgccccucccccaucggcuaccuggggcugcucagccagcggacgcgcgacaucuacaucagccggcgccgccggggcaccuucaccuggacccucuccgacagcgagggcaacgagacgcccgggggcuacugccugacccgguggaugcugaucgaggccgagcucaagugcuucgggaacaccgccguggccaagugcaacgagaagcacgacgaggaguucugcgacaugcugcgccuguucgacuucaacaagcaggcgauccggcgccucaagacccccgcccagauguccauccagcugaucaacaaggccgucaacgcccugaucaacgaccagcucaucaugaagaaccaccuccgggacaucaugugcauccccuacugcaacuacagcaaguacugguaccugaaccacacggugaccgggaagaccucccugccccgcugcuggcuggugagcaacggcuccuaccugaacgagacccacuucagcgacgacaucgagcagcaggccgacaacaugaucacggagcuccugcagaaggaguacaucgaccggcagggcaagaccccgcuggggcucgucgaccuguucguguucuccaccagcuucuaccugaucuccaucuuccugcaccucgugaagaucccgacccaccgccacaucacgggcaagcccugccccaagccccaccggcugaaccacauggggaucugcagcugcggccuguacaagcacccggggguccccgugaaguggaagcgcugaggacuagucccuguucccagagcccacuuuuuuuucuuuuuuugaaauaaaauagccugucuuucagaucucaaaggcucuuuucagagccaccaaaaaaaaaaaaaaaaaaaaaaaaaaaaaaaaaaaaaaaaaaaaaaaaaaaaaaaaaaaaaaaaaaaaaaaaaaaaaaaaaaaaaaaaaaaaaaaaaaaaa

SEQ ID NO: 15347 - RNA, 1745 nt, Artificial Sequence
  mRNA product Design a-1 (hSL-A100) comprising derived and/or modified sequence from LASV(Lassa virus/H.sapiens-wt/NGA/2016/ISTH_0009;Clade II)__AVO03571__GPCmut1 (opt1)
aggagagucccgcagucggcguccagcggcucugcuuguucgugugugugucguugcaggccuuauucaagcuuaccaugggccagaucaucaccuucuuccaggaggugccccacgucaucgaggaggugaugaacaucgugcugaucgcccucagccugcuggccauccucaaggggaucuacaacgucgcgaccugcggccugcuggggcucguguccuuccugcugcucugcggccgcagcugcuccacgaccuacaaggggguguacgagcugcagacccuggagcucgacauggccagccugaacaugaccaugccgcuguccugcacgaagaacaacagccaccacuacaucauggucggcaacgagaccggccucgagcugacccugaccaacacguccaucaucaaccacaaguucugcaaccucagcgacgcccacaagaagaaccuguacgaccacgcccugauguccaucaucagcaccuuccaccucuccauccccaacuucaaccaguacgaggccaugagcugcgacuucaacgggggccggaucuccgugcaguacaaccugagccacuccuacgcgguggacgccgccaaccacugcgggaccaucgccaacggcguccugcagaccuucaugcgcauggcguggggcgggagcuacaucgcccucgacuccggcugcgggagcugggacugcaucaugacguccuaccaguaccugaucauccagaacaccaccugggaggaccacugccaguucagccggcccagccccaucggcuaccuggggcuccugucccagcgcacccgggacaucuacaucagccgccggcgccggggcacguucaccuggacccuguccgacagcgagggcaacgagacccccgggggcuacugccugacgcgcuggaugcucaucgaggccgagcugaagugcuucgggaacaccgccguggccaagugcaacgagaagcacgacgaggaguucugcgacaugcugcggcuguucgacuucaacaagcaggcgauccgccggcugaagacccccgcccagauguccauccagcugaucaacaaggccgugaacgcccucaucaacgaccagcugaucaugaagaaccaccuccgcgacaucaugugcaucccguacugcaacuacagcaaguacugguaccucaaccacaccgucacggggaagaccucccugccccggugcuggcuggugagcaacggcuccuaccucaacgagacccacuucagcgacgacaucgagcagcaggccgacaacaugaucaccgagcugcugcagaaggaguacaucgaccgccagggcaagacgccccucgggcugguggaccuguucgucuucuccaccagcuucuaccugaucuccaucuuccuccaccuggugaagaucccgacccaccggcacaucaccggcaagcccugccccaagccccaccgccugaaccacauggggaucugcagcugcggccucuacaaccacccgggggugcccgucaaguggaagcggugaggacuagucccuguucccagagcccacuuuuuuuucuuuuuuugaaauaaaauagccugucuuucagaucucaaaggcucuuuucagagccaccaaaaaaaaaaaaaaaaaaaaaaaaaaaaaaaaaaaaaaaaaaaaaaaaaaaaaaaaaaaaaaaaaaaaaaaaaaaaaaaaaaaaaaaaaaaaaaaaaaaaa

SEQ ID NO: 15348 - RNA, 1745 nt, Artificial Sequence
  mRNA product Design a-1 (hSL-A100) comprising derived and/or modified sequence from LASV(Lassa virus/H.sapiens-wt/NGA/2016/ISTH_0017;Clade II)__AVO03567__GPCmut1 (opt1)
aggagagucccgcagucggcguccagcggcucugcuuguucgugugugugucguugcaggccuuauucaagcuuaccaugggccagaucaucaccuucuuccaggaggugccccacgucaucgaggaggugaugaacaucgugcugaucgcccucagccugcuggccauccucaaggggaucuacaacgucgcgaccugcggccuguucgggcugguguccuuccuccugcugugcggccgcagcugcuccacgaccuacaaggggguguacgagcuccagacccuggagcuggacauggccagccucaacaugaccaugccgcuguccugcacgaagaacaacagccaccacuacaucauggucggcaacgagaccggccuggagcucacccugaccaacacguccaucaucaaccacaaguucugcaaccugagcgacgcccacaagaagaaccucuacgaccacgcccugauguccaucaucagcaccuuccaccuguccauccccaacuucaaccaguacgaggccaugagcugcgacuucaacgggggcaagaucuccgugcaguacaaccucagccacaccuacgcgaucgacgccgccaaccacugcgggaccaucgccaacggcgugcugcagacguucaugcggauggcguggggcggguccuacaucgcccuggacagcggcugcggguccugggacugcaucaugaccagcuaccaguaccucaucauccagaacaccaccugggaggaccacugccaguucucccgccccagccccaucggcuaccuggggcugcucagccagcggacgcgcgacaucuacaucucccggcgccgccggggcaccuucaccuggacccucagcgacuccgagggcaacgagacgcccgggggcuacugccugacccgguggaugcugaucgaggccgagcucaagugcuucgggaacaccgccgucgccaagugcaacgagaagcacgacgaggaguucugcgacaugcugcgccuguucgacuucaacaagcaggcgauccggcgccucaagacccccgcccagaugagcauccagcugaucaacaaggccgugaacgcccugaucaacgaccagcucaucaugaagaaccaccuccgggacaucaugugcauccccuacugcaacuacuccaaguacugguaccugaaccacacggugaccgggaagaccagccugccccgcugcuggcuggucuccaacggcagcuaccugaacgagacccacuucuccgacgacaucgagcagcaggccgacaacaugaucacggagcuccugcagaaggaguacauggaccggcagggcaagaccccgcuggggcucguggaccuguucguguucagcaccuccuucuaccugaucagcaucuuccugcaccucguccgcaucccgacccaccggcacgugaucggcaagcccugccccaagccccaccgccugaaccacauggggaucugcuccugcggccuguacaagcacccgggggugcccgucaaguggaagcggugaggacuagucccuguucccagagcccacuuuuuuuucuuuuuuugaaauaaaauagccugucuuucagaucucaaaggcucuuuucagagccaccaaaaaaaaaaaaaaaaaaaaaaaaaaaaaaaaaaaaaaaaaaaaaaaaaaaaaaaaaaaaaaaaaaaaaaaaaaaaaaaaaaaaaaaaaaaaaaaaaaaaa

SEQ ID NO: 15349 - RNA, 1745 nt, Artificial Sequence
  mRNA product Design a-1 (hSL-A100) comprising derived and/or modified sequence from LASV(Lassa virus/H.sapiens-wt/NGA/2018/ISTH_0959;Clade II)__AVV65099__GPCmut1 (opt1)
aggagagucccgcagucggcguccagcggcucugcuuguucgugugugugucguugcaggccuuauucaagcuuaccaugggccagaucaucaccuucuuccaggaggugccccacgucaucgaggaggugaugaacaucgugcugaucgcccucagccugcuggccauccucaaggggaucuacaacgucgugaccugcggccuguucgggcugguguccuuccuccugcugugcggccgcagcugcuccacgaccuacaagggggucuacgagcuccagacccuggagcuggacauggcgagccucaacaugaccaugccgcuguccugcacgaagaacaacagccaccacuacaucauggugggcaacgagaccggccuggagcucacccugaccaacacguccaucaucaaccacaaguucugcaaccugagcgacgcccacaagaagaaccucuacgaccacgcccugauguccaucaucagcaccuuccaccuguccauccccaacuucaaccaguacgaggccaugagcugcgacuucaacgggggcaagaucuccgugcaguacaaccucagccacgccuacgcgaucgacgccgccaaccacugcgggaccaucgccaacggcguccugcagaccuucaugcggauggcguggggcggguccuacaucgcccuggacagcggcugcggguccugggacugcaucaugacgagcuaccaguaccucaucauccagaacaccaccugggaggaccacugccaguucucccgccccagccccaucggcuaccuggggcugcucagccagcggacccgcgacaucuacaucucccggcgccgccggggcacguucaccuggacccucagcgacuccgagggcaacgagacccccgggggcuacugccugacgcgguggaugcugaucgaggccgagcucaagugcuucgggaacaccgccguggccaagugcaacgagaagcacgacgaggaguucugcgacaugcugcgccuguucgacuucaacaagcaggcgauccggcgccucaagacccccgcccagaugagcauccagcugaucaacaaggccgugaacgcccugaucaacgaccagcucaucaugaagaaccaccuccgggacaucaugugcaucccguacugcaacuacuccaaguacugguaccugaaccacaccgucacggggaagaccagccugccccgcugcuggcugguguccaacggcagcuaccugaacgagacccacuucuccgacgacaucgagcagcaggccgacaacaugaucaccgagcuccugcagaaggaguacaucgaccggcagggcaagacgccccuggggcucguggaccuguucgucuucagcaccuccuucuaccugaucagcaucuuccugcaccucgugaagaucccgacccaccgccacgugaucggcaagcccugccccaagccccaccggcugaaccacauggggaucugcuccugcggccuguacaagcacccggggguccccgugaaguggaagcgcugaggacuagucccuguucccagagcccacuuuuuuuucuuuuuuugaaauaaaauagccugucuuucagaucucaaaggcucuuuucagagccaccaaaaaaaaaaaaaaaaaaaaaaaaaaaaaaaaaaaaaaaaaaaaaaaaaaaaaaaaaaaaaaaaaaaaaaaaaaaaaaaaaaaaaaaaaaaaaaaaaaaaa

SEQ ID NO: 15350 - RNA, 1745 nt, Artificial Sequence
  mRNA product Design a-1 (hSL-A100) comprising derived and/or modified sequence from LASV(LASV003-NIG-2008;Clade II)__AIT17580__GPCmut1 (opt1)
aggagagucccgcagucggcguccagcggcucugcuuguucgugugugugucguugcaggccuuauucaagcuuaccaugggccagaucaucaccuucuuccaggaggugccccacgucaucgaggaggugaugaacaucgugcugaucgcccucagccugcuggccauccucaaggggaucuacaacgucgcgaccugcggccuguucgggcugguguccuuccuccugcugugcggccgcagcugcuccacgaccuacaaggggguguacgagcuccagacccuggagcuggacauggccagccucaacaugaccaugccgcuguccugcacgaagaacaacagccaccacuacaucauggucggcaacgagaccggccuggagcucacccugaccaacacguccaucaucaaccacaaguucugcaaccugagcgacgcccacaagaagaaccucuacgaccacgcccugauguccaucaucagcaccuuccaccuguccauccccaacuucaaccaguacgaggccaugagcugcgacuucaacgggggcaagaucuccgugcaguacaaccucagccacaccuacgcgguggacgccgccaaccacugcgggaccaucgccaacggcguccugcagacguucaugcggauggcguggggcggguccuacaucgcccuggacagcggcugcggguccugggacugcaucaugaccagcuaccaguaccucaucauccagaacaccaccugggaggaccacugccaguucucccgccccagccccaucggcuaccuggggcugcucagccagcggacgcgcgacaucuacaucucccggcgccgccggggcaccuucaccuggacccucagcgacuccgagagcaacgagacgccgggcggguacugccugacccgguggaugcugaucgaggccgagcucaagugcuucggcaacaccgccguggccaagugcaacgagaagcacgacgaggaguucugcgacaugcugcgccuguucgacuucaacaagcaggcgauccggcgccucaaggcccccgcccagauguccauccagcugaucaacaaggccgugaacgcccugaucaacgaccagcucaucaugaagaaccaccuccgggacaucaugugcauccccuacugcaacuacagcaaguacugguaccugaaccacaccgucacgggccgcaccucccugccccggugcuggcuggugagcaacggguccuaccugaacgagacccacuucagcgacgacaucgagcagcaggcggacaacaugaucaccgagcuccugcagaaggaguacauggaccgccagggcaagacgccccugggccucguggaccuguucgucuucuccaccagcuucuaccugaucuccaucuuccugcaccucgugaagaucccgacccaccggcacgugaucgggaagcccugccccaagccccaccgccugaaccacaugggcaucugcagcugcgggcuguacaagcacccgggcguccccgugaaguggaagcggugaggacuagucccuguucccagagcccacuuuuuuuucuuuuuuugaaauaaaauagccugucuuucagaucucaaaggcucuuuucagagccaccaaaaaaaaaaaaaaaaaaaaaaaaaaaaaaaaaaaaaaaaaaaaaaaaaaaaaaaaaaaaaaaaaaaaaaaaaaaaaaaaaaaaaaaaaaaaaaaaaaaaa

SEQ ID NO: 15351 - RNA, 1745 nt, Artificial Sequence
  mRNA product Design a-1 (hSL-A100) comprising derived and/or modified sequence from LASV(LASV035-NIG-2009;Clade II)__AIT17588__GPCmut1 (opt1)
aggagagucccgcagucggcguccagcggcucugcuuguucgugugugugucguugcaggccuuauucaagcuuaccaugggccagaucaucaccuucuuccaggaggugccccacgucaucgaggaggugaugaacaucgugcugaucgcccucagccugcuggccauccucaaggggaucuacaacgucgcgaccugcggccuguucgggcugguguccuuccuccugcugugcggccgcagcugcuccacgaccuacaaggggguguacgagcuccagacccuggagcuggacauggccagccucaacaugaccaugccgcuguccugcacgaagaacaacagccaccacuacaucauggucggcaacgagaccggccuggagcucacccugaccaacacguccaucaucaaccacaaguucugcaaccugagcgacgcccacaagaagaaccucuacgaccacgcccugauguccaucaucagcaccuuccaccuguccauccccaacuucaaccaguacgaggccaugagcugcgacuucaacgggggcaagaucuccgugcaguacaaccucagccacgcguacgccguggacgccgccaaccacugcgggaccaucgcgaacggcguccugcagaccuucaugcggauggccuggggcggguccuacaucgcccuggacagcggcugcggguccugggacugcaucaugacgagcuaccaguaccucaucauccagaacaccaccugggaggaccacugccaguucucccgccccagccccaucggcuaccuggggcugcucagccagcggacccgcgacaucuacaucucccggcgccgccggggcacguucaccuggacccucagcgacuccgagggcaacgagacccccgggggcuacugccugacgcgguggaugcugaucgaggccgagcucaagugcuucgggaacaccgccguggcgaagugcaacgagaagcacgacgaggaguucugcgacaugcugcgccuguucgacuucaacaagcaggccauccggcgccucaaggcccccgcccagaugagcauccagcugaucaacaaggccgugaacgcgcugaucaacgaccagcucaucaugaagaaccaccuccgggacaucaugugcauccccuacugcaacuacuccaaguacugguaccugaaccacaccgucaccgggaagacgagccugccccgcugcuggcugguguccaacggcagcuaccugaacgagacccacuucuccgacgacaucgagcagcaggccgacaacaugaucaccgagcuccugcagaaggaguacaucgaccggcagggcaagaccccgcuggggcucguggaccuguucgucuucagcacguccuucuaccugaucagcaucuuccugcaccucgugaagaucccgacccaccgccacgugaucggcaagcccugccccaagccccaccggcugaaccacauggggaucugcuccugcggccuguacaagcacccggggguccccgugaaguggaagcgcugaggacuagucccuguucccagagcccacuuuuuuuucuuuuuuugaaauaaaauagccugucuuucagaucucaaaggcucuuuucagagccaccaaaaaaaaaaaaaaaaaaaaaaaaaaaaaaaaaaaaaaaaaaaaaaaaaaaaaaaaaaaaaaaaaaaaaaaaaaaaaaaaaaaaaaaaaaaaaaaaaaaaa

SEQ ID NO: 15352 - RNA, 1745 nt, Artificial Sequence
  mRNA product Design a-1 (hSL-A100) comprising derived and/or modified sequence from LASV(LASV1000-NIG-2009;Clade II)__AIT17782__GPCmut1 (opt1)
aggagagucccgcagucggcguccagcggcucugcuuguucgugugugugucguugcaggccuuauucaagcuuaccaugggccagaucaucaccuucuuccaggaggugccccacgucaucgaggaggugaugaacaucgugcugaucgcccucagccugcuggccauccucaaggggaucuacaacgucgcgaccugcggccuguucgggcugguguccuuccuccugcugugcggccgcagcugcuccacgaccuacaaggggguguacgagcuccagacccuggagcuggacauggccagccucaacaugaccaugccgcuguccugcacgaagaacaacagccaccacuacaucauggucggcaacgagaccggccuggagcucacccugaccaacacguccaucaucaaccacaaguucugcaaccugagcgacgcccacaagaagaaccucuacgaccacgcccugauguccaucaucagcaccuuccaccuguccauccccaacuucaaccaguacgaggccaugagcugcgacuucaacgggggcaagaucuccgugcaguacaaccucagccacaccuacgcgguggacgccgccaaccacugcgggaccaucgccaacggcguccugcagacguucaugcggauggcguggggcggguccuacaucgcccuggacagcggcugcggguccugggacugcaucaugaccagcuaccaguaccucaucauccagaacaccaccugggaggaccacugccaguucucccgccccagccccaucggcuaccuggggcugcucagccagcggacgcgcgacaucuacaucucccggcgccgccggggcaccuucaccuggacccucagcgacuccgagggcaacgagacgcccgggggcuacugccugacccgguggaugcugaucgaggccgagcucaagugcuucgggaacaccgccguggccaagugcaacgagaagcacgacgaggaguucugcgacaugcugcgccuguucgacuucaacaagcaggcgaucaagcggcucaagacccccgcccagaugagcauccagcugaucaacaaggccgugaacgcccugaucaacgaccagcucaucaugaagaaccaccuccgcgacaucaugugcauccccuacugcaacuacuccaaguacugguaccugaaccacacggucaccgggaagaccagccugccccggugcuggcugguguccaacggcagcuaccugaacgagacccacuucuccgacgacaucgagcagcaggccgacaacaugaucacggagcuccugcagaaggaguacaucgaccgccagggcaagaccccgcuggggcucguggaccuguucgucuucagcaccuccuucuaccugaucagcaucuuccugcaccucgugaagaucccgacccaccggcacguggucggcaagcccugccccaagccccaccgccugaaccacauggggaucugcuccugcggccuguacaagcacccgggggugcccgugaaguggaagcggugaggacuagucccuguucccagagcccacuuuuuuuucuuuuuuugaaauaaaauagccugucuuucagaucucaaaggcucuuuucagagccaccaaaaaaaaaaaaaaaaaaaaaaaaaaaaaaaaaaaaaaaaaaaaaaaaaaaaaaaaaaaaaaaaaaaaaaaaaaaaaaaaaaaaaaaaaaaaaaaaaaaaa
